(19) United States
(12) Patent Application Publication
(10) Pub. No.: US 2011/0182862 A1
(43) Pub. Date: Jul. 28, 2011

(54) ENDOPHYTIC FUNGUS AND USES THEREFOR

(76) Inventors: Wayne A. Green, Encinitas, CA (US); Markus J. Herrgard, San Diego, CA (US); Janne S. Kerovuo, San Diego, CA (US); David Lomelin, Encinitas, CA (US); Eric J. Mathur, Encinitas, CA (US); Toby H. Richardson, San Diego, CA (US); Ariel S. Schwartz, San Diego, CA (US); Gary A. Strobel, Bozeman, MT (US)

(21) Appl. No.: 12/753,760

(22) Filed: Apr. 2, 2010

Related U.S. Application Data
(60) Provisional application No. 61/166,681, filed on Apr. 3, 2009.
(60) Provisional application No. 61/230,648, filed on Jul. 31, 2009.

(51) Int. Cl. A01N 63/00; C12N 1/14; A01H 5/00; A01H 5/10; C12Q 1/02; C07H 21/00; C07K 2/00; C12N 1/15; A01P 5/00; A01P 1/00

(52) U.S. Cl. 424/93.5; 435/254.1; 800/298; 435/29; 536/23.1; 530/300; 435/254.11

(57) ABSTRACT

The present invention provides novel microorganisms, compositions and methods of use thereof, for treating, inhibiting or preventing the developing of a plant pathogenic disease and for killing or inhibiting growth of a variety of pests or pathogens. Provided are compositions comprising a novel endophytic fungal organism effective to inhibit the growth of or kill pests and pathogenic microbes, including Ganoderma boninense. Invention compositions are especially useful in preventing and treating basal stem rot in the oil palm, and can be applied on or in the vicinity of the plant or used to sterilize the plant growth medium prior to or concurrent with plant growth therein. The disclosure further provides substantially purified polynucleotides and polypeptides encoded thereby, together with methods of using those products, for example for making transgenic organism.

### CROSS REFERENCES TO RELATED APPLICATIONS

[0001] This nonprovisional application claims priority under 35 U.S.C. §119(e) to U.S. Patent Application No. 61/166,681 filed on Apr. 3, 2009 and U.S. Patent Application No. 61/230,648 filed on Jul. 31, 2009, the entire contents of which are hereby incorporated by reference.

### INCORPORATION OF THE SEQUENCE LISTING

[0002] The content of the following submission on compact discs is incorporated herein by reference in its entirety: A computer readable form (CRF) of the Sequence Listing on compact disc (file name: SGI1180-4_ST25.txt, date recorded: Apr. 2, 2010, size: 158,925 KB); a duplicate compact disc copy of the Sequence Listing (COPY 1) (file name: SGI1180-4_ST25.txt, date recorded: Apr. 2, 2010, size: 158,925 KB); and a duplicate compact disc copy of the Sequence Listing (COPY 2) (file name: SGI1180-4_ST25.txt, date recorded: Apr. 2, 2010, size: 158,925 KB).

### FIELD OF THE INVENTION

[0003] The present invention relates to the isolation and characterization of a novel endophytic fungal species that produces volatile organic compounds with biological activity against plant pathogens, particularly Ganoderma boninense, which is a causative agent of various plantation plant diseases, such as the oil palm disease Ganoderma Basal Stem Rot.

### BACKGROUND OF THE INVENTION

[0004] Oil palm, Elaeis guineensis, is the most important plantation crop in Malaysia. Four tons of palm oil are produced per hectare of cultivated palm trees on an annual basis. Many small private landowners are able to profit from the production and sale of the palm oil, making this an activity of great economic importance. Presently, Malaysia's oil palm industry is under threat as it is faced with a very serious plant disease problem. This problem is a prevailing and thus far incurable oil palm disease called Ganoderma Basal Stem Rot (BSR) caused by the fungus Ganoderma boninense. BSR is rapidly becoming the major threat to oil palm cultivation and palm oil production in Southeast Asia.

[0005] In BSR disease, basal stem rot is only one part of the disease cycle. Ganoderma boninense also causes a seedling disease and an upper stem rot of more developed palms. An understanding of spore dispersal of this pathogen provides an insight into the multiple roles of G. boninense spores in the infection process, leading to the three distinct phases of this important plant disease. This pathogenic organism is also prevalent on other major plantation plants including coconut, betel nut, tea, cacao, acacia and poplar.

[0006] With no effective cure at present, BSR has a huge economic impact to the Malaysian oil palm industry. Thus, plant health is crucial in obtaining maximal productivity of the oil palm and techniques, methods and management ideas are needed to control BSR. Attempts to control this disease with agrochemicals have not been very successful. This could be due to the fact that the oil palms already possessed latent fungal infections at the time of the chemical treatment. Biological control agents have also been tried against Ganoderma with limited success. Saprophytic organisms (such as Trichoderma harzianum) merely arrest the spread of disease by competing against Ganoderma to reduce its opportunity to colonize oil palm roots.

[0007] BSR is a particular concern because the activity of replanting oil palms can accelerate spread of the disease. It is well known that successive replanting of oil palms can be rapidly exploited by soil borne fungi such as Ganoderma. Soils that continuously support the growth of palms eventually act as a reservoir for Ganoderma fruiting structures and spores of this organism. Soils that are replanted with new palms are immediately exposed to a high load of inoculum (spores) and eventually become infected by Ganoderma boninense.

[0008] It is widely believed that the problem of basal stem rot of palm will become more serious later in the 21st century as more and more established plantations become due for second or even third replanting. Environmental considerations, coupled with governmental directives, will reduce exploitation of new forest areas, making further replanting of these crops inevitable. There is a need for integrated management systems for Ganoderma and related diseases to maintain the success of the oil palm industry.

[0009] An endophyte is an endosymbiont, often a bacterium or fungus, that lives within a plant for at least part of its life without causing apparent disease. Endophytes are ubiquitous and have been found in all the species of plants studied to date Endophytes may be transmitted either vertically (directly from parent to offspring) or horizontally (from individual to unrelated individual). Vertically transmitted fungal endophytes are typically asexual and transmit from the maternal plant to offspring via fungal hyphae penetrating the host's seeds. Since their reproductive fitness is intimately tied to that of their host plant, these fungi are often mutualistic. Conversely, horizontally transmitted fungal endophytes are sexual and transmit via spores that can be spread by wind and/or insect vectors. Endophytes can benefit host plants by preventing pathogenic organisms from colonizing them. Extensive colonization of the plant tissue by endophytes creates a “barrier effect”, where the local endophytes outcompete and prevent pathogenic organisms from taking hold. Endophytes may also produce chemicals which inhibit the growth of competitors, including pathogenic organisms.

[0010] Various endophytes, particularly fungi, have been used in order to manage plant diseases by targeting the growth and viability of plant pathogens. In the case of BSR disease, the use of endophytes would also be preferred to other biological control agents as they are internal colonizers, with better ability to compete within the vascular systems, limiting Ganoderma for both nutrients and space during its proliferation. Fungi of the Muscodor genus have been successfully used to target other types of plant pathogens. There are a variety of Muscodor species, which all share the same common features of growing slowly, having a felt-like mycelium, having a distinctive odor, and having no detrimental effects on higher plants. However, there are cultural, chemical, and molecular differences between them. For instance, naphthalene and azulene derivatives are produced by Muscodor albus while Muscodor vitigenus produces only naphthalene as the most prominent volatile substance (Strobel et al., 2001, Microbiology 147: 2943-2950 and Daisy et al., 2002, Microbiology 148: 3737-3741).

[0011] The novel Muscodor species of the present invention, with unusual biochemical and biological properties, can be distinguished by the profile of the volatile organic compounds it produces, and its unparallel ability to kill plant pathogens such as Ganoderma. The Muscodor strobelii strains provided herein can be completely lethal to Ganoderma boninense. No other prior isolates of Muscodor spp. produce the same volatile organic compounds, or are capable of completely killing Ganoderma. Thus, this novel endophyte species satisfies the stated needs for effective Ganoderma control both in soil and in plants, and provides related advantages as well.

### SUMMARY OF THE INVENTION

[0012] In one aspect, the invention provides an isolated culture, or a biologically pure culture, of a strain of Muscodor strobelii. One embodiment of this aspect provides a strain deposited at the Agricultural Research Service Culture Collection and having accession number NRRL 50288. In certain preferred embodiments, the culture of strain of Muscodor strobelii is capable of producing isobutyric acid or a derivative thereof, such as isobutyric anhydride or isobutyric acid, methyl ester, optionally in combination with one or more aristolene, bergamotene, caryophyllene, gurjunene, isolongifolene, patchoulene, or a derivative of any thereof.

[0013] In some preferred embodiments, the isolated culture of Muscodor strobelii further comprises an agriculturally effective amount of a pesticidal compound or composition. The additional compound or composition may be an acaricide, a bactericide, a fungicide, an insecticide, a microbicide, a nematicide, a fertilizer, or a food preservative.

[0014] The composition in some embodiments may be in the form of a powder, a granule, a pellet, a gel, an aqueous suspension, a solution or an emulsion. The composition may be provided with a carrier. The carrier can be a seed.

[0015] Another aspect of the invention provides a method for treating, inhibiting or preventing the development of a plant pathogenic disease. The method involves applying an isolated culture of Muscodor strobelii on or in the vicinity of a host plant. In a preferred embodiment, the pathogen causing the pathogenic disease may be Aspergillus fumigatus, Botrytis cinerea, Cerpospora betae, Curvularia sp., Ganoderma boninense, Geotrichum candidum, Mycosphaerella fijiensis, Phytophthora palmivora, Phytophthora ramorum, Pythium ultimum, Rhizoctonia solani, Rhizopus sp., Schizophyllum sp., Sclerotinia sclerotiorum, Verticillium dahliae, or Xanthomonas axonopodis. In another preferred embodiment, the host plant is susceptible to disease caused by Ganoderma boninense. In another preferred embodiment, the host plant is an oil plam plant. In certain embodiments, the Muscodor strobelii is established as an endophyte on the plant.

[0016] Another further aspect of the invention provides a non-naturally occurring oil palm cultivar that is an oil palm infected with an isolated culture of Muscodor strobelii. In some embodiments, the disclosure further provides seed, reproductive tissue, vegetative tissue, plant parts, and progeny of the non-naturally occurring oil palm cultivar. In other embodiments, the present disclosure also provides products comprising material derived from a non-naturally occurring cultivar.

[0017] In another aspect of the invention, there are provided methods for treating, inhibiting or preventing a plant pathogen-related disease. In certain embodiments, the methods involve growing a culture of Muscodor strobelii in the vicinity of the host plant, or in the growth medium or soil of the host plant prior to or concurrent with plant growth in the growth medium or soil. In one or more of the above embodiments, the method is effective to kill the plant pathogen. Thus, the invention provides a method of killing a plant pathogen comprising growing a culture of Muscodor strobelii in the vicinity of the plant pathogen. In various embodiments, the plant pathogen is associated with the host plant, or is in the growth medium or soil of the host plant prior to or concurrent with plant growth in the growth medium or soil.

[0018] Another aspect of the invention provides a method for screening microbial strains that can be useful for treating, inhibiting or preventing the development of a plant pathogenic disease. The method involves (i) co-culturing a Muscodor strobelii strain with one or more candidate microbial strains, (ii) selecting one or more viable microbial strains after the co-culturing, and (iii) characterizing the one or more selected microbial strains. As described above, the screening method is used to identify one or more microbial strains useful for treating, inhibiting or preventing the development of a plant pathogenic disease. The present invention further includes the microbial strains obtained from the method as described above.

[0019] Another further aspect of the invention relates to a method for killing, inhibiting or preventing the development of an undesired organism, such as a fungus, a bacterium, a microorganism, a nematode, and an insect. The method involves exposing or contacting the organism to or with an effective amount of the invention composition.

[0020] In another further aspect of the invention, the present disclosure provides substantially purified nucleic acid molecules and the polypeptides encoded by such molecules from Muscodor strobelii. Polynucleotide and polypeptide sequences from Muscodor strobelii of the present disclosure are provided in the attached Sequence Listing.

[0021] The present disclosure also provides nucleotide sequences that hybridize under high stringency conditions to any one of the nucleotide sequences in the Sequence Listing, complements of nucleotide sequences that hybridize under high stringency conditions to any of the nucleotide sequences in the Sequence Listing, and fragments of either. The disclosure also provides nucleotides exhibiting a 70% or greater identity to any one of the nucleotide sequences in the Sequence Listing, complements of the nucleotide sequences exhibiting a 70% or greater identity to any one of the nucleotide sequences in the Sequence Listing, and fragments of either. The disclosure further provides nucleotide sequences encoding polypeptides that exhibit a 50% or greater identity to any one of the polypeptides in the Sequence Listing.

[0022] The disclosure also provides nucleotide sequences that are an interfering RNA to any one of the nucleotide sequences from Muscodor strobelii in the Sequence Listing; nucleotide sequences that are an interfering RNA to nucleotide sequences hybridizing under high stringency conditions to any one of the nucleotide sequences in the Sequence Listing; nucleotide sequences that are an interfering RNA to complements of nucleotide sequences hybridizing under high stringency conditions to any of the nucleotide sequences in the Sequence Listing; and nucleotides that are an interfering RNA to fragments of nucleotide sequences hybridizing under high stringency conditions to any one of the nucleotide sequences in the Sequence Listing or complements of nucleotide sequences hybridizing under high stringency conditions to any of the nucleotide sequences in the Sequence Listing.

[0023] The disclosure further provides nucleotide sequences that are an interfering RNA to nucleotides exhibiting a 70% or greater identity to any one of the nucleotide sequences in the Sequence Listing; nucleotides sequences that are an interfering RNA to complements of the nucleotide sequences exhibiting a 70% or greater identity to any one of the nucleotide sequences in the Sequence Listing; and nucleotides that are an interfering RNA to fragments of nucleotides exhibiting a 70% or greater identity to any one of the nucleotide sequences in the Sequence Listing or complements of the nucleotide sequences exhibiting a 70% or greater identity to any one of the nucleotide sequences in the Sequence Listing.

[0024] The disclosure also provides nucleotide sequences that are an interfering RNA to nucleotide sequences encoding polypeptides that exhibit a 50% or greater identity to any one of the polypeptides in the Sequence Listing.

[0025] The disclosure further provides substantially purified polypeptides, the peptides encoded by nucleic acid molecules including nucleic acids that hybridize under high stringency conditions to any one of the nucleotide sequences in the Sequence Listing, nucleic acids that are a complement of nucleotide sequences hybridizing under high stringency conditions to any one of the nucleotide sequences in the Sequence Listing, and nucleic acids comprising a fragment of a nucleotide sequence hybridizing under high stringency conditions to any one of the nucleotide sequences in the Sequence Listing or a complement of a nucleotide sequence hybridizing under high stringency conditions to any one of the nucleotide sequences in the Sequence Listing.

[0026] The disclosure also provides substantially purified polypeptides, the peptides encoded by nucleic acid molecules including nucleic acids with a nucleotide sequence exhibiting a 70% or greater identity to any one of the nucleotide sequences in the Sequence Listing; nucleic acids that are a complement of a nucleotide sequence exhibiting a 70% or greater identity to any one of the nucleotide sequences in the Sequence Listing; and nucleic acids comprising a fragment of a nucleotide sequence exhibiting a 70% or greater identity to any one of the nucleotide sequences in the Sequence Listing or a complement of a nucleotide sequence exhibiting a 70% or greater identity to any one of the nucleotide sequences in the Sequence Listing.

[0027] The disclosure further provides substantially purified polypeptides, the peptides encoded by nucleotide sequences encoding an amino acid sequence that exhibits a 50% or greater identity to any one of the polypeptides in the Sequence Listing.

[0028] The present disclosure further provides transformed cells including a first nucleic acid molecule corresponding to any of the nucleotide sequences from Muscodor strobelii in the Sequence Listing; a nucleotide sequence hybridizing under high stringency conditions to any one of the nucleotide sequences in the Sequence Listing, a complement thereof or a fragment of either; a nucleotide sequence exhibiting a 70% or greater identity to any one of the nucleotide sequences in the Sequence Listing, a complement thereof or a fragment of either; a nucleotide sequence encoding an amino acid sequence that exhibits a 50% or greater identity to any one of the polypeptides in the Sequence Listing; or a nucleotide sequence that is an interfering RNA to any one of the nucleotide sequences from Muscodor strobelii in the Sequence Listing, to nucleotide sequences hybridizing under high stringency conditions to any one of the nucleotide sequences in the Sequence Listing, to complements of nucleotide sequences hybridizing under high stringency conditions to any of the nucleotide sequences in the Sequence Listing, to fragments of nucleotide sequences hybridizing under high stringency conditions to any one of the nucleotide sequences in the Sequence Listing or complements of nucleotide sequences hybridizing under high stringency conditions to any of the nucleotide sequences in the Sequence Listing, to nucleotides exhibiting a 70% or greater identity to any one of the nucleotide sequences in the Sequence Listing, to complements of the nucleotide sequences exhibiting a 70% or greater identity to any one of the nucleotide sequences in the Sequence Listing, to fragments of nucleotides exhibiting a 70% or greater identity to any one of the nucleotide sequences in the Sequence Listing or complements of the nucleotide sequences exhibiting a 70% or greater identity to any one of the nucleotide sequences in the Sequence Listing, and to nucleotide sequences encoding polypeptides that exhibit a 50% or greater identity to any one of the polypeptides in the Sequence Listing. The first nucleic acid molecule is operably linked to a second nucleic acid molecule, which is heterologous with respect to the first nucleic acid molecule.

[0029] The disclosure also provides transgenic organisms with transformed cells including a first nucleic acid molecule corresponding to any of the nucleotide sequences from Muscodor strobelii in the Sequence Listing; a nucleotide sequence hybridizing under high stringency conditions to any one of the nucleotide sequences in the Sequence Listing, a complement thereof or a fragment of either; a nucleotide sequence exhibiting a 70% or greater identity to any one of the nucleotide sequences in the Sequence Listing, a complement thereof or a fragment of either; a nucleotide sequence encoding an amino acid sequence that exhibits a 50% or greater identity to any one of the polypeptides in the Sequence Listing; or a nucleotide sequence that is an interfering RNA to any one of the nucleotide sequences from Muscodor strobelii in the Sequence Listing, to nucleotide sequences hybridizing under high stringency conditions to any one of the nucleotide sequences in the Sequence Listing, to complements of nucleotide sequences hybridizing under high stringency conditions to any of the nucleotide sequences in the Sequence Listing, to fragments of nucleotide sequences hybridizing under high stringency conditions to any one of the nucleotide sequences in the Sequence Listing or complements of nucleotide sequences hybridizing under high stringency conditions to any of the nucleotide sequences in the Sequence Listing, to nucleotides exhibiting a 70% or greater identity to any one of the nucleotide sequences in the Sequence Listing, to complements of the nucleotide sequences exhibiting a 70% or greater identity to any one of the nucleotide sequences in the Sequence Listing, to fragments of nucleotides exhibiting a 70% or greater identity to any one of the nucleotide sequences in the Sequence Listing or complements of the nucleotide sequences exhibiting a 70% or greater identity to any one of the nucleotide sequences in the Sequence Listing, and to nucleotide sequences encoding polypeptides that exhibit a 50% or greater identity to any one of the polypeptides in the Sequence Listing. The first nucleic acid molecule is operably linked to a second nucleic acid molecule, which is heterologous with respect to the first nucleic acid molecule. In some preferred embodiments, the transgenic organism is an endophyte or a plant.

[0030] These and other objects and features of the invention will become more fully apparent when the following detailed description of the invention is read in conjunction with the accompanying drawings.

### BRIEF DESCRIPTION OF THE DRAWINGS

[0031] FIG. 1 shows a scanning electron micrograph of Muscodor strobelii, magnified at 300×.

[0032] FIG. 2 shows an infection site of Ganoderma boninense as it is attacking the rootlet of oil palm in vitro.

[0033] FIG. 3 shows GC/MS data of the SPME fiber analysis of the four samples in the soil treatment experiment described in Example 4. The compound eluting at 4.45 min is equivalent to isobutyric acid and is found only in samples containing Muscodor strobelii.

[0034] FIG. 4 shows a mixture of empty fruit bunches (EFBs) and rice used to support the growth of Muscodor strobelii. This mixture when dried can be used to treat soil and plant parts to eliminate pathogens.

### DETAILED DESCRIPTION OF THE INVENTION

### Definitions

[0035] Unless otherwise defined, all terms of art, notations and other scientific terms or terminology used herein are intended to have the meanings commonly understood by those of skill in the art to which this invention pertains. In some cases, terms with commonly understood meanings are defined herein for clarity and/or for ready reference, and the inclusion of such definitions herein should not necessarily be construed to represent a substantial difference over what is generally understood in the art. Many of the techniques and procedures described or referenced herein are well understood and commonly employed using conventional methodology by those skilled in the art.

[0036] The singular form “a”, “an”, and “the” include plural references unless the context clearly dictates otherwise. For example, the term “a cell” includes one or more cells, including mixtures thereof.

[0037] Amino acid: As used herein, the term “amino acid” refers to naturally occurring and synthetic amino acids, as well as amino acid analogs and amino acid mimetics that function in a manner similar to the naturally occurring amino acids. Naturally occurring amino acids are those encoded by the genetic code, including D/L optical isomers, as well as those amino acids that are later modified, e.g., hydroxyproline, y-carboxyglutamate, and O-phosphoserine. Amino acid analogs refer to compounds that have the same basic chemical structure as a naturally occurring amino acid, i.e., a carbon that is bound to a hydrogen, a carboxyl group, an amino group, and an R group, e.g., homoserine, norleucine, methionine sulfoxide, methionine methyl sulfonium. Such analogs have modified R groups (e.g., norleucine) or modified peptide backbones, but retain the same basic chemical structure as a naturally occurring amino acid. Amino acid mimetics refer to chemical compounds that have a structure that is different from the general chemical structure of an amino acid, but that functions in a manner similar to a naturally occurring amino acid.

[0038] Antibiotic: The term “antibiotic”, as used herein, refers to any substance that is able to kill or inhibit the growth of a microorganism. Antibiotics may be produced by any one or more of the following: 1) a microorganism, 2) a synthetic process, or 3) a semisynthetic process. An antibiotic may be a microorganism that secretes a volatile organic compound. Furthermore, an antibiotic may be a volatile organic compound secreted by a microorganism.

[0039] Bactericidal: The term “bactericidal, as used herein, refers to the ability of a substance to increase mortality or inhibit the growth rate of bacteria.

[0040] Biological control: As used herein, “biological control” is defined as control of a pathogen or insect or any other undesirable organism by the use of a second organism. An example of a known mechanism of biological control is the use of microorganisms that control root rot by out-competing fungi for space on the surface of the root, or microorganisms that either inhibit the growth of or kill the pathogen. The “host plant” in the context of biological control is the plant that is susceptible to disease caused by the pathogen. In the context of isolation of an organism, such as a fungal species, from its natural environment, the “host plant” is a plant that supports the growth of the fungus, for example, a plant of a species the fungus is an endophyte of.

[0041] Composition: A “composition” is intended to mean a combination of active agent and another compound, carrier or composition, inert (for example, a detectable agent or label or liquid carrier) or active, such as a pesticide.

[0042] Culturing: The term ‘culturing’, as used herein, refers to the propagation of organisms on or in media of various kinds.

[0043] Derivative: As used herein, a “derivative” of a chemical compound is a compound that can be chemically or biologically derived from the original compound, for example by the addition, substitution or deletion of chemical components of the original compound. For example, a derivative may be an isomer of the referenced compound, an anhydride of the referenced compound, or has one or more chemical groups added or substituted with respect to the referenced compound. For example, propanoic acid, 2-methyl, 3-methylbutyl ester is considered to be a derivative of propanoic acid.

[0044] Domain: As used herein, “Domains” are groups of substantially contiguous amino acids in a polypeptide that can be used to characterize protein families and/or parts of proteins. Such domains have a “fingerprint” or “signature” that can comprise conserved primary sequence, secondary structure, and/or three-dimensional conformation. Generally, domains are correlated with specific in vitro and/or in vivo activities. A domain can have a length of from 10 amino acids to 400 amino acids, e.g., 10 to 50 amino acids, or 25 to 100 amino acids, or 35 to 65 amino acids, or 35 to 55 amino acids, or 45 to 60 amino acids, or 200 to 300 amino acids, or 300 to 400 amino acids.

[0045] Effective amount: An “effective amount”, as used herein, is an amount sufficient to affect beneficial or desired results. An effective amount can be administered in one or more administrations. In terms of treatment, inhibition or protection, an effective amount is that amount sufficient to ameliorate, stabilize, reverse, slow or delay progression of the target infection or disease states.

[0046] Endogenous: The term “endogenous”, as used herein, refers to any component, such as a polynucleotide, polypeptide or protein sequence, which is a natural part of a cell or organism regenerated from said cell.

[0047] Exogenous: “Exogenous” with respect to a nucleic acid indicates that the nucleic acid is part of a recombinant nucleic acid construct, or is not in its natural environment. For example, an exogenous nucleic acid can be a sequence from one species introduced into another species, i.e., a heterologous nucleic acid. Typically, such an exogenous nucleic acid is introduced into the other species via a recombinant nucleic acid construct. An exogenous nucleic acid can also be a sequence that is native to an organism and that has been reintroduced into cells of that organism. An exogenous nucleic acid that includes a native sequence can often be distinguished from the naturally occurring sequence by the presence of non-natural sequences linked to the exogenous nucleic acid, e.g., non-native regulatory sequences flanking a native sequence in a recombinant nucleic acid construct. In addition, stably transformed exogenous nucleic acids typically are integrated at positions other than the position where the native sequence is found. It will be appreciated that an exogenous nucleic acid may have been introduced into a progenitor, and not into the cell under consideration. For example, a transgenic organism containing an exogenous nucleic acid can be the progeny of a sexual cross or matting between a stably transformed organism and a non-transgenic organism. Such progeny are considered to contain the exogenous nucleic acid.

[0048] Expression: As used herein, “expression” refers to the process of converting genetic information of a polynucleotide into RNA through transcription, which is catalyzed by an enzyme, RNA polymerase, and into protein, through translation of mRNA on ribosomes.

[0049] Functionally Comparable Protein: The phrase “functionally comparable protein”, as used herein, describes those proteins that have at least one characteristic in common. Such characteristics include sequence similarity, biochemical activity, transcriptional pattern similarity and phenotypic activity. Typically, the functionally comparable proteins share some sequence similarity or at least one biochemical. Within this definition, homologs, orthologs, paralogs and analogs are considered to be functionally comparable. In addition, functionally comparable proteins generally share at least one biochemical and/or phenotypic activity.

[0050] Functionally comparable proteins will give rise to the same characteristic to a similar, but not necessarily the same, degree. Typically, functionally comparable proteins give the same characteristics where the quantitative measurement due to one of the comparables is at least 20% of the other; more typically, between 30 to 40%; more typically, between 50-60%; even more typically, between 70 to 80%; even more typically, between 90 to 95%; even more typically, between 98 to 100% of the other.

[0051] Fungicidal: As used herein, “fungicidal” refers to the ability of a substance to decrease the rate of growth of fungi or to increase the mortality of fungi.

[0052] Fungus: The term “fungus” or “fungi”, as used herein, includes a wide variety of nucleated spore-bearing organisms that are devoid of chlorophyll. Examples of fungi include yeasts, molds, mildews, rusts, and mushrooms.

[0053] Heterologous polypeptides: A “Heterologous polypeptide”, as used herein, refers to a polypeptide that is not a naturally occurring polypeptide in a cell, e.g., a transgenic plant cell transformed with and expressing the coding sequence for a nitrogen transporter from a Muscodor species.

[0054] Heterologous sequences: “Heterologous sequences”, as used herein, are those that are not operatively linked or are not contiguous to each other in nature. For example, a promoter from oil palm is considered heterologous to a Muscodor strobelii coding region sequence. Also, a promoter from a gene encoding a growth factor from oil palm is considered heterologous to a sequence encoding the oil palm receptor for the growth factor. Regulatory element sequences, such as UTRs or 3′ end termination sequences that do not originate in nature from the same gene as the coding sequence, are considered heterologous to said coding sequence. Elements operatively linked in nature and contiguous to each other are not heterologous to each other. On the other hand, these same elements remain operatively linked but become heterologous if other filler sequence is placed between them. Thus, the promoter and coding sequences of an oil palm gene expressing an amino acid transporter are not heterologous to each other, but the promoter and coding sequence of an oil palm gene operatively linked in a novel manner are heterologous.

[0055] Isolated nucleic acid: An “isolated nucleic acid”, as used herein, includes a naturally-occurring nucleic acid, provided one or both of the sequences immediately flanking that nucleic acid in its naturally-occurring genome is removed or absent. Thus, an isolated nucleic acid includes, without limitation, a nucleic acid that exists as a purified molecule or a nucleic acid molecule that is incorporated into a vector or a virus. A nucleic acid existing among hundreds to millions of other nucleic acids within, for example, cDNA libraries, genomic libraries, or gel slices containing a genomic DNA restriction digest, is not to be considered an isolated nucleic acid.

[0056] Modulation: As used herein, “modulation” of the level of a compound or constituent refers to the change in the level of the indicated compound or constituent that is observed as a result of expression of, or transcription from, an exogenous nucleic acid in an endophyte cell or in a plant cell. The change in level is measured relative to the corresponding level in control endophytes or plants.

[0057] Mutant: As used herein, the term “mutant” or “variant” refers to a modification of the parental strain in which the desired biological activity is similar to that expressed by the parental strain. For example, in the case of Muscodor the “parental strain” is defined herein as the original Muscodor strain before mutagenesis. Mutants or variants may occur in nature without the intervention of man. They also are obtainable by treatment with or by a variety of methods and compositions known to those of skill in the art. For example, a parental strain may be treated with a chemical such as N-methyl-N′-nitro-N-nitrosoguanidine, ethylmethanesulfone, or by irradiation using gamma, x-ray, or UV-irradiation, or by other means well known to those practiced in the art.

[0058] Nematicidal: The term “nematicidal”, as used herein, refers to the ability of a substance to increase mortality or inhibit the growth rate of nematodes.

[0059] Nucleic acid and polynucleotide: The terms “Nucleic acid” and “polynucleotide” are used interchangeably herein, and refer to both RNA and DNA, including cDNA, genomic DNA, synthetic DNA, and DNA or RNA containing nucleic acid analogs. Polynucleotides can have any three-dimensional structure. A nucleic acid can be double-stranded or single-stranded (i.e., a sense strand or an antisense strand). Non-limiting examples of polynucleotides include genes, gene fragments, exons, introns, messenger RNA (mRNA), transfer RNA, ribosomal RNA, siRNA, micro-RNA, ribozymes, cDNA, recombinant polynucleotides, branched polynucleotides, nucleic acid probes and nucleic acid primers. A polynucleotide may contain unconventional or modified nucleotides.

[0060] Operably linked: As used herein, “operably linked” refers to the positioning of a regulatory region and a sequence to be transcribed in a nucleic acid so that the regulatory region is effective for regulating transcription or translation of the sequence. For example, to operably link a coding sequence and a regulatory region, the translation initiation site of the translational reading frame of the coding sequence is typically positioned between one and about fifty nucleotides downstream of the regulatory region. A regulatory region can, however, be positioned as much as about 5,000 nucleotides upstream of the translation initiation site, or about 2,000 nucleotides upstream of the transcription start site.

[0061] Percentage of percent identity: “Percentage of sequence identity”, as used herein, is determined by comparing two optimally locally aligned sequences over a comparison window defined by the length of the local alignment between the two sequences. The amino acid sequence in the comparison window may comprise additions or deletions (e.g., gaps or overhangs) as compared to the reference sequence (which does not comprise additions or deletions) for optimal alignment of the two sequences. Local alignment between two sequences only includes segments of each sequence that are deemed to be sufficiently similar according to a criterion that depends on the algorithm used to perform the alignment (e.g. BLAST). The percentage identity is calculated by determining the number of positions at which the identical nucleic acid base or amino acid residue occurs in both sequences to yield the number of matched positions, dividing the number of matched positions by the total number of positions in the window of comparison and multiplying the result by 100. Optimal alignment of sequences for comparison may be conducted by the local homology algorithm of Smith and Waterman (1981) Add. APL. Math. 2:482, by the global homology alignment algorithm of Needleman and Wunsch (1970) J Mol. Biol. 48:443), by the search for similarity method of Pearson and Lipman (1988) Proc. Natl. Acad. Sci. (USA) 85: 2444, by heuristic implementations of these algorithms (NCBI BLAST, WU-BLAST, BLAT, SIM, BLASTZ), or by inspection. Given that two sequences have been identified for comparison, GAP and BESTFIT are preferably employed to determine their optimal alignment. Typically, the default values of 5.00 for gap weight and 0.30 for gap weight length are used. The term “substantial sequence identity” between polynucleotide or polypeptide sequences refers to polynucleotide or polypeptide comprising a sequence that has at least 50% sequence identity, preferably at least 70%, preferably at least 80%, more preferably at least 85%, more preferably at least 90%, even more preferably at least 95%, and most preferably at least 96%, 97%, 98% or 99% sequence identity compared to a reference sequence using the programs.

[0062] Query nucleic acid and amino acid sequences can be searched against subject nucleic acid or amino acid sequences residing in public or proprietary databases. Such searches can be done using the National Center for Biotechnology Information Basic Local Alignment Search Tool (NCBI BLAST v 2.18) program. The NCBI BLAST program is available on the internet from the National Center for Biotechnology Information (blast.ncbi.nlm.nih.gov/Blast.cgi). Typically the following parameters for NCBI BLAST can be used: Filter options set to “default”, the Comparison Matrix set to “BLOSUM62”, the Gap Costs set to “Existence: 11, Extension: 1”, the Word Size set to 3, the Expect (E threshold) set to 1e-3, and the minimum length of the local alignment set to 50% of the query sequence length.

[0063] The term “pesticidal”, as used herein, refers to the ability of a substance to decrease the rate of growth of a pest, i.e., an undersired organism, or to increase the mortality of a pest.

[0064] Promoter: As used herein, a “promoter” is a nucleotide sequence capable of initiating transcription in a cell and can drive or facilitate transcription of a nucleotide sequence or fragment thereof of the instant invention. Such promoters need not be of plant origin. For example, promoters derived from plant viruses, such as the CaMV35S promoter or from Agrobacterium tumefaciens, such as the T-DNA promoters, can be useful.

[0065] Polypeptide (also peptide, protein): The term “polypeptide”, as used herein, refers to a compound of two or more subunit amino acids, amino acid analogs, or other peptidomimetics, regardless of post-translational modification, e.g., phosphorylation or glycosylation. The subunits may be linked by peptide bonds or other bonds such as, for example, ester or ether bonds. Full-length polypeptides, truncated polypeptides, point mutants, insertion mutants, splice variants, chimeric proteins, and fragments thereof are encompassed by this definition.

[0066] Progeny: As used herein, “progeny” includes descendants of a particular plant or plant line. Progeny of an instant plant include seeds formed on F₁, F₂, F₃, F₄, F₅, F₆ and subsequent generation plants, or seeds formed on BC₁, BC₂, BC₃, and subsequent generation plants, or seeds formed on F₁BC₁, F₁BC₂, F₁BC₃, and subsequent generation plants. The designation F₁ refers to the progeny of a cross between two parents that are genetically distinct. The designations F₂, F₃, F₄, F₅ and F₆ refer to subsequent generations of self- or sib-pollinated progeny of an F₁ plant.

[0067] Regulatory region: The term “regulatory region”, as used herein, refers to a nucleotide sequence that influences transcription or translation initiation and rate, and stability and/or mobility of a transcription or translation product. Such regulatory regions need not be of plant origin. Regulatory sequences include but are not limited to promoter sequences, enhancer sequences, response elements, protein recognition sites, inducible elements, protein binding sequences, 5′ and 3′ untranslated regions (UTRs), transcriptional start sites, termination sequences, polyadenylation sequences, introns, and combinations thereof. A regulatory region typically comprises at least a core (basal) promoter. A regulatory region also may include at least one control element, such as an enhancer sequence, an upstream element or an upstream activation region (UAR). For example, a suitable enhancer is a cis-regulatory element (−212 to −154) from the upstream region of the octopine synthase (ocs) gene.

[0068] Stringency: Nucleic acid molecules or fragment thereof of the present invention are capable of specifically hybridizing to other nucleic acid molecules under certain circumstances. As used herein, two nucleic acid molecules are said to be capable of specifically hybridizing to one another if the two molecules are capable of forming an anti-parallel, double-stranded nucleic acid structure. A nucleic acid molecule is said to be the “complement” of another nucleic acid molecule if they exhibit complete complementarity. As used herein, molecules are said to exhibit “complete complementarity” when every nucleotide of one of the molecules is complementary to a nucleotide of the other. Two molecules are said to be “minimally complementary” if they can hybridize to one another with sufficient stability to permit them to remain annealed to one another under at least conventional “low-stringency” conditions. Similarly, the molecules are said to be “complementary” if they can hybridize to one another with sufficient stability to permit them to remain annealed to one another under conventional “high-stringency” conditions. Conventional stringency conditions are described by Sambrook et al., In: Molecular Cloning, A Laboratory Manual, 2nd Edition, Cold Spring Harbor Press, Cold Spring Harbor, N.Y. (1989), and by Haymes et al. In: Nucleic Acid Hybridization, A Practical Approach, IRL Press, Washington, D.C. (1985). Departures from complete complementarity are therefore permissible, as long as such departures do not completely preclude the capacity of the molecules to form a double-stranded structure. Thus, in order for a nucleic acid molecule or fragment of the present invention to serve as a primer or probe it needs only be sufficiently complementary in sequence to be able to form a stable double-stranded structure under the particular solvent and salt concentrations employed.

[0069] Appropriate stringency conditions which promote DNA hybridization include, for example, 6.0× sodium chloride/sodium citrate (SSC) at about 45° C., followed by a wash of 2.0×SSC at 50° C. These conditions are known to those skilled in the art, or can be found in Current Protocols in Molecular Biology, John Wiley & Sons, N.Y. (1989), 6.3.1-6.3.6. For example, the salt concentration in the wash step can be selected from a low stringency of about 2.0×SSC at 50° C. to a high stringency of about 0.2×SSC at 50° C. In addition, the temperature in the wash step can be increased from low stringency conditions at room temperature, about 22° C., to high stringency conditions at about 65° C. Both temperature and salt may be varied, or either the temperature or the salt concentration may be held constant while the other variable is changed.

[0070] Substantially purified: The term “substantially purified”, as used herein, refers to a molecule separated from substantially all other molecules normally associated with it in its native state. More preferably a substantially purified molecule is the predominant species present in a preparation. A substantially purified molecule may be greater than 60% free, preferably 75% free, more preferably 90% free, and most preferably 95% free from the other molecules (exclusive of solvent) present in the natural mixture. The term “substantially purified” is not intended to encompass molecules present in their native state.

[0071] Translational start site: As used herein, a “translational start site” is usually an ATG in the cDNA transcript, more usually the first ATG. A single cDNA, however, may have multiple translational start sites.

[0072] Transcription start site: As used herein, a “transcription start site” is the point at which transcription is initiated. This point is typically located about 25 nucleotides downstream from a TFIID binding site, such as a TATA box. Transcription can initiate at one or more sites within the gene, and a single gene may have multiple transcriptional start sites, some of which may be specific for transcription in a particular cell-type or tissue.

[0073] Transgenic organism: As used herein, a “transgenic organism” refers to an organism which comprises within its genome a heterologous polynucleotide. Generally, the heterologous polynucleotide is stably integrated within the genome such that the polynucleotide is passed on to successive generations. The heterologous polynucleotide may be integrated into the genome alone or as part of a recombinant expression cassette. “Transgenic” is used herein to include any cell, cell line, callus, tissue, the genotype of which has been altered by the presence of heterologous nucleic acid. The term transgenic includes those transgenics initially so altered as well as those created by sexual crosses or asexual propagation from the initial transgenic. The term transgenic as used herein does not encompass the alteration of the genome (chromosomal or extra-chromosomal) by conventional plant breeding methods or by naturally occurring events such as random cross-fertilization, non-recombinant viral infection, non-recombinant bacterial transformation, non-recombinant transposition, or spontaneous mutations.

[0074] Untranslated region (UTR): An “UTR”, as used herein is any contiguous series of nucleotide bases that is transcribed, but is not translated. These untranslated regions may be associated with particular functions such as increasing mRNA message stability. Examples of UTRs include but are not limited to polyadenylation signals, termination sequences, sequences located between the transcriptional start site and the first exon (5′ UTR), and sequences located between the last exon and the end of the mRNA (3′ UTR).

[0075] Volatile: “Volatile compounds” and “volatile organic compounds” (VOCs), as used herein, are compounds that in most instances evaporate readily at ambient temperature and pressure. Generally, volatile compounds are in the vicinity of the target pathogenic organism so long as they achieve their biological effect prior to evaporation. They may be spread on or around the base of the host plant or intermixed with the growth medium or soil of the plant. Physical contact with the host plant or target pathogen is not required due to the dispersal of the volatiles through the air or soil. Thus, volatile compounds produced by the culture of the present invention must be present “in the vicinity” of the target pathogenic organism for effectiveness. The organism producing the volatile compound is thus cultured in the vicinity of the host plant or the target organism, or in the growth medium or soil of the host plant prior to or concurrent with plant growth.

[0076] Reduced expression: As used herein, “reduced expression” refers to a decrease in production of expression products (mRNA, polypeptide, or both) relative to basal or native states.

[0077] Variant: A “variant”, as used herein, is a strain having identifying characteristics of the species to which it belongs, while having at least one nucleotide sequence variation or identifiably different trait with respect to the parental strain, where the trait is genetically based (heritable). For example, for a Muscodor strobelii strain, identifiable traits include 1) the ability to produce isobutyric acid, the ability to produce at least one derivative of isobutyric acid, such as but not limited to isobutyric acid methyl ester or isobutyric anhydride (allyl 2-methylpropanoate), or the ability to produce isobutyric acid and at least one derivative of isobutyric acid; or 2) the ability to kill certain species of microorganism such as, for example, one or more of Ganoderma boninense, Phytophthora palmivora, Pythium ultimum, and Rhizoctonia solani; or 3) having a genome with greater than 95%, greater than 96%, greater than 97%, greater than 98%, or greater than 99% sequence identity to the ribosomal RNA genes of M. strobelii can be used to confirm a variant as M. strobelii.

[0078] For nucleic acids and polypeptides, the term “variant” is used herein to denote a polypeptide, protein or polynucleotide molecule with some differences, generated synthetically or naturally, in their base or amino acid sequences as compared to a reference polypeptide or polynucleotide, respectively. For example, these differences include substitutions, insertions, deletions or any desired combinations of such changes in a reference polypeptide or polypeptide. Polypeptide and protein variants can further consist of changes in charge and/or post-translational modifications (such as glycosylation, methylation. phosphorylation, etc.).

[0079] All publications and patent applications mentioned in this specification are herein incorporated by reference to the same extent as if each individual publication or patent application was specifically and individually indicated to be incorporated by reference.

[0080] No admission is made that any reference constitutes prior art. The discussion of the references states what their authors assert, and the applicants reserve the right to challenge the accuracy and pertinence of the cited documents. It will be clearly understood that, although a number of prior art publications are referred to herein, this reference does not constitute an admission that any of these documents forms part of the common general knowledge in the art.

[0081] The discussion of the general methods given herein is intended for illustrative purposes only. Other alternative methods and embodiments will be apparent to those of skill in the art upon review of this disclosure.

Isolation and Characterization of Muscodor strobelii

[0082] Applicants have isolated and characterized a novel fungal species named Muscodor strobelii. Partial 18S rDNA and ITS sequences of M. strobelii (MB-8) were determined. Whole genome DNA of Muscodor strobelii was sequenced using shotgun approach. The structural and functional annotation of the assembled genome provided approximately 14,000 gene models, the sequences of which are provided in the attached Sequence Listing. A genome-wide expression analysis was performed on M. strobelii cells grown in conditions that induce the production of VOCs. Thus, this invention provides an isolated novel fungal species designated Muscodor strobelii, and mutants and variants thereof. The biologically pure or isolated culture can be in a variety of forms, including but not limited to, still cultures, whole cultures, stored stocks of mycelium and/or hyphae (particularly glycerol stocks), stored agar plugs in glycerol/water, freeze dried stocks, and dried stocks such as mycelia dried onto filter paper or grain seeds.

[0083] “Isolated” or grammatical equivalents as used herein and in the art is understood to mean that the referred to culture is a culture fluid, pellet, scraping, dried sample, lyophilate, or section (for example, hyphae or mycelia); or a support, container, or medium such as a plate, paper, filter, matrix, straw, pipette or pipette tip, fiber, needle, gel, swab, tube, vial, particle, etc. that contains a single type of organism. In the present invention, an isolated culture of M. strobelii is a culture fluid or a scraping, pellet, dried preparation, lyophilate, or section of M. strobelii, or a support, container, or medium that contains M. strobelii, in the absence of other organisms. In some embodiments, an M. strobelii strain is provided in which M. strobelii is not in contact with a plant host.

[0084] For example, as applied to the current invention, to obtain an isolated culture of M. strobelii tissue fragments from Philodendron sp. are placed in either culture fluid or agar (e.g., mycological agar) until fungal growth occurs, as is outlined in the examples. Fungal hyphae from the fungal growth are grown and serially transferred until a culture in pure form is obtained, as measured by observation (e.g., morphological and/or genetic unity). M. strobelii can be obtained, for example, as an endophyte from a plant species, such as a Philodendron plant in Malaysia. As provided in Example 1, the M. strobelii isolate designated MB-8 was isolated from small stems of Philodendron sp taken from a plant growing in the KL forest of the University of Malaysia.

[0085] The Muscodor strobelii strain may be characterized by the production of a whitish felt-like mycelium with intertwining hyphae on potato dextrose agar (PDA). Muscodor strobelii, as isolated in Example 1, did not develop fruiting structures or spores on water agar or any other media that have been tested. The Muscodor strobelii strain is considered to be related to the family of Xylariaceae based upon 99% similarity (563/565) of its partial 18S rDNA sequences to those of Muscodor albus, whose rDNA sequences show relatedness to the Xylariaceae. However, M. strobelii is distinguished from M. albus in that it totally lacks a stretch of intergenic sequence (364 bp) in its 18S rDNA which is partially diagnostic for Muscodor albus. Partial 18S rDNA and ITS sequences of M. strobelii (MB-8) were submitted to GenBank with the following accession numbers FJ664552 and FJ664551 respectively. These two sequences were found to be 100% and 99% identical to those of Muscodor yucatanensis, respectively. For GC/MS volatile fingerprinting, M. strobelii isolate MB-8 produces volatile compounds which are, for the most part, distinct from those produced by other Muscodor spp.

[0086] The M. strobelii fungal strain is described here for the first time as novel and distinct from M. albus, M. vitigenus, and M. yucatanensis isolates. In addition to diagnostic differences between M. strobelii, M. albus, and M. yucatanensis in its rDNA sequences, the novelty of this strain is also related to the production of substances, volatile organic compounds (VOCs) that are not only inhibitory but are lethal to Ganoderma boninense.

[0087] The invention provides a new species of fungus, M. strobelii that has the ability to kill Ganoderma boninense. No other isolates of Muscodor spp. produce VOCs that are lethal to Ganoderma boninense. In addition, a combination of molecular, biochemical and biological techniques was used to characterize it and the results show that this M. strobelii isolate has distinct and unusual characteristics. Further description of the M. strobelii strain is as follows.

[0088] Fungus: Muscodor strobelii in nature is associated with a Philodendron sp. Spores: There are no spores or fruiting-bodies of this fungus observed under any culture conditions. Mycelium: It appears as a vast array of intertwined fine hyphae with coiled structures (see FIG. 1). The hyphae are 0.5-2.0 μm in diameter. Genetically: It is related to other Muscodor spp. (Xylariaceae). It differs from other Muscodor spp. by producing a distinct blend of volatile organic substances and its rDNA sequence possesses uncommon structural features.

[0089] Holotype: Endophytic on Philodendron sp. Collections were made at the University Forest of the University of Malaysia. The holotype comes from only one Philodendron sp. stem, collected in the University of Malaysia Forest south of Kuala Lumpur by Dr. Gary Strobel and Dr. Nora Zin. A living culture was deposited as Muscodor strobelii MB-8 on Jun. 5, 2009 in the Agricultural Research Service Culture Collection located at 1815 N. University Street, Peoria, IL 61604, USA (NRRL) in accordance with the Budapest Treaty on the International Recognition of the Deposit of Microorganisms for the Purpose of patent Procedure and the Regulations thereunder (Budapest Treaty) as Accession Number NRRL 50288.

[0090] The strain has been deposited under conditions to ensure that access to the culture will be available during the pendency of this patent application to one determined by the Commissioner of Patents and Trademarks to be entitled thereto under 37 C.F.R. §1.14 and 35 U.S.C. §122. The deposit represents a substantially pure culture of the deposited strain. The deposit is available as required by foreign patent laws in countries wherein counterparts of the subject application or its progeny are filed. However, it should be understood that the availability of a deposit does not constitute a license to practice the subject invention in derogation of patent rights granted by governmental action. Based on this deposit, the entire genome of the isolate NRRL 50288 is hereby incorporated into and included herein.

[0091] Teleomorph: The teleomorph of this fungus may be found in Xylariaceae, based on the similarity of the 18S rDNA gene sequence data between M. albus and the family Xylariaceae in the GenBank database (Bruns et al., 1991, Ann. Rev. Ecology Systematics 22: 525-564; Reynolds and Taylor, 1993, Proceedings of an International Symposium Wallingford: C.A.B. International; Mitchell et al, 1995, Mycologist 9: 67-75; Guano et al., 1999, Clin. Microbiol. Rev. 12(3): 454-500; Taylor et al., 1999, Ann. Rev. Phytopathology 37: 197-246). The molecular data from the 18S rDNA gene sequences of M. strobelii show a 99% homology with M. albus isolate 620, but M. strobelii lacks an intergenic sequence (18S rDNA) that is diagnostic for M. albus. A similar sequence is also absent in the partial 18S rDNA of M. vitigenus. Partial 18S rDNA and ITS sequences of M. strobelii (MB-8) were found to be 100% and 99% identical to those of Muscodor yucatanensis, respectively.

[0092] Etymology: The genus name, Muscodor, is taken from the Latin word which means musty. This is consistent with the quality of the odor produced by the first three isolates of the genus. The species name is strobelii, given in honor of Gary Strobel.

Molecular Biology of Muscodor strobelii

[0093] The partial sequences of 18S rDNA, ITS1, 5.8S, and ITS2 have been demonstrated to be highly conserved regions of DNA and therefore very useful in the classification of organisms (Mitchell et al., 1995, Mycologist 9: 67-75). These molecularly distinguishing partial sequences of M. strobelii were obtained and compared with the data in GenBank. After searching the 18S rDNA sequences, 565 bp of M. strobelii were subjected to an advanced BLAST search. The results showed 100% and 99% identity with those of M. yucatanensis (FJ917287.1) and M. albus (AF324337), respectively. However, M. strobelii lacks an intergenic sequence in the 18S rDNA (364 bp) that is diagnostic for the original Muscodor albus 620. In addition, a BLAST search of the 597 bp sequence of M. strobelii corresponding to SEQ ID NO:40284 revealed that it showed 99% identity with each of the following GenBank sequences FJ917287.1, EU687035.1, EU686810.1, and EU686807.1. The sequence of SEQ ID NO:40284 also showed 97% identity with the corresponding region of M. vitigenus. Thus, the M. strobelii ITS sequence like the 18S rDNA sequence more closely resembles M. yucatanesis and M. vitigenus than M albus.

[0094] Thus, M. strobelii isolated from other organisms can be identified as a Muscodor species, using well known techniques, including classification with the Muscodor genus on the basis of the relatedness of the 18S rDNA sequence and ITS region to previously identified members of the Muscodor genus, as well as similarity of its hyphae to other Muscodor species. For example, an M. strobelii isolate can be identified as Muscodor strobelii by determining regions of the 18S rDNA sequence, including the region that includes ITS sequence provided as SEQ ID NO:40284, and the region that includes the 18S rDNA partial sequence provided as SEQ ID NO:40285 in the Sequence Listing.

[0095] An M. strobelii isolate, such as the isolate of Examples 1-12, can also be identified by one or more VOCs produced by the isolate. The volatile organic compounds produced by a fourteen day old culture of M. strobelii is provided in Table 1 of Example 4 herein, and a gas chromatogram of the volatile compounds removed from a M. strobelii culture container is shown in FIG. 3. For example, a culture of M. strobelii can be identified by determining that the fungal isolate is a Muscodor species by morphological characteristics and/or molecular genetic analysis, as illustrated in Examples 1-3, 5, and 6, and/or by its production of the VOC isobutyric acid and/or one or more derivatives of isobutyric acid (including, without limitation, isobutyric anhydride (allyl 2-methylpropanoate), isobutyric acid, methyl ester (methylisobutyrate); isobutyric acid, ethyl ester; isobutyric acid, propyl ester; and isobutyric acid, allyl ester), as demonstrated in Example 4, for example. In some embodiments, a Muscodor strain, isolate, or variant can be identified as M. strobelii by its ability to produce, or by its production of, isobutyric acid. In some examples, a Muscodor strain, isolate, or variant can be identified as M. strobelii by determining that the most abundant component of the VOC s produced by the organism is isobutyric acid or a derivative thereof. For example, a M. strobelii strain, isolate, or variant can be identified as a Muscodor species in which the most abundant component of the VOCs produced by the organism is isobutyric acid.

[0096] In some embodiments, an M. strobelii strain, isolate, or variant is identified as a Muscodor species that produces VOC s in which at least 30 mole percent, at least 35 mole percent, at least 40 mole percent, at least 45 mole percent, at least 50 mole percent, or at least 55 mole percent of the volatile organic compounds produced by the strain, isolate, or variant is isobutyric acid. In some embodiments, an M. strobelii strain, isolate, or variant is identified as producing VOC s in which at least 30 mole percent, at least 35 mole percent, at least 40 mole percent, at least 45 mole percent, at least 50 mole percent, at least 55 mole percent, at least 60 mole percent, at least 65 mole percent, at least 70 mole percent of the VOC s are isobutyric acid and isobutyric acid derivatives, such as but not limited to isobutyric acid, methyl ester; isobutyric acid, ethyl ester; isobutyric acid, propyl ester; and isobutyric acid, allyl ester. For example, a M. strobelii strain, isolate, or variant is in some embodiments identified as producing VOCs in which at least 30 mole percent, at least 35 mole percent, at least 40 mole percent, at least 45 mole percent, at least 50 mole percent, at least 55 mole percent, at least 60 mole percent, at least 65 mole percent, at least 70 mole percent of the VOC s are isobutyric acid and isobutyric acid, methyl ester.

[0097] Cultures of M. strobelii may in some instances also be characterized by production of sesquiterpenes. A sesquiterpene used to identify M. strobelii is in some embodiments a pheromone, such as a pheromone that affects the behavior of one or more insect species. For example, sesquiterpene compounds such as isocaryophyllene or derivatives thereof (e.g., (−)-tricyclo[6.2.1.0(4,11)]undec-5-ene,1,5,9,9-tetramethyl-(isocaryophyllene-II), bergamotene or derivatives thereof, patchoulene or derivatives thereof (e.g., alpha-patchoulene), gurjunene or derivatives thereof (e.g., alpha-gurjunene), aristolene or derivatives thereof (e.g., (−)-aristolene), or isolongifolene or derivatives thereof (e.g., 4,5-dehydro-isolongifolene) that may be present in the mixture of VOCs produced by a Muscodor strain can be used to identify the species as M. strobelii. Detection of one or more of bergamotene, patchoulene, gurjunene, aristolene, or isolongifolene in the VOCs produced by a Muscodor isolate can optionally be used in the identification of M. strobelii.

[0098] The biological activity of the volatile organic compounds produced by a Muscodor isolate can also be used to identify an isolate as Muscodor strobelii. For example, in the experiments detailed in Example 7, several Petri plates of PDA were used to determine if the fungus produced volatile antibiotics that were able to inhibit the growth of other organisms. This procedure included removing a 1-inch section of the agar from the middle of the plate, plating a plug of the M. strobelii isolate MB-8 isolate on one side and allowing it to grow for several days, and then plating test organisms on the other side of the gap (Strobel et al., 2001, Microbiology 147: 2943-2950). The M. strobelii isolate MB-8 demonstrated the ability to produce volatile antibiotics, which either inhibited or killed the fungi that were placed on the other side of the center well as test organisms, such as Pythium ultimum, Sclerotinia sclerotiorum, and others. In these assays as well as in experiments using oil palm (Elaeis guineensis) roots exposed to Ganoderma boninense and experiments using soil treated with Ganoderma boninense, both also described in Example 7, it has been demonstrated that M. strobelii has the ability to kill Ganoderma boninense and to prevent the growth of Ganoderma boninense on palm tissue and in the soil. Thus, in some embodiments, a Muscodor isolate that has the ability to kill Ganoderma boninense is identified as M. strobelii.

Method of Isolating Muscodor strobelii

[0099] In another aspect, the invention provides a method of isolating Muscodor strobelii. The method comprises culturing tissue from a portion of a plant that is a host to Muscodor strobelii, such as a Philodendron, Eucryphia, or Dacrydium species. For example, tissue can be removed from the interior region of a Philodendron sp. plant stem and cultured on nutrient media for a time sufficient to permit colony formation by a strain of Muscodor strobelii associated with the tissue. The Muscodor strobelii strain is then selected. Selection of the strain may be accomplished by one of skill in the art according to the above description of characteristics of the M. strobelii MB-8 isolate.

[0100] For example, selection of Muscodor strobelii may be undertaken by plating the strain in culture with a test organism. Test organisms known to have growth inhibited by, or are killed by, Muscodor strobelii are particularly desirable. Two such exemplary test organisms include Pythium ultimum and Sclerotinia sclerotiorum.

[0101] Confirmation of successful isolation of Muscodor strobelii may also be undertaken by measuring the volatile organic compounds released by the isolate. As measured by GC/MS, the fungus consistently produces primarily isobutyric acid and one or more isobutyric acid derivatives along with several unusual lipids including aristolene, beta-patchoulene and others (see Table 1). Both of the latter compounds are described as insect pheromones. These compounds are not produced by any of the described isolates of M. albus (Strobel et al., 2001, Microbiology 147: 2943-2950; Ezra et al., 2004, Microbiology 150:4023-4031) or M. vitigenus (U.S. Pat. No. 7,267,975). Likewise, none of other naphthalene and azulene derivatives of M. albus were produced by M. strobelii when grown on PDA. Unlike M. vitigenus, M. strobelii does not produce a mixture of VOCs in which naphthalene is the predominant VOC. Thus, chemically this organism is different than other Muscodor spp. that have been studied and described thus far. The odor produced by the fungus becomes noticeable after about 3-4 days and seems to increase with time up to and including at least three weeks. The volatile compounds of this fungus possess inhibitory and lethal bioactivity against a number of plant and human pathogens using the standard bioassay technique (Strobel et al., 2001, Microbiology 147: 2943-2950).

Muscodor strobelii Compositions

[0102] The invention compositions comprising the culture of M. strobelii can be in a variety of forms, including, but not limited to, still cultures, whole cultures, stored stocks of mycelium and/or hyphae (particularly glycerol stocks), agar strips, stored agar plugs in glycerol/water, freeze dried stocks, and dried stocks such as mycelia dried onto filter paper or grain seeds. The disclosure further provides a composition that includes Muscodor strobelii and a carrier. The carrier may be any one or more of a number of carriers that confer a variety of properties, such as increased stability, wettability, dispersability, etc. Wetting agents such as natural or synthetic surfactants, which can be nonionic or ionic surfactants, or a combination thereof can be included in a composition of the invention. Water-in-oil emulsions can also be used to formulate a composition that includes M. strobelii (see, for example, U.S. patent No. http://patft.uspto.gov/netacgi/nph-Parser?Sect1=PTO1&Sect2=HITOFF&d=PALL&p=1&u=%2Fnetahtml%2FPTO%2Fsrchnum. htm&r=1&f=G&1=50&s1=7485451.PN.&OS=PN/7485451 &RS=PN/7485451-h0#h0http://patft.uspto.gov/netacgi/nph-Parser?Sect1=PTO1&Sect2=HITOFF&d=PALL&p=1&u=%2Fnetahtml%2FPTO%2Fsrehnum. htm&r=1&f=G&1=50&s1=7485451.PN.&OS=PN/7485451&RS=PN/7485451-h2#h27,485,451, incorporated by reference herein). Suitable formulations that may be prepared include wettable powders, granules, gels, agar strips or pellets, thickeners, and the like, microencapsulated particles, and the like, liquids such as aqueous flowables, aqueous suspensions, water-in-oil emulsions, etc. The formulation may include grain or legume products (e.g., ground grain or beans, broth or flour derived from grain or beans), starch, sugar, or oil. The carrier may be an agricultural carrier. In certain embodiments the carrier is a seed, and the composition may be applied or coated onto the seed or allowed to saturate the seed.

[0103] The agricultural carrier may be soil or plant growth medium. Other agricultural carriers that may be used include water, fertilizers, plant-based oils, humectants, or combinations thereof. Alternatively, the agricultural carrier may be a solid, such as diatomaceous earth, loam, silica, alginate, clay, bentonite, vermiculite, seed cases, other plant and animal products, or combinations, including granules, pellets, or suspensions. Mixtures of any of the aforementioned ingredients are also contemplated as carriers, such as but not limited to, pesta (flour and kaolin clay), agar or flour-based pellets in loam, sand, or clay, etc. Formulations may include food sources for the cultured organisms, such as barley, rice, or other biological materials such as seed, plant parts, empty fruit bunches (EFB) from palm, sugar cane bagasse, hulls or stalks from grain processing, ground plant material (“yard waste”) or wood from building site refuse, sawdust or small fibers from recycling of paper, fabric, or wood. The agricultural carrier may be a mixture of EFB and rice, as shown in FIG. 4. Other suitable formulations will be known to those skilled in the art.

[0104] When used as pesticides or fungicide in their commercially available formulations and in the use forms prepared with these formulations, the active compounds and compositions according to the invention can furthermore be present in the form of a mixture with synergists. Synergists are compounds by which the activity of the active compounds is increased without it being necessary for the synergist added to be active itself.

[0105] When used as pesticides in their commercially available formulations and in the use forms prepared with these formulations, the active compounds and compositions according to the invention can furthermore be present in the form of a mixture with inhibitors which reduce the degradation of the active compound after application in the habitat of the plant, on the surface of parts of plants or in plant tissues.

[0106] The active compounds and compositions according to the invention, as such or in their formulations, can also be used as a mixture with known acaricides, bactericides, fungicides, insecticides, microbicides, or nematicides, or combinations thereof, for example in order to widen the spectrum of action or to prevent the development of resistances in this way. In many cases, synergistic effects result, i.e. the activity of the mixture can exceed the activity of the individual components. A mixture with other known active compounds, such as fertilizers, growth regulators, safeners and/or semiochemicals is also possible.

[0107] In a preferred embodiment of the present invention, the composition may further include at least one chemical or biological pesticide. A variety of pesticides is apparent to one of skill in the art and may be used. Exemplary chemical pesticides include those in the organophosphate, carbamate, organochlorine, and prethroid classes. Also included are chemical control agents such as, but not limited to, benomyl, borax, captafol, captan, chorothalonil, formulations containing copper; formulations containing zinc; dichlone; dicloran; iodine; fungicides that inhibit ergosterol biosynthesis such as but not limited to fenarimol, imazalil, myclobutanil, propiconazole, prochloraz, terbutrazole, flusilazole, triadimefon, and tebuconazole; folpet; ipordione; manocozeb; maneb; metalaxyl; oxycarboxin, oxytetracycline; PCNB; pentachlorophenol; quinomethionate; sodium aresenite; sodium DNOC; sodium hypochlorite; sodium phenylphenate; streptomycin; sulfur; thiabendazolel; thiophanate-methyl; triforine; vinclozolin; zineb; ziram; tricyclazole; cymoxanil; blastididin; and validimycin.

[0108] Exemplary biological pesticides that can be included in a M. strobelii composition of the invention for preventing a plant pathogenic disease include microbes, animals, plants, bacteria, genetic material, and natural products of living organisms. In these compositions, the M. strobelii is isolated prior to formulation with an additional organism. For example, microbes such as but not limited to species of Bacillus, Trichoderma, Erwinia, Pichia, Candida, Cryptococcus, Cordyceps, Talaromyces, Paecilomyces, Beauveria, Chaetomium, Gliocladium, Aureobasidium, Dabaryomyces, Exophilia, Ampelomyces, and Mariannaea can be provided in a composition with Muscodor strobelii.

[0109] Examples of fungi that can be combined with Muscodor strobelii in a composition include, without limitation, other Muscodor species, Fusarium lateritium, Metarhizium anisopliae (“green muscarine”), Metarhizium flaviride, Beauveria bassiana (“white muscarine”), Beauveria brongniartii, Chladosporium herbarum, Paecilomyces farinosus, Paecilomyces fumosoroseus, Verticillium lecanii, Hirsutella citriformis, Hirsutella thompsoni, Aschersonia aleyrodis, Entomophaga grylli, Entomophaga maimaiga, Entomophaga muscae, Entomophaga praxibulli, Entomophthora plutellae, Zoophthora radicans, Neozygitesfloridana, Nomuraea rileyi, Pandora neoaphidis, Tolypocladium cylindrosporum, Culicinomyces clavosporus, Muscodor albus, Cordyceps variabilis, Cordyceps facis, Cordyceps subsessilis, Cordyceps myrmecophila, Cordyceps sphecocephala, Cordyceps entomorrhiza, Cordyceps gracilis, Cordyceps militaris, Cordyceps washingtonensis, Cordyceps melolanthae, Cordyceps ravenelii, Cordyceps unilateralis, Cordyceps sinensis and Cordyceps clavulata, and mycorrhizal species such as Laccaria bicolor. Other mycopesticidal species will be apparent to those skilled in the art.

[0110] Exemplary food preservatives include antimicrobial preservatives, which inhibit the growth of bacteria and fungi and mold growth, or antioxidants such as oxygen absorbers, which inhibit the oxidation of food constituents. Common antimicrobial preservatives include calcium propionate, sodium nitrate, sodium nitrite, sulfites (sulfur dioxide, sodium bisulfite, potassium hydrogen sulfite, etc.) and disodium EDTA. Antioxidants include BHA and BHT. Other preservatives include formaldehyde (usually in solution), glutaraldehyde (kills insects), ethanol and methylchloroisothiazolinone.

Treating Plant Pathogens with Muscodor strobelii

[0111] Muscodor strobelii may release volatile organic compounds that control major diseases of plants. One exemplary plant is the oil palm, whereby compounds released by M. strobelii may inhibit the development of basal stem rot disease. These compounds may target Ganoderma boninense, a causative agent of basal stem rot disease. (See Examples 7 and 8) M. strobelii may be significantly more efficacious in targeting basal stem rot disease than other members of the Muscodor genus, such as M. albus.

[0112] Generally, volatile compounds are in the vicinity of the target pathogenic organism so long as they achieve their biological effect prior to evaporation. The organism may be spread on or around the base of the host plant or intermixed with the growth medium or soil of the plant. Physical contact of the organism with the host plant or target pathogen is not required due to the dispersal of the volatiles through the air or soil.

[0113] In order to achieve good dispersion and adhesion of compositions within the present invention, it may be advantageous to formulate the culture and/or volatile compound with components that aid dispersion and adhesion. Suitable formulations are apparent to those of skill in the art and include wettable powders, granules and the like, microencapsulations in a suitable medium and the like, liquids such as aqueous flowables and aqueous suspensions, volatile compositions, and emulsifiable concentrates. Formulations may include food sources for the cultured organisms, such as barley, rice, or other organic materials such as empty fruit bunches. Other suitable formulations will be known to those skilled in the art.

[0114] In one aspect the invention provides methods for preventing or treating a plant-pathogen-related disease, in which the method includes applying a composition comprising one or more Muscodor strobelii organisms to a plant. The composition may comprise one or more of carriers, Muscodor strobelii viability maintenance compounds, chemical pesticides, and/or one or more additional biological pesticides, as disclosed herein. In some embodiments, the composition is an aqueous suspension of M. strobelii. In order to achieve good dispersion and adhesion of compositions within the present invention, it may be advantageous to formulate the culture with components that aid dispersion and adhesion. As detailed above, suitable formulations are apparent to those of skill in the art and include wettable powders, granules and the like, microencapsulations in a suitable medium and the like, liquids such as aqueous flowables and aqueous suspensions and emulsifiable concentrates. Formulations may include food sources for the cultured organisms, such as barley, rice, flour, sugar, or other organic materials.

[0115] Viability maintenance compounds may serve to stabilize Muscodor strobelii during shipping, transport, storage, and treatment of the plants or crops. For example, Muscodor strobelii may be placed in culture medium and glycerol for storage at −70° C. or in culture medium and distilled water for storage at 0° C.

[0116] In some embodiments, the composition is a liquid composition, such as a suspension or emulsion, and the composition is used to water, spray, or drench the plant. The M. strobelii composition may be provided to the user as a solid or semi-solid formulation to which water or a liquid solution is added by the user prior to application. In other embodiments, the composition is a powder or particulate composition, and the composition is dusted or scattered on the plant, on the soil surface, or at the base of the plant. In some embodiments, the M. strobelii composition is then watered into the soil.

[0117] M. strobelii may be topically administered to plants, including any or all plant parts, including without limitation, roots, shoots, stems, bark, leaves, fruit, and/or seeds, in either dry or solution form. For example, M. strobelii may be applied on, in, or near the root of the oil palm. An M. strobelii composition can be applied to plants through any means, including watering, drenching, spraying, or dusting. Single or multiple applications are contemplated. Multiple applications can be through more than one application method. The treatment or inoculation of plants with M. strobelii may allow the systemic growth of the fungus as a symbiotic or endophytic organism throughout the plant. In this case, the fungus may establish itself within the plant as a harmless endophyte and preclude attack of the plant by otherwise harmful bacteria, fungi, or insects. In some embodiments, a plant may be abraded, pierced, or otherwise wounded during or prior to application of M. strobelii to promote establishment of M. strobelii as an endophyte on the plant.

[0118] A seed coating or seed dressing formulation can be applied to the seeds employing the compositions of the invention and a diluent in suitable seed coating formulation form, e.g. as an aqueous suspension or in a dry powder form having good adherence to the seeds. Such seed coating or seed dressing formulations are known in the art. Such formulations may contain the single active ingredients or the combination of active ingredients in encapsulated form, e.g. as slow release capsules or microcapsules.

[0119] The compositions of the invention are particularly useful in combating plant pests and plant pathogens, particularly phytopathogenic fungi. Thus, the invention has may be used to treat, inhibit or prevent the development of plant pathogenic diseases caused by a broad range of fungi. The compositions and methods of the present invention are preferably used against fungi that are important or interesting for agriculture, horticulture, plant biomass for the production of biofuel molecules and other chemicals, and/or forestry. Non-limiting examples include, for instance, Acremonium strictum, Agrobacterium tumefaciens, Alternaria alternata, Alternaria solani, Aphanomyces euteiches, Aspergillus fumigatus, Athelia rolfsii, Aureobasidium pullulans, Bipolaris zeicola, Botrytis cinerea, Calonectria kyotensis, Cephalosporium maydis, Cercospora medicaginis, Cercospora sojina, Colletotrichum coccodes, Colletotrichum fragariae, Colletotrichum graminicola, Coniella diplodiella, Coprinopsis psychromorbida, Corynespora cassiicola, Curvularia pallescens, Cylindrocladium crotalariae, Diplocarpon earlianum, Diplodia gossyina, Diplodia spp., Epicoccum nigrum, Erysiphe cichoracearum, Fusarium graminearum, Fusarium oxysporum, Fusarium oxysporum f. sp. tuberosi, Fusarium proliferatum var. proliferatum, Fusarium solani, Fusarium verticillioides, Ganoderma boninense, Geotrichum candidum, Glomerella tucumanensis, Guignardia bidwellii, Kabatiella zeae, Leptosphaerulina briosiana, Leptotrochila medicaginis, Macrophomina, Macrophomina phaseolina, Magnaporthe grisea, Magnaporthe oryzae, Microsphaera manshurica, Monilinia fructicola, Mycosphaerella fijiensis, Mycosphaerella fragariae, Nigrospora oryzae, Ophiostoma ulmi, Pectobacterium carotovorum, Pellicularia sasakii (Rhizoctonia solani), Peronospora manshurica, Phakopsora pachyrhizi, Phoma foveata, Phoma medicaginis, Phomopsis longicolla, Phytophthora cinnamomi, Phytophthora erythroseptica, Phytophthora fragariae, Phytophthora infestans, Phytophthora medicaginis, Phytophthora megasperma, Phytophthora palmivora, Podosphaera leucotricha, Pseudopeziza medicaginis, Puccinia graminis subsp. Tritici (UG99), Puccinia sorghi, Pyricularia grisea, Pyricularia oryzae, Pythium ultimum, Rhizoctonia solani, Rhizoctonia zeae, Rosellinia sp., Sclerotinia sclerotiorum, Sclerotinina trifoliorum, Sclerotium rolfsii, Septoria glycines, Septoria lycopersici, Setomelanomma turcica, Sphaerotheca macularis, Spongospora subterranea, Stemphylium sp, Synchytrium endobioticum, Thecaphora (Angiosorus), Thielaviopsis, Tilletia indica, Trichoderma viride, Ustilago maydis, Verticillium albo-atrum, Verticillium dahliae, Verticillium dahliae, Xanthomonas axonopodis, Xanthomonas oryzae pv. oryzae.

[0120] In a preferred embodiment of the present invention, the application of the M. strobelii organisms to the plant results in a reduced occurrence of at least one plant disease caused by a bacterium, fungus, or insect as compared with plants not treated with an M. strobelii composition. In some embodiments, the plant disease is caused by Aspergillus fumigatus, Botrytis cinerea, Cerpospora betae, Curvularia spp., Ganoderma boninense, Geotrichum candidum, Mycosphaerella fijiensis, Phytophthora palmivora, Phytophthora ramorum, Pythium ultimum, Rhizoctonia solani, Rhizopus spp., Schizophyllum spp., Sclerotinia sclerotiorum, Verticillium dahliae, or Xanthomonas axonopodis. In a particularly preferred embodiment, the host plant is susceptible to diseases caused by Ganoderma boninense. In another preferred embodiment, the host plant is an oil palm plant. In other preferred embodiments, the disclosed compositions and methods are effective to kill the plant pathogen.

[0121] It is understood that all plants and plant parts can be treated in accordance with the invention. Plants are to be understood as meaning in the present context all plants and plant populations such as desired and undesired wild plants or crop plants (including naturally occurring crop plants). Crop plants can be plants which can be obtained by conventional plant breeding and optimization methods or by biotechnological and recombinant methods or by combinations of these methods, including the transgenic plants and plant cultivars protectable or not protectable by plant breeders' rights. Plant parts are to be understood as meaning all parts and organs of plants above and below the ground, such as shoot, leaf, flower and root, examples which may be mentioned being leaves, needles, stalks, stems, flowers, fruit bodies, fruits, seeds, roots, tubers and rhizomes. The plant parts also include harvested material, and vegetative and generative propagation material, for example cuttings, tubers, rhizomes, offsets and seeds.

[0122] As discussed above, the compositions and methods according to the present invention in principle can be applied to any plant. Therefore, monocotyledonous as well as dicotyledonous plant species are particularly suitable. The process is preferably used with plants that are important or interesting for agriculture, horticulture, for the production of biomass used in producing liquid fuel molecules and other chemicals, and/or forestry.

[0123] Thus, the invention has use over a broad range of plants, preferably higher plants pertaining to the classes of Angiospermae and Gymnospermae. Plants of the subclasses of the Dicotylodenae and the Monocotyledonae are particularly suitable. Dicotyledonous plants belong to the orders of the Magniolales, Illiciales, Laurales, Piperales Aristochiales, Nymphaeales, Ranunculales, Papeverales, Sarraceniaceae, Trochodendrales, Hamamelidales, Eucomiales, Leitneriales, Myricales, Fagales, Casuarinales, Caryophyllales, Batales, Polygonales, Plumbaginales, Dilleniales, Theales, Malvales, Urticales, Lecythidales, Violales, Salicales, Capparales, Ericales, Diapensales, Ebenales, Primulales, Rosales, Fabales, Podostemales, Haloragales, Myrtales, Cornales, Proteales, Santales, Rafflesiales, Celastrales, Euphorbiales, Rhamnales, Sapindales, Juglandales, Geraniales, Polygalales, Umbellales, Gentianales, Polemoniales, Lamiales, Plantaginales, Scrophulariales, Campanulales, Rubiales, Dipsacales, and Asterales. Monocotyledonous plants belong to the orders of the Alismatales, Hydrocharitales, Najadales, Triuridales, Commelinales, Eriocaulales, Restionales, Poales, Juncales, Cyperales, Typhales, Bromeliales, Zingiberales, Arecales, Cyclanthales, Pandanales, Arales, Lilliales, and Orchidales. Plants belonging to the class of the Gymnospermae are Pinales, Ginkgoales, Cycadales and Gnetales.

[0124] Suitable species may include members of the genus Abelmoschus, Abies, Acer, Agrostis, Allium, Alstroemeria, Ananas, Andrographis, Andropogon, Artemisia, Arundo, Atropa, Berberis, Beta, Bixa, Brassica, Calendula, Camellia, Camptotheca, Cannabis, Capsicum, Carthamus, Catharanthus, Cephalotaxus, Chrysanthemum, Cinchona, Citrullus, Coffea, Colchicum, Coleus, Cucumis, Cucurbita, Cynodon, Datura, Dianthus, Digitalis, Dioscorea, Elaeis, Ephedra, Erianthus, Erythroxylum, Eucalyptus, Festuca, Fragaria, Galanthus, Glycine, Gossypium, Helianthus, Hevea, Hordeum, Hyoscyamus, Jatropha, Lactuca, Linum, Lolium, Lupinus, Lycopersicon, Lycopodium, Manihot, Medicago, Mentha, Miscanthus, Musa, Nicotiana, Oryza, Panicum, Papaver, Parthenium, Pennisetum, Petunia, Phalaris, Phleum, Pinus, Poa, Poinsettia, Populus, Rauwolfia, Ricinus, Rosa, Saccharum, Salix, Sanguinaria, Scopolia, Secale, Solanum, Sorghum, Spartina, Spinacea, Tanacetum, Taxus, Theobroma, Triticosecale, Triticum, Uniola, Veratrum, Vinca, Vitis, and Zea.

[0125] The methods of the present invention are preferably used in plants that are important or interesting for agriculture, horticulture, biomass for the production of biofuel molecules and other chemicals, and/or forestry. Non-limiting examples include, for instance, Panicum virgatum (switchgrass), Sorghum bicolor (sorghum, sudangrass), Miscanthus giganteus (miscanthus), Saccharum sp. (energycane), Populus balsamifera (poplar), Zea mays (corn), Glycine max (soybean), Brassica napus (canola), Triticum aestivum (wheat), Gossypium hirsutum (cotton), Oryza sativa (rice), Helianthus annuus (sunflower), Medicago sativa (alfalfa), Beta vulgaris (sugarbeet), Pennisetum glaucum (pearl millet), Panicum spp., Sorghum spp., Miscanthus spp., Saccharum spp., Erianthus spp., Populus spp., Andropogon gerardii (big bluestem), Pennisetum purpureum (elephant grass), Phalaris arundinacea (reed canarygrass), Cynodon dactylon (bermudagrass), Festuca arundinacea (tall fescue), Spartina pectinata (prairie cord-grass), Arundo donax (giant reed), Secale cereale (rye), Salix spp. (willow), Eucalyptus spp. (eucalyptus), Triticosecale spp. (triticum—wheat X rye), Bamboo, Carthamus tinctorius (safflower), Jatropha curcas (Jatropha), Ricinus communis (castor), Elaeis guineensis (oil palm), Phoenix dactylifera (date palm), Archontophoenix cunninghamiana (king palm), Syagrus romanzoffiana (queen palm), Linum usitatissimum (flax), Brassica juncea, Manihot esculenta (cassaya), Lycopersicon esculentum (tomato), Lactuca saliva (lettuce), Musa paradisiaca (banana), Solanum tuberosum (potato), Brassica oleracea (broccoli, cauliflower, brusselsprouts), Camellia sinensis (tea), Fragaria ananassa (strawberry), Theobroma cacao (cocoa), Coffea arabica (coffee), Vitis vinifera (grape), Ananas comosus (pineapple), Capsicum annum (hot & sweet pepper), Allium cepa (onion), Cucumis melo (melon), Cucumis sativus (cucumber), Cucurbita maxima (squash), Cucurbita moschata (squash), Spinacea oleracea (spinach), Citrullus lanatus (watermelon), Abelmoschus esculentus (okra), Solanum melongena (eggplant), Papaver somniferum (opium poppy), Papaver orientale, Taxus baccata, Taxus brevifolia, Artemisia annua, Cannabis saliva, Camptotheca acuminate, Catharanthus roseus, Vinca rosea, Cinchona officinalis, Coichicum autumnale, Veratrum californica, Digitalis lanata, Digitalis purpurea, Dioscorea spp., Andrographis paniculata, Atropa belladonna, Datura stomonium, Berberis spp., Cephalotaxus spp., Ephedra sinica, Ephedra spp., Erythroxylum coca, Galanthus wornorii, Scopolia spp., Lycopodium serratum (Huperzia serrata), Lycopodium spp., Rauwolfia serpentina, Rauwolfia spp., Sanguinaria canadensis, Hyoscyamus spp., Calendula officinalis, Chrysanthemum parthenium, Coleus forskohlii, Tanacetum parthenium, Parthenium argentatum (guayule), Hevea spp. (rubber), Mentha spicata (mint), Mentha piperita (mint), Bixa orellana, Alstroemeria spp., Rosa spp. (rose), Dianthus caryophyllus (carnation), Petunia spp. (petunia), Poinsettia pulcherrima (poinsettia), Nicotiana tabacum (tobacco), Lupinus albus (lupin), Uniola paniculata (oats), bentgrass (Agrostis spp.), Populus tremuloides (aspen), Pinus spp. (pine), Abies spp. (fir), Acer spp. (maple), Hordeum vulgare (barley), Poa pratensis (bluegrass), Lolium spp. (ryegrass), Phleum pratense (timothy), and conifers. Of interest are plants grown for energy production, so called energy crops, such as cellulose-based energy crops like Panicum virgatum (switchgrass), Sorghum bicolor (sorghum, sudangrass), Miscanthus giganteus (miscanthus), Saccharum sp. (energycane), Populus balsamifera (poplar), Andropogon gerardii (big bluestem), Pennisetum purpureum (elephant grass), Phalaris arundinacea (reed canarygrass), Cynodon dactylon (bermudagrass), Festuca arundinacea (tall fescue), Spartina pectinata (prairie cord-grass), Medicago sativa (alfalfa), Arundo donax (giant reed), Secale cereale (rye), Salix spp. (willow), Eucalyptus spp. (eucalyptus), Triticosecale spp. (triticum-wheat X rye), and Bamboo; and starch-based energy crops like Zea mays (corn) and Manihot esculenta (cassaya); and sucrose-based energy crops like Saccharum sp. (sugarcane) and Beta vulgaris (sugarbeet); and biofuel-producing energy crops like Glycine max (soybean), Brassica napus (canola), Helianthus annuus (sunflower), Carthamus tinctorius (safflower), Jatropha curcas (Jatropha), Ricinus communis (castor), Elaeis guineensis (African oil palm), Elaeis oleifera (American oil palm), Cocos nucifera (coconut), Camelina sativa (wild flax), Pongamia pinnata (Pongam), Olea europaea (olive), Linum usitatissimum (flax), Crambe abyssinica (Abyssinian-kale), and Brassica juncea.

[0126] In certain preferred embodiments, the plant may be a coconut (Cocos nucifera), betel (Areca catechu), tea (Camellia sinensis), cocoa (Theobroma cacao), acacia (Acacia species), or poplar (Populus species) plant.

Treatment of Soil with Muscodor strobelii

[0127] In another aspect the invention provides methods for preventing or treating a plant-pathogen-related disease, in which the method includes applying a composition comprising one or more Muscodor strobelii organisms to soil or a plant growth medium. A non-soil plant growth medium can be sand, vermiculite, fibers, a gel or liquid based medium for plant growth, etc. In some embodiments, the soil or plant growth medium treated with a Muscodor strobelii composition contains seeds of plants of one or more plants of a species of interest. In some embodiments, soil or another plant growth medium is treated with a Muscodor strobelii composition and is subsequently planted with one or more plants of a species of interest. The planting can be planting of seeds, shoots, roots, or transplanting of whole plants (such as, but not limited to, seedlings). The M. strobelii composition can be mixed into the soil or growth medium, bored or injected into the soil or growth medium, sprayed, drenched, dusted, or scattered on the soil or growth medium, and optionally watered in.

[0128] The invention thus provides a method to use compositions of Muscodor strobelii to kill plant pathogens in soil. Suitable formulations for soil treatment are apparent to those of skill in the art and include wettable powders, granules, pellets, and the like, microencapsulations in a suitable medium and the like, liquids such as aqueous flowables and aqueous suspensions, and emulsifiable concentrates. Formulations may include food sources for the cultured organisms, such as barley, rice, or other organic materials such as empty fruit bunches.

[0129] For example, seeds, branches, mulch, plant fragments, and powdered milk may be useful to preserve M. strobelii viability for extended periods of time when mixed into soil. Chemical and biological pesticides may also be used to amplify the rate of Muscodor strobelii-mediated killing of plant pathogens, as well as to target other plant pathogens.

[0130] The invention includes a composition of isolated M. strobelii and an agricultural carrier. One agricultural carrier is soil itself. Other agricultural carriers include loam, clay, vermiculite, alginate, pellets made of mixtures of flour and inorganic materials, seeds, branches, mulch, plant fragments, and powdered milk. Muscodor strobelii may be formulated on a seed such as barley or rice or other waste plant materials, dried and then applied to the soil directly. Mixing may then be performed.

[0131] The composition may be turned into the soil prior to the planting of a crop or during the planting of seeds, roots, or shoots, or transplanting of plants, or the composition can be applied to the soil after plants have been established. For example, the composition with soil or an agricultural carrier may be applied to the base of oil palm plants. The composition may also be directly applied to the roots of the plants. The plants in some embodiments have root disease caused by a plant pathogen. The pathogen may be Ganoderma boninense. Other exemplary plant pathogens causing root diseases include Phytophthora palmivora, Pythium ultimum, or Sclerotinia sclerotiorum. It is contemplated that M. strobelii releases VOCs in the soil and/or in the vicinity of the plant that inhibit growth of or kill plant pathogenic fungi such as Ganoderma boninense, Phytophthora palmivora, Pythium ultimum, and Sclerotinia sclerotiorum.

[0132] In some embodiments, the invention provides for a method to pre-treat soil with M. strobelii, or alternatively, to inoculate soil with M. strobelii. The inoculated soil may be then used for in planting of seeds or plants susceptible to pathogens that can be effectively inhibited by M. strobelii. For example, M. strobelii in some embodiments is inoculated into the soil, optionally under conditions of being covered or sealed for several days, after which plants are placed in the soil with some reasonable certainty that no infestation will follow.

[0133] In certain preferred embodiments of the present invention, treatment of a plant growth medium such as soil with M. strobelii organisms results in a reduced occurrence of at least one plant disease caused by a bacterium, fungus, or insect as compared with plants grown in a medium not treated with an M. strobelii composition. In some embodiments, the plant disease is caused by Aspergillus fumigatus, Botrytis cinerea, Cerpospora betae, Curvularia spp, Ganoderma boninense, Geotrichum candidum, Mycosphaerella fijiensis, Phytophthora palmivora, Phytophthora ramorum, Pythium ultimum, Rhizoctonia solani, Rhizopus spp., Schizophyllum spp., Sclerotinia sclerotiorum, Verticillium dahliae, or Xanthomonas axonopodis. In a particularly preferred embodiment of the invention, the host plant is susceptible to diseases caused by Ganoderma boninense. In another preferred embodiment, the host plant is an oil palm plant. In other preferred embodiments, the plant may be a coconut (Cocos nucifera), betel (Areca catechu), tea (Camellia sinensis), cocoa (Theobroma cacao), acacia (Acacia species), or poplar (Populus species) plant. In some further preferred embodiments, the disclosed compositions and methods are effective to kill the plant pathogen.

[0134] In some embodiments, a method is provided for inhibiting or preventing developments of a plant pathogenic disease, in which a culture of M. strobelii, such as biologically pure M. strobelii, is grown in the vicinity of a host plant. The composition that includes isolated M. strobelii is applied to the plant or the plant growth medium, optionally in a composition that can include any of a stabilizer, a fungal food source, a wetting agent, or a dispersing agent, such as an emulsifier, powder, particulate, or surfactant. For example, before, concurrent with, or after planting of a plant species of interest, a composition of isolated M. strobelii can be applied to the plant or plant growth medium as a water-in-oil emulsion, with one or more ionic or nonionic surfactants, or mixed with any feasible material, such as but not limited to, flour, sugar, clay, vermiculite, sand, diatomaceous earth, silica, seed cases, ground barley or soybeans, in an extract broth of grain or legumes, agar, alginate, pellets of agar, clay, plant material, etc. The culture of M. strobelii can then grow in or on the plant, or in the plant growth medium surrounding the plant, preventing the development of a plant pathogenic disease. In some embodiments, establishing a culture of M. strobelii by applying a composition of isolated M. strobelii in the vicinity of a plant kills a plant pathogen that is associated with the plant or present in the growth medium of the plant.

[0135] In some embodiments, multiple applications of the M. strobelii composition are applied to the plants and/or soil surrounding the plants. The applications can be by the same means or different means (e.g., soil treatment followed by spraying the base of plants), and can use the same or different formulations of M. strobelii.

[0136] Another aspect of the invention provides a method for screening microbial strains that may be useful for treating, inhibiting or preventing the development of a plant pathogenic disease. The method involves (i) exposing or contacting candidate microbial strains with the invention composition, (ii) selecting microbial strains resistant to the composition, and (iii) characterizing the selected microbial strain. The characterization of the selected microbial strains can be carried by a variety of known molecular and microscopy techniques. Non-limiting examples of such techniques include electron microscopy, GC-MS analysis of VOC profile, PCR amplification and phylogenetic analysis of the 18S or the ITS-5.8S rDNA sequences.

### The Polynucleotides and Polypeptides of the Invention

[0137] In another aspect of the present invention, the disclosure provides novel substantially purified nucleic acid molecules, nucleic acid molecules that interfere with these nucleic acid molecules, nucleic acid molecules that hybridize to these nucleic acid molecules, and substantially purified nucleic acid molecules that encode the same protein due to the degeneracy of the DNA code. Additional embodiments of the present application further include the polypeptides encoded by the substantially purified nucleic acid molecules of the present invention.

[0138] The polypeptides and polypeptides of the present invention will preferably be “biologically active” with respect to either a structural attribute, such as the capacity of a nucleic acid to hybridize to another nucleic acid molecule, or the ability of a polypeptide to be bound by antibody (or to compete with another molecule for such binding). Alternatively, such an attribute may be catalytic and thus involve the capacity of the molecule to mediate a chemical reaction or response.

[0139] The polypeptides and polypeptides of the present invention may also be recombinant. As used herein, the term recombinant means any molecule (e.g. DNA, peptide etc.), that is, or results, however indirect, from human manipulation of a polynucleotide or polypeptide.

[0140] Nucleic acid molecules or fragment thereof of the present invention are capable of specifically hybridizing to other nucleic acid molecules under certain circumstances. As used herein, two nucleic acid molecules are said to be capable of specifically hybridizing to one another if the two molecules are capable of forming an anti-parallel, double-stranded nucleic acid structure. A nucleic acid molecule is said to be the “complement” of another nucleic acid molecule if they exhibit complete complementarity. As used herein, molecules are said to exhibit “complete complementarity” when every nucleotide of one of the molecules is complementary to a nucleotide of the other. Two molecules are said to be “minimally complementary” if they can hybridize to one another with sufficient stability to permit them to remain annealed to one another under at least conventional “low-stringency” conditions. Similarly, the molecules are said to be “complementary” if they can hybridize to one another with sufficient stability to permit them to remain annealed to one another under conventional “high-stringency” conditions. Conventional stringency conditions are described by Sambrook et al., In: Molecular Cloning, A Laboratory Manual, 2nd Edition, Cold Spring Harbor Press, Cold Spring Harbor, N.Y. (1989), and by Haymes et al. In: Nucleic Acid Hybridization, A Practical Approach, IRL Press, Washington, D.C. (1985). Departures from complete complementarity are therefore permissible, as long as such departures do not completely preclude the capacity of the molecules to form a double-stranded structure. Thus, in order for a nucleic acid molecule or fragment of the present invention to serve as a primer or probe it need only be sufficiently complementary in sequence to be able to form a stable double-stranded structure under the particular solvent and salt concentrations employed.

[0141] Appropriate stringency conditions which promote DNA hybridization are, for example, 6.0× sodium chloride/sodium citrate (SSC) at about 45° C., followed by a wash of 2.0×SSC at 50° C. The conditions are known to those skilled in the art, or can be found in Current Protocols in Molecular Biology, John Wiley & Sons, N.Y. (1989), 6.3.1-6.3.6. For example, the salt concentration in the wash step can be selected from a low stringency of about 2.0×SSC at 50° C. to a high stringency of about 0.2×SSC at 50° C. In addition, the temperature in the wash step can be increased from low stringency conditions at room temperature at about 22° C., to high stringency conditions at about 65° C. Both temperature and salt may be varied, or either the temperature or the salt concentration may be held constant while the other variable is changed.

[0142] In a preferred embodiment, a nucleic acid of the present invention will specifically hybridize to one or more of the nucleic acid molecules set forth in the Sequence Listing or complements thereof under moderately stringent conditions, for example, at about 2.0×SSC and about 65° C.

[0143] In a particularly preferred embodiment, a nucleic acid of the present invention will include those nucleic acid molecules that specifically hybridize to one or more of the nucleic acid molecules set forth in the Sequence Listing or complements thereof under high stringency conditions.

[0144] In another embodiment, the present invention provides nucleotide sequences comprising regions that encode polypeptides. The encoded polypeptides may be the complete protein encoded by the gene represented by the polynucleotide, or may be fragments of the encoded protein. Preferably, polynucleotides provided herein encode polypeptides constituting a substantial portion of the complete protein, and more preferentially, constituting a sufficient portion of the complete protein to provide the relevant biological activity.

[0145] Of particular interest are polynucleotides of the present invention that encode polypeptides involved in the production of VOCs, or in one or more important biological functions in plants. Such polynucleotides may be expressed in transgenic plants to produce plants having modulated phenotypic properties and/or modulated response to stressful environmental conditions.

[0146] A subset of the nucleic acid molecules of this invention includes fragments of the disclosed polynucleotides consisting of oligonucleotides of at least 15, preferably at least 16 or 17, more preferably at least 18 or 19, and even more preferably at least 20 or more, consecutive nucleotides. Such oligonucleotides are fragments of the larger molecules having a sequence selected from the polynucleotide sequences in the Sequence Listing, and find use, for example, as interfering molecules, probes and primers for detection of the polynucleotides of the present invention.

[0147] Also of interest in the present invention are variants of the polynucleotides provided herein. Such variants may be naturally occurring, including homologous polynucleotides from the same or a different species, or may be non-natural variants, for example polynucleotides synthesized using chemical synthesis methods, or generated using recombinant DNA techniques. With respect to nucleotide sequences, degeneracy of the genetic code provides the possibility to substitute at least one base of the protein encoding sequence of a gene with a different base without causing the amino acid sequence of the polypeptide produced from the gene to be changed. Hence, the DNA of the present invention may also have any base sequence that has been changed from any polynucleotide sequence in the Sequence Listing by substitution in accordance with degeneracy of the genetic code. References describing codon usage are readily publicly available.

[0148] Polynucleotides of the present invention that are variants of the polynucleotides provided herein will generally demonstrate significant identity with the polynucleotides provided herein. Of particular interest are polynucleotide homologs having at least about 50% sequence identity, at least about 60% sequence identity, at least about 70% sequence identity, at least about 80% sequence identity, at least about 85% sequence identity, and more preferably at least about 90%, 95% or even greater, such as 96%, 97%, 98% or 99% sequence identity with polynucleotide sequences described herein.

[0149] Nucleic acid molecules and fragments thereof of the present invention may be employed to obtain other nucleic acid molecules from the same species. Such nucleic acid molecules include the nucleic acid molecules that have the complete coding sequence of a protein and promoters and flanking sequences of such molecules. In addition, such nucleic acid molecules include nucleic acid molecules that encode for other isozymes or gene family members. Such molecules can be readily obtained by using the above-described nucleic acid molecules or fragments thereof to screen cDNA or genomic libraries obtained from Muscodor strobelii. Methods for forming such libraries are well known in the art.

[0150] Nucleic acid molecules and fragments thereof of the present invention may also be employed to obtain nucleic acid homologues. Such homologues include the nucleic acid molecules of different alleles within Muscodor species or other organisms, including the nucleic acid molecules that encode, in whole or in part, protein homologues of other organisms, sequences of genetic elements such as promoters and transcriptional regulatory elements. Such molecules can be readily obtained by using the above-described nucleic acid molecules or fragments thereof to screen cDNA or genomic libraries obtained from such plant species. Methods for forming such libraries are well known in the art. Such homologue molecules may differ in their nucleotide sequences from those found in one or more of the nucleotides in the Sequence Listing or complements thereof because complete complementarity is not needed for stable hybridization. The nucleic acid molecules of the present invention therefore also include molecules that, although capable of specifically hybridizing with the nucleic acid molecules may lack “complete complementarity.” In a particular embodiment, methods of 3′ or 5′ RACE may be used to obtain such sequences.

[0151] Any of a variety of methods known in the art may be used to obtain one or more of the above-described nucleic acid molecules. Automated nucleic acid synthesizers can be employed for this purpose. In lieu of such synthesis, the disclosed nucleic acid molecules can be used to define a pair of primers that can be used with the polymerase chain reaction to amplify and obtain any desired nucleic acid molecule or fragment, which is standard in the art.

[0152] The degeneracy of the genetic code, which allows different nucleotide sequences to code for the same protein or peptide, is further known in the art.

[0153] In an aspect of the present invention, one or more of the nucleic acid molecules of the present invention differ in nucleotide sequence from those encoding a Muscodor protein or fragment thereof selected from the group consisting of the nucleotide sequences in the Sequence Listing due to the degeneracy in the genetic code in that they encode the same protein but differ in nucleotide sequence.

[0154] In another further aspect of the present invention, one or more of the nucleic acid molecules of the present invention differ in nucleotide sequence from those encoding a Muscodor protein or fragment thereof selected from the group consisting of the nucleotide sequences in the Sequence Listing due to fact that the different nucleotide sequences encode a protein having one or more conservative amino acid residues. It is understood that genetic codons capable of coding for such conservative substitutions are well known in the art.

[0155] This invention also provides polypeptides that are encoded by the polynucleotides of the invention. It is known in the art that one or more amino acids in a sequence can be substituted with other amino acid(s), the charge and polarity of which are similar to that of the substituted amino acid, i.e. a conservative amino acid substitution, resulting in a biologically/functionally silent change. Conservative substitutes for an amino acid within the polypeptide sequence can be selected from other members of the class to which the amino acid belongs. Amino acids can be divided into the following four groups: (1) acidic (negatively charged) amino acids, such as aspartic acid and glutamic acid; (2) basic (positively charged) amino acids, such as arginine, histidine, and lysine; (3) neutral polar amino acids, such as serine, threonine, tyrosine, asparagine, and glutamine; and (4) neutral nonpolar (hydrophobic) amino acids such as glycine, alanine, leucine, isoleucine, valine, proline, phenylalanine, tryptophan, cysteine, and methionine.

[0156] Conservative amino acid changes within the native polypeptides' sequence can be made by substituting one amino acid within one of these groups with another amino acid within the same group. Biologically functional equivalents of the polypeptides or fragments thereof of the present invention can have about 10 or fewer conservative amino acid changes, more preferably about 7 or fewer conservative amino acid changes, and most preferably about 5 or fewer conservative amino acid changes. In a preferred embodiment of the present invention, the polypeptide has between about 5 and about 500 conservative changes, more preferably between about 10 and about 300 conservative changes, even more preferably between about 25 and about 150 conservative changes, and most preferably between about 5 and about 25 conservative changes or between 1 and about 5 conservative changes. The encoding nucleotide sequence will thus have corresponding base substitutions, permitting it to encode biologically functional equivalent forms of the proteins or fragments of the present invention.

[0157] Polypeptides of the present invention that are variants of the polypeptides provided herein will generally demonstrate significant identity with the polypeptides provided herein. Of particular interest are polypeptide homologs with at least about 50% sequence identity, at least about 60% sequence identity, at least about 70% sequence identity, at least about 80% sequence identity, at least about 85% sequence identity, and more preferably at least about 90%, 95% or even greater, such as 98% or 99% sequence identity with polynucleotide sequences described herein.

[0158] Any of a variety of methods well known in the art may be used to obtain one or more of the above-described polypeptides. The polypeptides of the invention can be chemically synthesized or alternatively, polypeptides can be made using standard recombinant techniques in heterologous expression systems such as E. coli, yeast, insects, etc.

### Information in the Sequence Listing

[0159] This specification contains nucleotide and polypeptide sequence information prepared using the program Patentln Version 3.5. Each sequence is identified in the Sequence Listing by the numeric indicator <210> followed by the sequence identifier. Sequences referred to in the specification are defined by the term “SEQ ID NO:”, followed by the sequence identifier (e.g. SEQ ID NO: 1 refers to the sequence in the Sequence Listing designated as <400>1). For each Muscodor gene, the EST contig with the longest overlap with the gene was included in the Sequence Listing as indicated by an EST identifier having the initial prefix “CUFF”.

[0160] The Muscodor sequences provided in the Sequence Listing are annotated to indicate one or several potential applications of the respective sequences. Some sequences are enzymes, i.e. catalysts of specific chemical or biochemical reactions, and their activity is indicated by enzyme classification (EC) numbers. The EC numbers used in the sequence listing correspond to the SWISSPROT enzyme classification system, as found for example at www.expasy.ch. Some sequences contain “pfam” domains which are indicative of particular applications. The specific pfam domains are described in more detail by various sources, such as www.sanger.ac.uk or pfam.janelia.org. Thus, various practical applications of the Muscodor sequences in the sequence listing are immediately apparent to those of skill in the art based on their similarity to known sequences.

[0161] Some Muscodor sequences in the Sequence Listing are annotated in the “miscellaneous features” section with valuable applications of the respective sequences in modulating the production of VOCs, such as enzymes involved in the pathways for the production of the VOCs. Thus, various practical applications of the Muscodor sequences in the Sequence Listing are immediately apparent to those of skill in the art based on their similarity to known sequences.

[0162] Expression characteristics of some Muscodor sequences in different growth conditions are indicated in the “miscellaneous features” fields for the respective sequences in the Sequence Listing. In most cases, expression characteristics are associated with the Muscodor sequences in the Sequence Listing by monitoring genome-wide gene expression using an internal Muscodor EST dataset. As those skilled in the art would readily appreciate, such expression data can be used as an indication of the potential for certain genes to play key roles in expression of different phenotypes. Moreover, it is a common practice of those skilled in the art to use such first-level genomic data to uncover sequences of interest and to derive a path toward identifying genes important in a particular pathway or response of interest. Differentially expressed sequences may be used in vectors for making transgenic organisms with modulated characteristics.

[0163] Additional information of sequence applications comes from similarity to sequences in public databases. Entries in the “miscellaneous features” sections of the Sequence Listing labeled “NCBI GI:” and “NCBI Desc:” provide additional information regarding the respective sequences. In some cases, the corresponding public records, which may be retrieved from www.ncbi.nlm.nih.gov, cite publications with data indicative of uses of the annotated sequences.

[0164] From the disclosure of the Sequence Listing, it can be seen that the nucleotides and polypeptides of the inventions are sometimes useful, depending upon the respective individual sequence, to make transgenic organisms with one or more altered characteristics. The present invention further encompasses nucleotides that encode the above described polypeptides, such as those included in the Sequence Listing, as well as the complements and/or fragments thereof, and include alternatives thereof based upon the degeneracy of the genetic code.

[0165] The nucleotide sequences according to the present invention further encompass those that encode appropriate proteins from any organism, in particular from plants, fungi, algae, bacteria or animals.

[0166] Exogenous genetic materials may be transferred into a cell and the cell regenerated into a whole transgenic organism. Techniques useful for transferring such genetic materials into either an endophytes or plant are well known in the art. The choice of promoters to be included depends upon several factors, including but not limited to efficiency, selectability, inducibility, desired expression level, and cell- or tissue-preferential expression. A large number of promoters which are active in plant cells or in endophyte cells have been described in the literature. One of skill in the art can routinely modulate the expression of a sequence by appropriately selecting and positioning promoters and other regulatory regions relative to the sequence.

[0167] Of particular interest in the present invention are polypeptides involved in one or more important biological properties in endophytes and plants, for example, the production of VOCs. Such polypeptides may be produced in transgenic plants or organisms that do not express such polypeptides, or may be modulated, such as over-expressed or up-regulated, in endophytes and organisms that already express such polypeptides to provide transgenic organisms having improved phenotypic properties and/or improved response to environmental conditions. Alternatively, decreased expression or down-regulation of such polypeptides may also be desired. Such decreased expression can be obtained by use of the polynucleotide sequences provided herein, for example in antisense or co-suppression methods. Invention polypeptides may be introduced alone or in combination with any additional polypeptides or compounds, chemical or biological, for example co-factors, substrates, stimulants, etc.

[0168] In certain embodiments, the molecules of the present invention may be introduced into the genome of a desired plant host by a variety of conventional transformation techniques, which are well known to those skilled in the art. Preferred methods of transformation of plant cells or tissues are the Agrobacterium mediated transformation method and the biolistics or particle-gun mediated transformation method. Suitable plant transformation vectors for the purpose of Agrobacterium mediated transformation include those derived from a Ti plasmid of Agrobacterium tumefaciens, as well as those disclosed, e.g., by Bevan (Nucleic Acids Res. 12: 8711-8721, 1984); Herrera-Estrella et al. (Nature 303:209, 1983); Klee et al. (Bio-Technology 3(7): 637-642, 1985). In addition to plant transformation vectors derived from the Ti or root-inducing (Ri) plasmids of Agrobacterium, alternative methods can be used to insert the DNA constructs of this invention into plant cells. Such methods may involve, but are not limited to, for example, the use of liposomes, electroporation, chemicals that increase free DNA uptake, free DNA delivery via microprojectile bombardment, and transformation using viruses or pollen.

[0169] In other preferred embodiments, the molecules of the present invention may be introduced into the genome of a desired endophyte, by a variety of transformation techniques, which are well known to those skilled in the art. (See for example, Panaccione et al., Proc Natl Acad Sci USA. 2001, 98(22), 12820-5).

[0170] The discussion of the general methods given herein is intended for illustrative purposes only. Other alternative methods and embodiments will be apparent to those skilled in the art upon review of this disclosure. The following examples are offered to illustrate, but not limit, the invention.

### Example 1

### Discovery of the Muscodor strobelii Fungus (Isolate Designated as MB-8 Herein)

[0171] A novel endophytic fungus termed Muscodor strobelii has been discovered in a philodendron plant south of Kuala Lumpur in the University of Malaysia forest at Bangi. This fungus is one of a group of endophytic fungi that belong to a fungal genus known as Muscodor. Members of the Muscodor fungal genus typically have a white mycelium with intertwining hyphae. These hyphae make rope-like strands and have never been observed to produce any fruiting structures, including spores, of any type. Muscodor species may produce volatile biologically active products that can affect other microbes, insects and nematodes. The newly isolated Muscodor strobelii produces a composition of volatile organic compounds that is different from that of all other Muscodor species that have been described to date.

[0172] Muscodor strobelii was isolated as follows. Several small stems of Philodendron sp were taken from a plant growing in the KL forest of the University of Malaysia in November of 2007. Several small (2-5 inch) pieces from the stems were cut and placed into 70% ethanol for 30 seconds under a laminar flow hood. A pair of sterile tweezers was used to hold the stems separately in the flame to remove excess alcohol. Then small pieces of inner tissue (beneath the bark) were excised and placed onto water agar. Once hyphae were observed, several hyphal tips were aseptically cut out of the agar and placed on fresh potato dextrose agar PDA. Isolate MB-8, comprising M. strobelii, was isolated in this manner. Several Petri plates of (PDA) were used to determine if the fungus produced volatile antibiotics. This procedure included removing a 1-inch section of the agar from the middle of the plate, plating a plug of the MB-8 isolate on one side and allowing it to grow for several days, and then plating test organisms on the other side of the gap (Strobel et al., 2001, Microbiology 147: 2943-2950). The isolate MB-8 demonstrated the ability to produce volatile antibiotics, which either inhibited or killed the fungi that were placed on the other side of the center well as test organisms, such as Pythium ultimum, Sclerotinia sclerotiorum.

### Example 2

### Scanning Electron Microscopy Characterization of Muscodor strobelii

[0173] Scanning electron microscopy was performed on isolate MB-8 after procedures described by Castillo et al., 2005, Scanning 27:305-311. Agar pieces and host plant pieces supporting fungal growth were placed in filter paper packets then placed in 2% glutaraldehyde in 0.1 M sodium cacodylate buffer (pH 7.2-7.4) with Triton X 100, a wetting agent, aspirated for 5 minutes and left overnight. The next day they were washed in six 15 minute changes in water buffer 1:1, followed by a 15 minute change in 10% ethanol, a 15 minute change in 30% ethanol, a 15 minute change in 50% ethanol, five 15 minute changes in 70% ethanol, and were then left overnight or longer in 70% ethanol. They were then rinsed six times for 15 minutes in 95% and then three 15 minute changes in 100% ethanol, followed by three 15 minute changes in acetone. The microbial material was critically point dried, gold sputtercoated, and images were recorded with an XL30 ESEM FEG in the high vacuum mode using the Everhart-Thornley detector. A 300× electron micrograph is provided as FIG. 1. Hyphae were measured using Image J software (available online on the World Wide Web at rsb.info.nih.gov/ij/).

### Example 3

### Growth and Storage of Muscodor strobelii

[0174] It was determined that MB-8 did not produce spores or any other fruiting bodies when several pieces of carnation leaves were placed on top of actively growing MB-8 to encourage spore production, and no such structures were observed after a week of incubation at 23° C. The fungus was also plated on several different media including Cellulose Agar (CA), Malt Agar (MA), and Corn Meal Agar (CMA) to determine if spore production of MB-8 would be displayed. With the exception of a slower growth rate on some of the media, no other characteristics of MB-8 appeared to be different, and no fruiting bodies or spores were observed.

[0175] Several methods were used to store the isolated fungus as a pure culture, one of which was the filter paper technique. The fungus was also allowed to grow on PDA, and then it was cut into small squares which were placed into vials containing 15% glycerol and stored at −70° C. The fungus was also stored at 4° C. by a similar method, using distilled water rather than glycerol. However, the most effective method of storage was on infested sterile barley seed at −70° C.

### Example 4

### Quantitative Analysis of Volatile Compounds from Muscodor strobelii

[0176] The gases in the air space above a fourteen day old culture of the MB-8 Muscodor strobelii growing on a Petri plate (PDA) were quantitatively analyzed. First, a baked “Solid Phase Micro Extraction” syringe (Supelco) consisting of 50/30 divinylbenzene/carburen on polydimethylsiloxane on a stable flex fiber was placed through a small hole drilled in the side of the Petri plate sporting the growth of B-23. The fiber was exposed to the vapor phase of the fungus for 45 minutes. The syringe was then inserted into the splitless injection port of a Hewlett Packard 6890 gas chromatograph containing a 30 m×0.25 mm I.D. ZB Wax capillary column with a film thickness of 0.50 mm. The column was temperature programmed as follows: 30° C. for 2 minutes followed to 220° C. at 5° C./min. The carrier gas was ultra high purity Helium (local distributor), and the initial column head pressure was 50 kPa. Prior to trapping the volatiles, the fiber was conditioned at 240° C. for 20 minutes under a flow of helium gas. A 30 second injection time was used to introduce the sample fiber into the GC. The gas chromatograph was interfaced to a Hewlett Packard 5973 mass selective detector (mass spectrometer) operating at unit resolution. Data acquisition and data processing were performed on the Hewlett Packard ChemStation software system. Initial identification of the unknowns produced by B-23 was made through library comparison using the NIST database. The identified compounds and their peak areas are provided in Table 1. A representative chromatogram is shown in FIG. 4.

TABLE 1
VOCs produced by a 14 day old culture of Muscodor strobelii on PDA.

| Retention | Peak | | |
|---|---|---|---|
| Time | Area | Possible Compound | MW |
| 3.853 | 6.07 | Acetone | 58 |
| 4.287 | 2.28 | 2-Butanone | 72 |
| 4.887 | 33.13 | Isobutyric acid, methyl ester | 102 |
| 5.682 | 122.88 | Isobutyric acid | 88 |
| 5.740 | 3.77 | Methyl 2-methoxypropenoate | 116 |
| 5.903 | 2.29 | Acetic acid, (tert-butylthio)- | 148 |
| 6.389 | 2.86 | 2-Methylheptanoic acid | 144 |
| 6.504 | 0.35 | Methyl 2,3-dimethylbutanoate | 130 |
| 6.961 | 11.04 | Allyl 2-methylpropanoate (isobutyric anhydride) | 128 |
| 7.512 | 1.13 | N,2-dimethylpropanamide | 101 |
| 9.090 | 0.39 | Heptyl allyl oxalate | 228 |
| 9.931 | 0.26 | Butyl propyl oxalate | 188 |
| 10.012 | 0.22 | 1-(ethenyloxy)-3-methyl-butane | 114 |
| 11.278 | 2.94 | alpha-Gurjunene | 204 |
| 11.332 | 2.15 | (-)-Aristolene | 204 |
| 11.436 | 1.07 | alpha-Patchoulene | 204 |
| 11.557 | 6.28 | 4,5-dimethyl-1,2,3,6,7,8,8a,8b- | 188 |
| | | octahydrobiphenylene | |
| 11.740 | 14.91 | (-)-tricyclo[6.2.1.0(4,11)]undec-5-ene,1,5,9,9- | 204 |
| | | tetramethyl-(isocaryophyllene-II) | |
| 11.929 | 0.44 | pentamethyl-benzene | 148 |
| 12.032 | 0.74 | Bergamotene | 204 |
| 12.099 | 0.14 | 4,4-diethyl-2,5-octadiyne | 162 |
| 12.190 | 0.34 | 2-(1-Propenyl)-6-methylphenol | 148 |
| 12.446 | 0.06 | (Z)-7,11-dimethyl-3-methylene-1,6,10- | 204 |
| | | dodecatriene | |
| 12.683 | 0.86 | 4,5-dehydro-isolongifolene | 202 |

### Example 5

### Fungal Cell Lysis and Acquiring 18 S, ITS-5.8S rDNA Sequence Information

[0177] A 2 week old culture of MB-8, growing on PDA, was used as a source of DNA after incubation at 25° C. MB-8 biomass was collected by brushing a pipet tip across the surface of the MB-8 mycelia. The biomass was transferred to a 100 μl PCR strip tube containing 50 μl of 100 mM Tris, pH 8.0. The biomass was homogenized via repeated up-and-down pipeting. A 2 μl aliquot of the MB-8 homogenate was then mixed with 2 μl of a 2× lysis buffer consisting of 100 mM Tris HCL, pH 8.0, 2 mM EDTA, 1% SDS, and 20 μl/ml Proteinase K (Goldenberger et al., 1995, PCR Methods Appl. 4:368-370). The lysis reaction was performed in a PTC-200 personal thermocycler (MJ-Research, MA, USA) as follows: 55° C. for 60 minutes, followed by 10 minutes at 95° C. A 2 μl aliquot of the lysis product was used as the source of template DNA for PCR amplification. The ITS1, 5.8S ITS2 rDNA sequence was amplified via PCR using the primers ITS1 (TCCGTAGGTGAACCTGCGG; SEQ ID NO:40286) and ITS4 (TCCTCCGCTTATTGATATGC; SEQ ID NO:40287) provided in the Sequence Listing.

[0178] The PCR mixture was prepared in a volume of 50 μl and consisted of 2 μl DNA from the fungal lysis reaction, 0.5 μl primer ITS1 and 0.5 μl primer ITS4, 5 μl 10% Tween-20 and 42 μl of Platinum PCR SuperMix (Invitrogen, CA, USA). The PCR was carried out in a PTC-200 personal thermocycler (MJ-Research, MA, USA) as follows: 94° C. for 10 minutes followed by 30 cycles of 94° C. for 30 seconds, 52° C. for 30 seconds and 72° C. for 1 minute, 15 seconds, followed by a 72° C. cycle for 10 minutes. A 10 μl aliquot of PCR product diluted in 10 μl of ddH₂O was run on a pre-cast 1.0% agarose E-Gel 96 with ethidium bromide (Invitrogen, CA, USA) for 10 minutes using the Mother E-Base (Invitrogen, CA, USA) as a power source. A gel image was obtained by UV fluorescent imaging using the Chemilmager Ready system (Alpha Innotech, CA, USA). The presence of a 400-500 bp PCR product was confirmed by the gel image. The remaining 40 μl of PCR product was cleaned using 6 μl of the ExoSAP-IT clean-up mix (USB, OH, USA). The purification reaction was run on a PTC-200 personal thermocycler (MJ-Research, MA, USA): 30 minutes at 37° C. followed by 30 minutes at 80° C. Purified products were frozen and submitted for PCR sequencing. Sequencing was performed in the forward and reverse priming directions using ITS1 and ITS4 primers by the J. Craig Venter Institute in San Diego, Calif. using 454 technologies.

[0179] Sequence of the 18s intergenic region (ITS) and partial sequence of the 18s rDNA are provided in the Sequence Listing as SEQ ID NO:40284 and SEQ ID NO:40285, respectively. The sequences were submitted to GenBank on the NCBI web site. Sequences obtained in this study were compared to the GenBank database using the BLAST software on the NCBI web site.

### Example 6

### Phylogenetic Reconstructions

[0180] Nucleotide sequences were aligned in Bioedit (located on the World Wide Web) followed by manual refinement. Phylogenetic trees were constructed in PHYML (located on the World Wide Web) using maximum likelihood, HKY substitution model and the default settings. Branch support was obtained by bootstrapping (100 replicates). A phylogenetic tree showing the relatedness of M. strobelii to other fungal species is shown in FIG. 3.

### Example 7

### Use of Muscodor strobelii to Kill Ganoderma boninense and Other Pathogens

[0181] Muscodor strobelii was grown on a half plate of PDA for 6 days (middle 2 cm of agar removed). Then a small block of agar (3×3×3 mm) containing the test organism was placed on the opposite side of the plate. The plate was sealed with parafilm and growth of the test organism was observed after two days, after which the test organisms were removed and placed on fresh plates of PDA to determine if they were alive or dead. The results demonstrated that the VOCs of M. strobelii were lethal to many plant pathogens including Ganoderma boninense and Phytophthora palmivora (see Table 2). The results indicate that Muscodor strobelii and its VOCs can be useful in controlling major diseases of plants, such as the basal stem rot disease of oil palm caused Ganoderma boninense. A comparable test using Muscodor albus against Ganoderma boninense resulted in no effect of its VOCs on Ganoderma boninense. Thus, also in these respects M. strobelii is biologically different from M. albus.

[0182] In a separate experiment, the same test was used to determine the effect of exposure to M. strobelii VOCs on Candida albicans, Escherichia coli, and Staphylococcus aureus. In each case, growth of the microorganisms was inhibited and subsequent growth on fresh plates was not observed indicating they were killed by exposure to the VOCs.

TABLE 2
Inhibition of growth/killing of microorganisms by Muscodor strobelii.

| Microorganism tested | Growth after 2 days exposure | Alive or Dead |
|---|---|---|
| Ganoderma boninense | No | Dead |
| Phytophthora palmivoria | No | Dead |
| Pythium ultimum | No | Dead |
| Botrytis cinerea | No | Dead |
| Geotrichum candidum | No | Dead |
| Verticillium dahaliae | No | Dead |
| Sclerotinia sclerotiorum | No | Dead |
| Trichoderma virdae | No | Dead |
| Ceratocystis ulmi | No | Dead |
| Cerpospora betae | No | Dead |
| Mycosphaerella fijiensis | No | Dead |
| Aspergillis fumigatus | No | Dead |
| Fusarium oxysporum | Yes | Alive |
| Fusarium solani | Yes | Alive |
| Muscodor albus* | Yes | Alive |
| Candida albicans | No | Dead |
| Escherichia coli | No | Dead |
| Staphylococcus aureus | No | Dead |

### Example 8

[0183] Protection of Oil Palm Plant Roots from Ganoderma boninense Infection Using Muscodor strobelii

[0184] Muscodor strobelii was tested to determine if it could protect oil palm roots from infection by Ganoderma boninense. To this end a root model experiment was set up and it employed 5 ml plastic tubes containing 5 ml of Malaysian sandy loam soil (wetted) under the following conditions: Tube 1 Soil only; Tube 2 soil with Ganoderma boninense inoculum (0.5 mg dry weight inoculum) administered as diced agar plugs 5 plugs (1 cm squared); Tube 3 contained 10 barley seeds with M. strobelii and Tube 4 contained both Ganoderma boninense and the barley seed M. strobelii inoculum. Then, into each tube was placed a small steel rod which opened up a hole into which a freshly cut small root of oil palm could be placed. The root itself was wiped with a Kimwipe that had been wetted with 70% alcohol. The soil was gently pushed into place around the root. The tubes were each given 50 μl of water, capped and incubated for 6 days. At the end of this time the roots were examined for disease symptoms and only the root having the Ganoderma boninense alone (Tube 2) showed any signs of infection, at one location on the root (see FIG. 3). The other roots all appeared healthy. The results show that M. strobelii can protect oil palm roots from Ganoderma boninense infection.

[0185] Another experiment of the same design used Phytophthora palmivora as the potential root infecting pathogen. Again, the results showed that M. strobelii acted to protect the oil palm roots from infection.

### Example 9

### Use of Muscodor strobelii to Kill Ganoderma boninense in Soil

[0186] Malaysian sandy loam soil was acquired from an oil palm plantation, and 25 ml of the sterilized soil was placed in 4 plastic centrifuge tubes. A set of holes was drilled into each tube in order to access the soil for sampling purposes. Into Tube 1 was placed only soil as a control. Into Tube 2 was placed 10 seeds of barley grains (infested with Muscodor strobelii). Into Tube 3 was placed the equivalent of 1.0 mg dry weight of Ganoderma boninense however it was in the form of diced PDA agar pieces (10 pieces 1 cm square surface area). Finally, into Tube 4 was placed the Ganoderma boninense inoculum and the 10 infested barley grains of M. strobelii. The tubes were capped and incubated at 23° C. for 3 days.

[0187] At the end of three days, a SPME fiber was inserted into one of the access holes of each tube and positioned there for at least 30-40 minutes. Then, the sample was run by GC/MS. The results show that it was possible to detect isobutyric acid, the major signature compound of M. strobelii, only in the soil samples containing the barley grains carrying M. strobelii. The gas chromatograph depicted in FIG. 4 includes tracings for all four of the tubes. Only compounds mixtures from Tubes 2 and 4 (the upper two tracings in the figure) show a peak at 4.45 minutes that corresponds to isobutyric acid.

[0188] We then attempted to isolate Ganoderma boninense from all of the soil samples by plating them on PDA. Ganoderma boninense could only be successfully isolated from the control Tube 3 that contained only Ganoderma boninense. Attempts were made to isolate M. strobelii from all of the tubes by the soil plating technique, and it was successfully isolated from Tube 2 and Tube 4. Confirmation of the identity of the two fungi was done by 18S rDNA and ITS sequence analysis (see Table 3).

[0189] The results show that M. strobelii kills all hyphae of Ganoderma boninense when grown together in soil, as it was not possible to recover Ganoderma boninense in soil that had been inoculated with M. strobelii. Thus, M. strobelii can control Ganoderma boninense in the soil.

TABLE 3
Molecular biological analysis to identify Ganoderma and Muscodor
isolates obtained from soil sample tubes 2, 3 and 4.

| | TUBE | |
|---|---|---|
| Query | Number | Description E-value |
| Gan1_18S | Tube 3 | Ganoderma boninense 18S small subunit |
| | | ribosomal RNA gene, partial sequence |
| Gan1_ITS | | |
| Gan2_18S | | Ganoderma boninense 18S small subunit |
| | | ribosomal RNA gene, partial sequence |
| Gan2_ITS | | Ganoderma sp. STK-2006a internal transcribed |
| | | spacer 1 (isolate 2) |
| MB8_1_18S | Tube 4 | Muscodor strobelii 18S ribosomal RNA gene, |
| | | partial sequence |
| MB8_1_ITS | | Fungal endophyte isolate 2161 18S ribosomal |
| | | RNA gene |
| MB8_2_18S | | Muscodor strobelii 18S ribosomal RNA gene, |
| | | partial sequence |
| MB8_2_ITS | | Fungal endophyte isolate 2161 18S ribosomal |
| | | RNA gene |
| 130_1_18S | Tube 2 | Muscodor strobelii 18S ribosomal RNA gene, |
| | | partial sequence |
| 130_1_ITS | | Fungal endophyte isolate 2161 18S ribosomal |
| | | RNA gene |

### Example 10

### A Muscodor strobelii Inoculum Formulation for Application in Agricultural Systems

[0190] Seeds of an appropriate grain such as barley or rice were mixed with an equal weight of empty fruit bunches (EFBs) that had been chopped into small pieces (0.1-3.0 cm) and sterilized by autoclaving. Water was added to the mixture to provide a growth medium for the fungus. Muscodor strobelii was first grown on potato broth for at least 7-10 days and the resulting culture was used as the inoculum for the grain/fruit bunch organic mass (depicted in FIG. 5). Incubation was under sterile conditions for 7-10 days. Once the fungus has covered the organic mass, the organic mass (grain/empty fruit bunches covered with fungus) was subjected to drying under atmospheric conditions. Powdered milk can be used to stabilize the viability of the fungus in the dried mass.

[0191] The infested mass was stored at room temperature, under refrigeration (approximately 4° C.), at freezer temperatures (approximately −20° C.), or at −70° C. Storage at −70° C. resulted in the fungus maintaining viability for a longer time than storage at other temperatures. The EFB cultures lost viability gradually at room temperature until after 3 months the viability of the stored culture was unreliable.

### Example 11

### Genomic DNA sequencing

[0192] A fresh culture of Muscodor strobelii MB8 was prepared for genomic DNA extraction. 4.3 g cell pellet was used for high molecular weight DNA extraction using the UltraClean® Mega Soil DNA Isolation Kit (Cat. No 12900-10) from MO BIO Laboratories, Inc according to the manufacture's recommended protocol.

[0193] The genomic DNA from Muscodor strobelii MB8 was prepared for shotgun 454-pyrosequencing. Genomic DNA (7.5 μg) was used for library construction according to the recommended protocol (454 Life Sciences) for single long reads. The sequences were generated by two GS FLX Titanium series sequencing runs.

### Example 12

### cDNA Sequencing

[0194] Cell cultures and mRNA isolation: MB8 fungal cultures were grown in potato dextrose broth liquid medium or potato dextrose agar solid medium for several days until dense mycelia had filled the medium. The fungus was harvested from liquid medium by centrifugation at 10,000×g for 10 minutes, and from solid medium by scraping the mycelium off with a spatula. The fungal tissue was scooped up with a spatula and frozen in liquid nitrogen in pea-sized pieces. Equal amounts of the frozen tissue pieces were weighed into 50 ml polycarbonate tubes chilled in liquid nitrogen.

[0195] Stainless steel balls were added to each polycarbonate tube containing fungal tissue. The frozen tissue was pulverized by shaking in a Spex GenoGrinder™ tube shaker. The pulverized tissue was transferred to 5 parts lysis buffer (100 mM Tris base, pH 9.0-9.5, 250 mM LiCl, 50 mM EDTA, 10% SDS, 1.5% β-mercaptoethanol) and suspended/thawed completely in the buffer. The suspension was extracted with an equal volume of chloroform, centrifuged, and the supernatant mixed with an equal volume of RNA stabilization buffer (45% w/v guanidine sulfate, 25 mM sodium citrate, 0.5% sodium lauryl-sarcosine, 1 M sodium acetate pH 5.0). The mixture was allowed to stand for 15 minutes at room temperature and was then extracted with ¼ volume of chloroform and centrifuged. Total RNA was isolated from the resulting supernatant using Qiagen RNeasy Maxi™ columns used according to the manufacturer's recommendations. The total RNA was eluted in 2 ml RNAse-free distilled water, quantitated, and precipitated in isopropanol. The precipitated RNA was dissolved in Tris-EDTA buffer at a concentration of 5 mg/ml and mRNA purified from the total RNA using Invitrogen's FastTrack MAG TM mRNA isolation kit used according to the manufacturer's recommendations. The mRNA was eluted with 200 μl distilled water and stored at −80° C.

[0196] cDNA synthesis and sequencing: cDNA pools derived from fungal tissue grown in solid and liquid medium (VOC-producing conditions) were generated and sequenced separately. cDNA was synthesized by fragmenting the RNA and converting it to cDNA with random primers using the Illumina mRNA-Seq Library Preparation Kit according to the manufacturer's recommendation. Illumina adapters were then ligated to the DNA ends and the sample was PCR amplified using reagents in the same kit. The DNA template was sequenced on an Illumina Genome Analyzer II platform according to the manufacturer's recommended conditions. 76 bp paired-end reads were generated and mapped to the assembled genome sequence.

### Example 13

### Sequence Assembly and Gene Identification

[0197] MB8 genome sequence assembly was carried out using Newbler assembler version 2.0.00.20, using default parameters except the minimum overlap identity parameter (-mi), which was increased from 90% to 93%. The inputs consisted of 2 plates of 454 FLX Titanium pyrosequencing (unpaired) reads. In total, the assembler used 889 Mbp of input bases in 2.36 M reads. The assembled result incorporated about 99% of the reads and provided 16.4× coverage on average. The assembly size was bounded by 53.6 Mbp (total bases in contigs). The contig N50 value was 141.7 Kbp, and the largest contig was 631.4 Kbp.

[0198] A training set of 2528 high confidence gene models supported by several lines of evidence was generated using the following proprietary eukaryotic gene prediction procedure. UniProt protein sequences (release 15.9, Apweiler et al., Nucleic Acids Res. 32:D115-D119, 2004) from the Kingdom Fungi were aligned to the assembled MB8 genome using Blastx (Altschul et al., Nucleic Acids Res. 25: 3389-3402, 1997). Precise intron/exon boundaries for protein sequences that had good blast hits to the genome were then predicted using GeneWise (Birney and Durbin, Genome Res. 10: 547-548, 2000). All protein-DNA alignments were filtered to remove sequences with frameshifts, inner stop codons, and sequences without a valid start or stop codon at the 5′ and 3′ ends respectively. Additional filtering was performed to include only gene models with multiple lines of supporting experimental evidence. These included 1) the presence of splice junctions obtained by aligning Solexa/Illumina paired-end cDNA reads to the MB8 genome using the program TopHat (Trapnell et al., Bioinformatics 25: 1105-1111, 2009), and 2) at least 50% overlap between the gene model and the corresponding transcript assembled from the Solexa/Illumina reads using the program Cufflinks (cufflinks.cbcb.umd.edu/). The resulting subset of gene models was thus supported both by full length protein-DNA alignments and by Solexa/Illumina cDNA sequences. The remaining training set gene models were further filtered to prevent over-fitting by removing 1) additional copies of gene models that were more than 55% identical at the protein level and 2) a subset of gene models with 2 or less introns in order to reduce the bias in the training gene set towards 1 or 2 exon genes. These steps ensured a more evenly distributed representative set of gene models. The final set of filtered gene model sequences was used to train a Hidden Markov Model (HMM) using the program Augustus (Starke et al., BMC Bioinformatics 7, 2006).

[0199] Genes were predicted ab initio on all of the assembled scaffold sequences using the HMM trained using Augustus. In addition to the HMM-based ab initio gene model, further direct evidence on gene structure was included in the predictions using the hints mechanism included in the Augustus program. This mechanism allows providing additional evidence on gene features such as exon-intron boundaries that Augustus can use to determine for example the location of an exon-intron boundary that is both consistent with the ab initio model and is supported by direct experimental data. The evidence used in MB8 gene finding included GeneWise protein-DNA alignments, Solexa based exon-intron splice junctions generated using Tophat, and assembled transcripts created using the program Cufflinks with Solexa reads. The weights for all hints were derived by optimizing them using an accuracy function based on the sensitivity and specificity of gene prediction results on Arabidopsis genome sequence using the manually curated Arabidopsis genome annotation (TAIR database, www.arabidopsis.org/) as a reference data set. Alternative transcripts for genes were also predicted when the evidence supported their presence.

[0200] The ESTs were also clustered to provide an estimate of the total number of protein encoding genes in the MB8 genome and to enable the extraction of as much information about each transcript as possible. Solexa/Illumina paired-end shotgun cDNA sequences were aligned to the assembled MB8 genome sequence using TopHat (Trapnell et al., Bioinformatics 25(9):1105-1111, 2009). The aligned sequences were then assembled into EST contigs using Cufflinks (from cufflinks.cbcb.umd.edu). Expression information using the approach above was obtained for predicted genes 1) from cells grown under volatile producing conditions 2) from cells grown under conditions where volatile compounds were not produced.

[0201] A number of embodiments of the invention have been described. Nevertheless, it will be understood that elements of the embodiments described herein can be combined to make additional embodiments and various modifications may be made without departing from the spirit and scope of the invention. Accordingly, other embodiments, alternatives and equivalents are within the scope of the invention and claimed herein. Headings within the applications are solely for the convenience of the reader, and do not limit in any way the scope of the invention or its embodiments.

[0202] All publications and patent applications mentioned in this specification are herein incorporated by reference to the same extent as if each individual publication or patent application was specifically can individually indicated to be incorporated by reference

What is claimed is:

1. An isolated culture of a strain of Muscodor strobelii.

2. An isolated strain of Muscodor strobelii, wherein the strain is Agricultural Research Service Culture Collection accession number NRRL 50288.

3. A culture of Muscodor strobelii according to claim 1, wherein the strain is capable of producing isobutyric acid or a derivative of any thereof.

4. A culture of Muscodor strobelii according to claim 1, wherein the strain is capable of producing one or more of aristolene, bergamotene, caryophyllene, gurjunene, isolongifolene, patchoulene, or a derivative of any thereof.

5. A culture of Muscodor strobelii according to claim 1, further comprising an agriculturally effective amount of a compound or composition selected from the group consisting of a bactericide, a fungicide, an insecticide, a microbicide, a nematicide, a fertilizer, and a food preservative.

6. A composition comprising a culture of Muscodor strobelii according to claim 1 and a carrier.

7. A composition according to claim 6, wherein the carrier is a seed.

8. A composition according to claim 6, wherein the composition is in the form of a powder, a granule, a pellet, a gel, an aqueous suspension, a solution, or an emulsion.

9. A method for treating, inhibiting or preventing the development of a plant pathogenic disease, said method comprising applying a culture of Muscodor strobelii according to claim 1 on or in the vicinity of a host plant.

10. A method according to claim 9, wherein the pathogen is selected from the group consisting of Aspergillus fumigatus, Botrytis cinerea, Cerpospora betae, Curvularia sp., Ganoderma boninense, Geotrichum candidum, Mycosphaerella filiensis, Phytophthora palmivora, Phytophthora ramorum, Pythium ultimum, Rhizoctonia solani, Rhizopus sp., Schizophyllum sp., Sclerotinia sclerotiorum, Verticillium dahliae, and Xanthomonas axonopodis.

11. A method according to claim 9, wherein the host plant is susceptible to Ganoderma boninense.

12. A method according to claim 9, wherein the host plant is an oil palm plant.

13. A method according to claim 9, wherein Muscodor strobelii is established as an endophyte on the plant.

14. A non-naturally occurring oil palm cultivar that is an oil palm infected with an isolated culture of Muscodor strobelii.

15. Seed, reproductive tissue, vegetative tissue, plant parts, or progeny of a non-naturally occurring oil palm cultivar according to claim 14.

16. A product comprising material derived from a non-naturally occurring cultivar according to claim 14.

17. A method for killing a plant pathogen, said method comprising growing a culture of Muscodor strobelii according to claim 1 in the vicinity of the plant pathogen.

18. A method for treating, inhibiting or preventing the development of a plant pathogenic disease, said method comprising growing a culture of Muscodor strobelii according to claim 1 in a growth medium or soil of a host plant prior to or concurrent with host plant growth in said growth medium or soil.

19. A method of screening microbial strains, said method comprising (i) co-culturing a Muscodor strobelii strain according to claim 1 with one or more candidate microbial strains, (ii) selecting one or more viable microbial strains after the co-culturing, and (iii) characterizing the one or more selected microbial strains; wherein said method identifies one or more microbial strains useful for treating, inhibiting or preventing the development of a plant pathogenic disease.

20. An isolated microbial strain obtainable by a method according to claim 19.

21. A method for killing, inhibiting or preventing the development of an organism selected from the group consisting of a fungus, a bacterium, a microorganism, a nematode, and an insect, said method comprising exposing the organism to an effective amount of a culture of Muscodor strobelii according to claim 1.

22. A substantially purified nucleic acid molecule comprising:
(i) a nucleotide sequence hybridizing under high stringency conditions to any one of the nucleotide sequences in the Sequence Listing, a complement thereof or a fragment of either;
(ii) a nucleotide sequence exhibiting a 70% or greater identity to any one of the nucleotide sequences in the Sequence Listing, a complement thereof or a fragment of either;
(iii) a nucleotide sequence encoding an amino acid sequence exhibiting a 50% or greater identity to any one of the polypeptides in the Sequence Listing; or
(iv) a nucleotide sequence that is an interfering RNA to a nucleotide sequence according to any one of paragraphs (i)-(iii).

23. A substantially purified polypeptide, wherein said polypeptide is encoded by a nucleic acid molecule comprising:
(i) a nucleotide sequence hybridizing under high stringency conditions to any one of the nucleotide sequences in the Sequence Listing, a complement thereof or a fragment of either;
(ii) a nucleotide sequence exhibiting a 70% or greater identity to any one of the nucleotide sequences in the Sequence Listing, a complement thereof or a fragment of either; or
(iii) a nucleotide sequence encoding an amino acid sequence exhibiting a 50% or greater identity to any one of the polypeptides in the Sequence Listing.

24. A transformed cell comprising a first nucleic acid molecule according to claim 22, wherein said first nucleic acid molecule is operably linked to a second nucleic acid molecule that is heterologous with respect to said first nucleic acid.

25. A transgenic organism comprising the transformed cell of claim 24.

26. The transgenic organism of claim 25, wherein said organism is an endophyte or a plant.

The application's sequence listing, which the Patent Office published only in electronic form, follows.

SEQUENCE LISTING (40287 sequences)

SEQ ID NO: 1 - DNA, 2457 bp, Muscodor strobelii
  misc_feature: SGI cDNA ID NO. 559556
  misc_feature: Reduced expression when VOC is produced
  misc_feature: Encodes the peptide sequence at SEQ ID NO 2
tcacagagccatggccccgcccagcgtgctgcccgcgagagcatcgtgcccggcccgcagctgaacatggagctgcccagcgccgcagctgtcggcattgccgacgacgatgccgccgacgacccgcagatcaatgccgagctcaccgccatcttcaagcagatccagaccgtgctcgatctgcgccaccgctacatccgcctgtcgctgcaacgcgacggcgacaatcccaaggacggccccggctggcgtatatatcctgcgccccctgagcctgcttgggtcgatccgcagtcggaccagacgcccggccagcacacggctcccaacagcttggcaaacagcaccgtcctgtcgccccagacaagtgccttccgctcgggcgaggacctcgggtcggccttggacgccgagccacggaagacccctaagaagcgcaaacctggccacgacatcggggaggatttcgacttcaacgacctactgccattaccccaagccagtgagtttacctatcgtctagacgagagcggcgtctaccaggtattcgagaacgcagcggccgacaccgccaacacccctgtcgttggcgttcctaccatcaaggacttttaccaagacttggagcagatcttatctgtctcttctgatgggccgagcaagagcttcgcgtttcgcagactccaatatctcgagggcaaattcaatctgtacgcgctgctgaacgagtaccaagagacggccgacagcaaaaaggtgccccatcgagacttttacaatgtgagaaaggtagacacccatgttcaccactctgcctgtatgaaccagaagcatcttctccgcttcatcaagagtaaaatgaaaaagtgccctgacgagcatgtgctcatccgtgacggcaagaatctgactctgaaggaagtttttgagagtatcaacttgacggcgtacgatctgagtatcgacacgctggatatgcatgcacacacggattcttttcatcgatttgacaagttcaacctaaaatacaaccctgtgggcgaatcccgtcttcgcaccatcttcctgaaaacagacaatcacatccagggccggtatctggcggagatcacgaaggaggtgatcgccgatctcgaatcgagcaagtatcaaatggtggaatggcgtatctccatatacgggcgttctctggatgaatgggacaagctggcagcttgggtcgtggacaacaagctcttgtcacccaacgttcgttggctcatccagattccacggctgtacgacgtctataaagccaccgggctgatgggctccttcgagcaagtggtcaagaacatcttccagccactgttcgaagtgactaaggatcccgagtcacatccccagctgcatgtcttcctgcagcgtgtcatcgggttcgacagtgtagacgatgagagcaaagtagagcggcggctcttcaagaagtatcccgtgcccaacgaatggatgtcaccgcagaacccaccgtatagctattggatctactatctcttctccaacatgacgtcgctcaatttctggcgtcgtcagcgagggttcaatacgttcctgcttcggccgcactgcggtgaagcgggtgacagcgaacatctcgccgtagcactgctgtgctgtcacagcatcagccacgggcttctcctacgcaaagtcccactgctacaatacattttctacctcgagcagatcggcatcgccatgtctcctctcagcaacaacgcgctgttccttgcgtacgagaggaacccattccaccaatatttccgacgcggacttaacgtgtcactgtctaccgacgacccgctccagtttgccttcaccaaggagcctttgatggaagagtacgcggtggcggcgcagatctacaaactcagtcctgtagacatgtgtgagctggccaaaaactctgtcaagcagagtggattcgagtactcagtcaagcagcagtggctgggtgataagttcaacctgccaggtgcagaggggaacaagatgatcaagacaaacgtgcccgaccggcgagaggaattcagacaccagacatgggtggaggagcaccgaatgatttcgaggtacacgtcgagccacgagctggacgagattgccgaacaccacccggccaccgagagcaagatgacatcgcctacgggcacgacgcatcagcgggctacattttcccatctgggcaacaatgagatgggccggggcgggctctcgaacgggcggggtgatgtgagtgcacacaccgaggcagggggcagcggcggcggcagccaagccgggcagcgggagctgaccgacgggcttggggagctgcacatttctgggcacgaacctcgctaccttcccgggatggtggcgagggcgtcgaggcgggatagcatgcgccagagctcagtgcacgagtcagattcgtaa

SEQ ID NO: 2 - protein, 818 aa, Muscodor strobelii
  misc_feature: SGI Peptide ID NO. 559556
  misc_feature (260)..(666): Pfam Id: PF00962 Pfam Desc: Adenosine/AMP deaminase
  misc_feature (27)..(744): NCBI GI: 145235849 Blast Desc: An03g06970 [Aspergillus niger] gi|134058262|emb|CAK38454.1| protein product [Aspergillus niger]
  misc_feature (33)..(698): NCBI GI: 225560137 Blast Desc: AMP deaminase [Ajellomyces capsulatus G186AR]
  misc_feature (39)..(707): NCBI GI: 67903770 Blast Desc: AN8872.2 [Aspergillus nidulans FGSC A4] gi|40744930|gb|EAA64086.1| AN8872.2 [Aspergillus nidulans FGSC A4]
  misc_feature (11)..(698): NCBI GI: 240278884 Blast Desc: AMP deaminase [Ajellomyces capsulatus H143]
  misc_feature (41)..(711): NCBI GI: 212541466 Blast Desc: AMP deaminase Amd1, [Penicillium marneffei ATCC 18224] gi|210068187|gb|EEA22279.1| AMP deaminase Amd1, [Penicillium marneffei ATCC 18224]
  misc_feature (41)..(711): NCBI GI: 242798545 Blast Desc: AMP deaminase Amd1, [Talaromyces stipitatus ATCC 10500] gi|218716537|gb|EED15958.1| AMP deaminase Amd1, [Talaromyces stipitatus ATCC 10500]
  misc_feature (44)..(701): NCBI GI: 121714767 Blast Desc: AMP deaminase, [Aspergillus clavatus NRRL 1] gi|119403149|gb|EAW13567.1| AMP deaminase, [Aspergillus clavatus NRRL 1]
  misc_feature (38)..(714): NCBI GI: 50552824 Blast Desc: YALI0E11495p [Yarrowia lipolytica] gi|49649691|emb|CAG79415.1| YALI0E11495p [Yarrowia lipolytica]
  misc_feature (41)..(720): NCBI GI: 19111945 Blast Desc: adenosine deaminase Ada1 () [Schizosaccharomyces pombe 972h-] gi|12644299|sp|P50998.2|AMPD_SCHPO RecName: Full=AMP deaminase; AltName: Full=Myoadenylate deaminase adenosine Ada1 ()
  misc_feature (30)..(706): NCBI GI: 213408949 Blast Desc: AMP deaminase [Schizosaccharomyces japonicus yFS275] gi|212003292|gb|EEB08952.1| AMP deaminase [Schizosaccharomyces japonicus yFS275]
  misc_feature (42)..(720): SWISSPROT Homolog: EC 3.5.4.6 AMP deaminase
  misc_feature: Useful for introducing or modulating the production of volatile compounds
SQSHGPAQRAARESIVPGPQLNMELPSAAAVGIADDDAADDPQINAELTAIFKQIQTVLDLRHRYIRLSLQRDGDNPKDGPGWRIYPAPPEPAWVDPQSDQTPGQHTAPNSLANSTVLSPQTSAFRSGEDLGSALDAEPRKTPKKRKPGHDIGEDFDFNDLLPLPQASEFTYRLDESGVYQVFENAAADTANTPVVGVPTIKDFYQDLEQILSVSSDGPSKSFAFRRLQYLEGKFNLYALLNEYQETADSKKVPHRDFYNVRKVDTHVHHSACMNQKHLLRFIKSKMKKCPDEHVLIRDGKNLTLKEVFESINLTAYDLSIDTLDMHAHTDSFHRFDKFNLKYNPVGESRLRTIFLKTDNHIQGRYLAEITKEVIADLESSKYQMVEWRISIYGRSLDEWDKLAAWVVDNKLLSPNVRWLIQIPRLYDVYKATGLMGSFEQVVKNIFQPLFEVTKDPESHPQLHVFLQRVIGFDSVDDESKVERRLFKKYPVPNEWMSPQNPPYSYWIYYLFSNMTSLNFWRRQRGFNTFLLRPHCGEAGDSEHLAVALLCCHSISHGLLLRKVPLLQYIFYLEQIGIAMSPLSNNALFLAYERNPFHQYFRRGLNVSLSTDDPLQFAFTKEPLMEEYAVAAQIYKLSPVDMCELAKNSVKQSGFEYSVKQQWLGDKFNLPGAEGNKMIKTNVPDRREEFRHQTWVEEHRMISRYTSSHELDEIAEHHPATESKMTSPTGTTHQRATFSHLGNNEMGRGGLSNGRGDVSAHTEAGGSGGGSQAGQRELTDGLGELHISGHEPRYLPGMVARASRRDSMRQSSVHESDS

SEQ ID NO: 3 - DNA, 2985 bp, Muscodor strobelii
  misc_feature: SGI EST ID NO. CUFF.561.1
  misc_feature: Variant of the nucleotide sequence at SEQ ID NO 1
cacagagccatggccccgcccagcgtgctgcccgcgagagcatcgtgcccggcccgcagctgaacatggagctgcccagcgccgcagctgtcggcattgccgacgacgatgccgccgacgacccgcagatcaatgccgagctcaccgccatcttcaagcagatccagaccgtgctcgatctgcgccaccgctacatccgcctgtcgctgcaacgcgacggcgacaatcccaaggacggccccggctggcgtatatatcctgcgccccctgagcctgcttgggtcgatccgcagtcggaccagacgcccggccagcacacggctcccaacagcttggcaaacagcaccgtcctgtcgccccagacaagtgccttccgctcgggcgaggacctcgggtcggccttggacgccgagccacggaagacccctaagaagcgcaaacctggccacgacatcggggaggatttcgacttcaacgacctactgccattaccccaagccagtgagtttacctatcgtctagacgagagcggcgtctaccaggtattcgagaacgcagcggccgacaccgccaacacccctgtcgttggcgttcctaccatcaaggacttttaccaagacttggagcagatcttatctgtctcttctgatgggccgagcaagagcttcgcgtttcgcagactccaatatctcgagggcaaattcaatctgtacgcgctgctgaacgagtaccaagagacggccgacagcaaaaaggtgccccatcgagacttttacaatgtgagaaaggtagacacccatgttcaccactctgcctgtatgaaccagaagcatcttctccgcttcatcaagagtaaaatgaaaaagtgccctgacgagcatgtgctcatccgtgacggcaagaatctgactctgaaggaagtttttgagagtatcaacttgacggcgtacgatctgagtatcgacacgctggatatgcatgcacacacggattcttttcatcgatttgacaagttcaacctaaaatacaaccctgtgggcgaatcccgtcttcgcaccatcttcctgaaaacagacaatcacatccagggccggtatctggcggagatcacgaaggaggtgatcgccgatctcgaatcgagcaagtatcaaatggtggaatggcgtatctccatatacgggcgttctctggatgaatgggacaagctggcagcttgggtcgtggacaacaagctcttgtcacccaacgttcgttggctcatccagattccacggctgtacgacgtctataaagccaccgggctgatgggctccttcgagcaagtggtcaagaacatcttccagccactgttcgaagtgactaaggatcccgagtcacatccccagctgcatgtcttcctgcagcgtgtcatcgggttcgacagtgtagacgatgagagcaaagtagagcggcggctcttcaagaagtatcccgtgcccaacgaatggatgtcaccgcagaacccaccgtatagctattggatctactatctcttctccaacatgacgtcgctcaatttctggcgtcgtcagcgagggttcaatacgttcctgcttcggccgcactgcggtgaagcgggtgacagcgaacatctcgccgtagcactgctgtgctgtcacagcatcagccacgggcttctcctacgcaaagtcccactgctacaatacattttctacctcgagcagatcggcatcgccatgtctcctctcagcaacaacgcgctgttccttgcgtacgagaggaacccattccaccaatatttccgacgcggacttaacgtgtcactgtctaccgacgacccgctccagtttgccttcaccaaggagcctttgatggaagagtacgcggtggcggcgcagatctacaaactcagtcctgtagacatgtgtgagctggccaaaaactctgtcaagcagagtggattcgagtactcagtcaagcagcagtggctgggtgataagttcaacctgccaggtgcagaggggaacaagatgatcaagacaaacgtgcccgaccggcgagaggaattcagacaccagacatgggtggaggagcaccgaatgatttcgaggtacacgtcgagccacgagctggacgagattgccgaacaccacccggccaccgagagcaagatgacatcgcctacgggcacgacgcatcagcgggctacattttcccatctgggcaacaatgagatgggccggggcgggctctcgaacgggcggggtgatgtgagtgcacacaccgaggcagggggcagcggcggcggcagccaagccgggcagcgggagctgaccgacgggcttggggagctgcacatttctgggcacgaacctcgctaccttcccgggatggtggcgagggcgtcgaggcgggatagcatgcgccagagctcagtgcacgagtcagattcgtaatgtttctgtgctcgactgtgccatcctgcaatgctgcattacagggaacgctgaggtgcgagtggcggttctcgttgtggccatcaaacctggccggagcgactgccaagccgcataccatgcgagtgaagcgcccgagtatggcgggaagcagttacgggaaacagtgtacggaggtgaaagctacgaaccgatagtcatataactggagaatgtatgcatgcggatgagacgagatgtttatatggtgaattgcccacgatacgagtagttagaggttacggcgagttgttgatgaaccactcaaacatgcctacatgtatgctggaggctctgttggataaattgattagacattaggtaagtcattatgccaatggcgatgacgatcactaatggcaactgtgacaagttctaaattgactctcgtcaactcatcaaatcagattctgtggcgttgtgtagaggtggtagttaagagaaacagggagcgcgcagatagcttcaatgttaatatgatatatctcat

SEQ ID NO: 4 - DNA, 1458 bp, Muscodor strobelii
  misc_feature: SGI cDNA ID NO. 559557
  misc_feature: Encodes the peptide sequence at SEQ ID NO 5
atgaggagccaagcaagtgctaaccctctagacctttcgccaaaggctgtgcagttgctagctgaggatttcgccaatgagggccaattttcggacgggtacatagttgtgaagatatgcagttactccccaaactcgatctacgccaacagatggtggacgaggcttagcaaaagtaaacctaagatattgaggaggttactcaagcatgcggaacttggacctgctctcgggctcgtattgcggatcccgggcctacgttctggacttcagctagccatctggaagaagatcatggctgagaacgcagtagaggaagtcgtccattatctcaagcatatatacgacacgtggtgccatgtgatggggtccgccgcggcgctcgaacttgtggacaacgatacagttcgcgaactcgagctccgtttcccaggcatatcgtattgcgatgatctttatgcctctaatgcaatacggacgaatacaatattccaaggcgtcacagatgagcttgagagggagaacatcctgcaaagactccagcaagtcaactacttgatcccaactgttcacaccttacagcaagacttcaaatacttgcgacaatgtacgagtgttatgaagcagttaatcttagggaagagccgactccccgttacggtccaaacaattgtttcgagtgcatacaaggtcgatgcgagacaaggttatataacacacgtttttaaaaatataaaggtgctctatcttggtattatgcagaacctcgtggaactctcgggtgagaatcctttaaaaaaagataatgagaaggacctaaaaacacgttcgtacaatcaaaaagcctggcatcaattagcacgccaagcccaaaagctagggtatgattctgacgaaatctctcgtctatctcgcctagattcggaccgagaaatggcaaaaagagcgttgctagatgctcgaccactacagcatttcgaatatgggcagaacttggacgctttgatcgctaccatggttcaatattttaataaggcgcggccaatcatgtctaaagacacccgtctagcacttcctaccttacgtctaggagagccgatcaagagacaatgtggtcgccagtactcgaaagcgtactctaacgaccggttctatattactttggacaaatttactagtcatctacagaaggatgccgatattacttctttgttcgtccggaggtccgtgtttcacgcattttggggctggcatgatgagcaggataccgaacagcataacgtgaacaaccagagcgccgatgcacaagatcaacaaatgtcgaatgcggacgaagcagatcaagatataagagactctaaccacacgggcggcgtttccgtgccggcccctgctcaagaccacactaccaccagcagacaggagctcggctcttaccacttttatttcggctcctga

SEQ ID NO: 5 - protein, 485 aa, Muscodor strobelii
  misc_feature: SGI Peptide ID NO. 559557
  misc_feature (13)..(474): NCBI GI: 156050907 Blast Desc: SS1G_08041 [Sclerotinia sclerotiorum 1980] gi|154692441|gb|EDN92179.1| SS1G_08041 [Sclerotinia sclerotiorum 1980]
  misc_feature (11)..(416): NCBI GI: 242797847 Blast Desc: conserved [Talaromyces stipitatus ATCC 10500] gi|218716391|gb|EED15812.1| conserved [Talaromyces stipitatus ATCC 10500]
  misc_feature (11)..(416): NCBI GI: 242763416 Blast Desc: conserved [Talaromyces stipitatus ATCC 10500] gi|218723766|gb|EED23183.1| conserved [Talaromyces stipitatus ATCC 10500]
  misc_feature (20)..(416): NCBI GI: 238492569 Blast Desc: conserved [Aspergillus flavus NRRL3357] gi|220696015|gb|EED52357.1| conserved [Aspergillus flavus NRRL3357]
  misc_feature (20)..(416): NCBI GI: 159122693 Blast Desc: conserved [Aspergillus fumigatus A1163]
  misc_feature (11)..(416): NCBI GI: 242761098 Blast Desc: conserved [Talaromyces stipitatus ATCC 10500] gi|218723310|gb|EED22727.1| conserved [Talaromyces stipitatus ATCC 10500]
  misc_feature (11)..(416): NCBI GI: 242771706 Blast Desc: conserved [Talaromyces stipitatus ATCC 10500] gi|218721515|gb|EED20933.1| conserved [Talaromyces stipitatus ATCC 10500]
  misc_feature (20)..(416): NCBI GI: 70996436 Blast Desc: conserved [Aspergillus fumigatus Af293] gi|66850608|gb|EAL90935.1| conserved [Aspergillus fumigatus Af293]
  misc_feature (45)..(416): NCBI GI: 159124735 Blast Desc: conserved [Aspergillus fumigatus A1163]
  misc_feature (11)..(416): NCBI GI: 70986586 Blast Desc: conserved [Aspergillus fumigatus Af293] gi|66846414|gb|EAL86746.1| conserved [Aspergillus fumigatus Af293]
MRSQASANPLDLSPKAVQLLAEDFANEGQFSDGYIVVKICSYSPNSIYANRWWTRLSKSKPKILRRLLKHAELGPALGLVLRIPGLRSGLQLAIWKKIMAENAVEEVVHYLKHIYDTWCHVMGSAAALELVDNDTVRELELRFPGISYCDDLYASNAIRTNTIFQGVTDELERENILQRLQQVNYLIPTVHTLQQDFKYLRQCTSVMKQLILGKSRLPVTVQTIVSSAYKVDARQGYITHVFKNIKVLYLGIMQNLVELSGENPLKKDNEKDLKTRSYNQKAWHQLARQAQKLGYDSDEISRLSRLDSDREMAKRALLDARPLQHFEYGQNLDALIATMVQYFNKARPIMSKDTRLALPTLRLGEPIKRQCGRQYSKAYSNDRFYITLDKFTSHLQKDADITSLFVRRSVFHAFWGWHDEQDTEQHNVNNQSADAQDQQMSNADEADQDIRDSNHTGGVSVPAPAQDHTTTSRQELGSYHFYFGS

SEQ ID NO: 6 - DNA, 1225 bp, Muscodor strobelii
  misc_feature: SGI EST ID NO. CUFF.13.0
  misc_feature: Variant of the nucleotide sequence at SEQ ID NO 4
gccgacttgctctcggcattactgcagcagtcgaacctgagtacggttgatctacgcggctccgagccacctatgctctgctttcccatgggtatgcatgtcagctgtcttcatgggaagcatcgcgtggaagcgctccggcgactgagacatctttctccttcgtggacggtcaagctatacgtagacctttcgccaaaggctgtgcagttgctagctgaggatttcgccaatgagggccaattttcggacgggtacatagttgtgaagatatgcagttactccccaaactcgatctacgccaacagatggtggacgaggcttagcaaaagtaaacctaagatattgaggaggttactcaagcatgcggaacttggacctgctctcgggctcgtattgcggatcccgggcctacgttctggacttcagctagccatctggaagaagatcatggctgagaacgcagtagaggaagtcgtccattatctcaagcatatatacgacacgtggtgccatgtgatggggtccgccgcggcgctcgaacttgtggacaacgatacagttcgcgaactcgagctccgtttcccaggcatatcgtattgcgatgatctttatgcctctaatgcaatacggacgaatacaatattccaaggcgtcacagatgagcttgagagggagaacatcctgcaaagactccagcaagtcaactacttgatcccaactgttcacaccttacagcaagacttcaaatacttgcgacaatgtacgagtgttatgaagcagttaatcttagggaagagccgactccccgttacggtccaaacaattgtttcgagtgcatacaaggtcgatgcgagacaaggttatataacacacgtttttaaaaatataaaggtgctctatcttggtattatgcagaacctcgtggaactctcgggtgagaatcctttaaaaaaagataatgagaaggacctaaaaacacgttcgtacaatcaaaaagcctggcatcaattagcacgccaagcccaaaagctagggtatgattctgacgaaatctctcgtctatctcgcctagattcggaccgagaaatggcaaaaagagcgttgctagatgctcgaccactacagcatttcgaatatgggcagaacttggacgctttgatcgctaccatggttcaatattttaataaggcgcggccaatcatgtctaaagacacccgtctag

SEQ ID NO: 7 - DNA, 909 bp, Muscodor strobelii
  misc_feature: SGI cDNA ID NO. 559558
  misc_feature: Encodes the peptide sequence at SEQ ID NO 8
atggaacgaatccaaggacagctccaagagcaggcaaagagtgctaagcaagtcttatcgtggataacctgtacgaaaaggccactaacaaaactggaacttcaatatgcacttgcagtagaaatcaacgagcgagaacttgataaagacaaccttccacatatcgaagacgtggtttctgtatgcgctggactagtaacagttgatgaagaaagcagtattgttcggttagtgcattatacaacacaagactacttccaacgaacccagagcgaatggtttccaaacgcacagatttatattacaacaatctgtactacctacctctcctatcagaactttgcgaatggatattgccaaacagacaaacaattcgaagaacgggttagcttgcatccgttttacgattacgctgctcgcaactggggacatcatggccgtaaggtgtcagcttaccaggacattgtttcctttctccgaaaaccagccgaggttgaagtatcaagtcaagccctcctagtcgataacgaatttaggtacaaggattacagtcagagcaccccaaagcaaatgactgggttacacttagcagcatattttggtcttaacgaaatcgtagcaaccatactcggtgattacaacgcggatgttagagatactgacggttggacgccgctatggtgggcggcagagaatgggcacgaggccgtggtcaagcttctgctcgagacggggaaagtcgatcccaactcgaaagataagtatgaccggacgccgctatcgtatgcggcagagaacgagcacgaggccgtagtcaagcttctacttaaggatggtgccaattgtgaaactgttcttcgagcagttggagtaaacaggtatatatatcttgcttgtctatatttctaa

SEQ ID NO: 8 - protein, 302 aa, Muscodor strobelii
  misc_feature: SGI Peptide ID NO. 559558
  misc_feature (221)..(254): Pfam Id: PF00023 Pfam Desc: Ankyrin repeat
  misc_feature (255)..(281): Pfam Id: PF00023 Pfam Desc: Ankyrin repeat
  misc_feature (1)..(276): NCBI GI: 46139821 Blast Desc: FG11425.1 [Gibberella zeae PH-1]
  misc_feature (1)..(290): NCBI GI: 171693393 Blast Desc: protein product [Podospora anserina] gi|170946645|emb|CAP73448.1| protein product [Podospora anserina]
  misc_feature (1)..(284): NCBI GI: 115390338 Blast Desc: conserved [Aspergillus terreus NIH2624] gi|114195070|gb|EAU36770.1| conserved [Aspergillus terreus NIH2624]
  misc_feature (1)..(283): NCBI GI: 258572672 Blast Desc: conserved [Uncinocarpus reesii 1704] gi|237905368|gb|EEP79769.1| conserved [Uncinocarpus reesii 1704]
  misc_feature (1)..(279): NCBI GI: 156062774 Blast Desc: SS1G_01503 [Sclerotinia sclerotiorum 1980] gi|154696839|gb|EDN96577.1| SS1G_01503 [Sclerotinia sclerotiorum 1980]
  misc_feature (1)..(285): NCBI GI: 255957133 Blast Desc: Pc21g23520 [Penicillium chrysogenum Wisconsin 54-1255] gi|211591030|emb|CAP97249.1| Pc21g23520 [Penicillium chrysogenum Wisconsin 54-1255]
  misc_feature (1)..(285): NCBI GI: 159123469 Blast Desc: Ankyrin repeat protein [Aspergillus fumigatus A1163]
  misc_feature (1)..(279): NCBI GI: 212541358 Blast Desc: serine/threonine-protein kinase ripk4, [Penicillium marneffei ATCC 18224] gi|210068133|gb|EEA22225.1| serine/threonine-protein kinase ripk4, [Penicillium marneffei
  misc_feature (1)..(284): NCBI GI: 119479349 Blast Desc: Ankyrin repeat protein [Neosartorya fischeri NRRL 181] gi|119407857|gb|EAW17806.1| Ankyrin repeat protein [Neosartorya fischeri NRRL 181]
  misc_feature (3)..(279): NCBI GI: 238500846 Blast Desc: Pfs, NACHT and Ankyrin domain protein [Aspergillus flavus NRRL3357] gi|220691894|gb|EED48241.1| Pfs, NACHT and Ankyrin domain protein [Aspergillus flavus NRRL3357]
MERIQGQLQEQAKSAKQVLSWITCTKRPLTKLELQYALAVEINERELDKDNLPHIEDVVSVCAGLVTVDEESSIVRLVHYTTQDYFQRTQSEWFPNAQIYITTICTTYLSYQNFANGYCQTDKQFEERVSLHPFYDYAARNWGHHGRKVSAYQDIVSFLRKPAEVEVSSQALLVDNEFRYKDYSQSTPKQMTGLHLAAYFGLNEIVATILGDYNADVRDTDGWTPLWWAAENGHEAVVKLLLETGKVDPNSKDKYDRTPLSYAAENEHEAVVKLLLKDGANCETVLRAVGVNRYIYLACLYF

SEQ ID NO: 9 - DNA, 433 bp, Muscodor strobelii
  misc_feature: SGI EST ID NO. CUFF.16.0
  misc_feature: Variant of the nucleotide sequence at SEQ ID NO 7
tatcaagtcaagccctcctagtcgataacgaatttaggtacaaggattacagtcagagcaccccaaagcaaatgactgggttacacttagcagcatattttggtcttaacgaaatcgtagcaaccatactcggtgattacaacgcggatgttagagatactgacggttggacgccgctatggtgggcggcagagaatgggcacgaggccgtggtcaagcttctgctcgagacggggaaagtcgatcccaactcgaaagataagtatgaccggacgccgctatcgtatgcggcagagaacgagcacgaggccgtagtcaagcttctacttaaggatggtgccaattgtgaaactgttcttcgagcagttggagtaaacaggtatatatatcttgcttgtctatatttctaatttagttgtagcattatatatag

SEQ ID NO: 10 - DNA, 2916 bp, Muscodor strobelii
  misc_feature: SGI cDNA ID NO. 559559
  misc_feature: Encodes the peptide sequence at SEQ ID NO 11
atggagcgtcagtctatctcaaacctctatatcaaattggaagaccttcgcacattgctcacgacaaaatttggggcgggaaacttcaaaatagtggaaagggaagaaagctacgagattaacgttccagagctgctaacaacggttggaaagatggacgacctacgtgcaaagatcaagagaattcgcttagacaacactaatattgagcgtcggcatttcattcccgaggcttccttatttgaggccatgtctaaagcggcaatcgaggcatctctcaaaagcctcaccgtccaacgtcatgaactactagatctaaccgacagcattctagcaggtgctcgaaagtgtttcgctatcttgatcttgatatcgtatgaagaggcaataccagactttttcaggcgtgactcactccaacagtcttggcctgacgatcgtttgccatactcctcggaagccctacagcagatttttgccgaagatgagagaggtctgagagttgcagattttctcgaaaaacaatgggaggttgctattccaatcatgcacaagaacatgattttccgaaaactagacacggaagtgattttgccctttttgcagaagcataaagtcggcaagggttcgatgggcactgcttgggagattaaactacatccgcaatgccatcggctttccttaccggaccacaaggttgtcaaaaaacagatcacatgtggagaggacgacgatatgaatgtttttgaaaaggaggtggcaaatttagccctccttgcgcacttgaagcacccaaacattgttcagttgtattgctcctatgtctatcggcaagaatacaaccttatctttgctgctgccgacggcggcacacttgaaactcttctcaaaggcaagaatgacatcaaggggccagaaggctcacagcttttacttgctctagccgatttggcatttgccatcaatgttatgcacaacttcacctccgaagcccttgatcttaccttgtcgggatgccaccacgaccttgcgccccggaatatcttggttcagggcgaaactctcttgctagctgattttgggctatcaactttccacaacgtggaggaggactccttaaccacattcaaagaagtacgcggctcgtatattgcccccgaatgccagacattacacggaaattctgtaagaacggaaaagattggccgagctagtgacatatggtctttcggttgcattctcgccgaaatattgatatatatggttcagggttcgaagggagtcgaacaatttcgtgaggagagaaaagttgaggttactcctgagattgaatggttccgttttcatcagggacctaatcaaccaaacccagtggtcgatcgttggctaactcagctgcaagacggtaaggagctattctgctcgcgaatggttgggttaattcgacaaatgctgtcaatgagcccagatcaacgccctcgctcgtcacaaattttagccgttcttcgtggtatttctatcgtctctatcgcagcgtctgtccttcaggacttgaacagtgcccgcaacacttgtgatagtgttgattggctactagggaaaatgcgatttcgtggctggatgtttgctttcattcaattgcttgataaaataattcgggaagggcacgaggttcgggaatttgactttgccgcaacagtcaaggccttgaaagaaacacaacgcatcgtggagagtattgggtcagcggcgaacgttgacgcccatcggcaacagccgctattacgctaccaatatgagagaatgatggagggactgccacagcactaccgcttcgtcgccaaagaacaactaaaaattctagtactcagcaaaaacgatgacgaggcagaaggcttattagcagccatgggtaatgaaaatgaaaaagacattggggtcttgctcgccgtgagacatcttaccacccttgctgagactggccgtcttaccgaccagagccatcttgtgattgatcacaagcggatcactataaagacacccgtcgatattcatagcctggcggcgcttgaccatacctcggaacttgtcctagtcgaatggctgagatacaaagaagaatgggctgacgagacgacgaggcaggagctgctccgccggctcgcctctgtagcaggcctattccgcgcagaaagttccgcgcagattccaggcagcttgcaatgccagggcatgttccatgatccgtctcatcgagcttttggcttcgtgtacggctttccatcgcagaacacaaaaccaaaaacactacattctcttctgagctcacgaaatgatcgtcctctgctcgaacgtcgatttcgtctagcattcaatatttgccattgtatttgcacatttcatatggttggatggctgcatcgaaacctccactcgaagaatgttcttttcttcgtaccagacgggggggatgacgccgaatgggccaaggaaccacgcatattgggtttcgcagggagccgtgagaacgagttggcttcctttagtaatggaccagatgaaagcagtcaatttcgaaattaccaacatcctgtataccttgcacatcaggagcgctatcgggaagaatttgattactattcagtcggcatgctcctgttggagatcggactctggagcccattatctaagatcacggattccgacaggtttcgagggatatcggacgaacaatacaagatagaggtcctcgaccgcagggtctcacagctcggtgttgctatgggcacacggtacatggaagctactcgtgcatgccttttaggagacagttctggggatgtagggaacgggaaccgcgtatggtatacgtggttcaaagatgaagtgatggataacattccgttgatggattga

SEQ ID NO: 11 - protein, 971 aa, Muscodor strobelii
  misc_feature: SGI Peptide ID NO. 559559
  misc_feature (200)..(300): Pfam Id: PF00069 Pfam Desc: Protein kinase domain
  misc_feature (345)..(418): Pfam Id: PF00069 Pfam Desc: Protein kinase domain
  misc_feature (85)..(947): NCBI GI: 169618894 Blast Desc: SNOG_12639 [Phaeosphaeria nodorum SN15] gi|111058817|gb|EAT79937.1| SNOG_12639 [Phaeosphaeria nodorum SN15]
  misc_feature (739)..(942): NCBI GI: 261355391 Blast Desc: conserved [Verticillium albo-atrum VaMs.102]
  misc_feature (691)..(942): NCBI GI: 171686338 Blast Desc: protein product [Podospora anserina] gi|170943130|emb|CAP68783.1| protein product [Podospora anserina]
  misc_feature (61)..(435): NCBI GI: 256722402 Blast Desc: NECHADRAFT_82208 [Nectria haematococca mpVI 77-13-4]
  misc_feature (697)..(942): NCBI GI: 256729668 Blast Desc: [Nectria haematococca mpVI 77-13-4]
  misc_feature (659)..(947): NCBI GI: 85086807 Blast Desc: NCU10557 [Neurospora crassa OR74A] gi|28918853|gb|EAA28522.1| conserved [Neurospora crassa OR74A]
  misc_feature (697)..(940): NCBI GI: 46122419 Blast Desc: FG05587.1 [Gibberella zeae PH-1]
  misc_feature (737)..(898): NCBI GI: 115402805 Blast Desc: [Aspergillus terreus NIH2624] gi|114189325|gb|EAU31025.1| [Aspergillus terreus NIH2624]
  misc_feature (165)..(441): NCBI GI: 256730245 Blast Desc: NECHADRAFT_82545 [Nectria haematococca mpVI 77-13-4]
  misc_feature (690)..(940): NCBI GI: 256728700 Blast Desc: NECHADRAFT_101905 [Nectria haematococca mpVI 77-13-4]
MERQSISNLYIKLEDLRTLLTTKFGAGNFKIVEREESYEINVPELLTTVGKMDDLRAKIKRIRLDNTNIERRHFIPEASLFEAMSKAAIEASLKSLTVQRHELLDLTDSILAGARKCFAILILISYEEAIPDFFRRDSLQQSWPDDRLPYSSEALQQIFAEDERGLRVADFLEKQWEVAIPIMHKNMIFRKLDTEVILPFLQKHKVGKGSMGTAWEIKLHPQCHRLSLPDHKVVKKQITCGEDDDMNVFEKEVANLALLAHLKHPNIVQLYCSYVYRQEYNLIFAAADGGTLETLLKGKNDIKGPEGSQLLLALADLAFAINVMHNFTSEALDLTLSGCHHDLAPRNILVQGETLLLADFGLSTFHNVEEDSLTTFKEVRGSYIAPECQTLHGNSVRTEKIGRASDIWSFGCILAEILIYMVQGSKGVEQFREERKVEVTPEIEWFRFHQGPNQPNPVVDRWLTQLQDGKELFCSRMVGLIRQMLSMSPDQRPRSSQILAVLRGISIVSIAASVLQDLNSARNTCDSVDWLLGKMRFRGWMFAFIQLLDKIIREGHEVREFDFAATVKALKETQRIVESIGSAANVDAHRQQPLLRYQYERMMEGLPQHYRFVAKEQLKILVLSKNDDEAEGLLAAMGNENEKDIGVLLAVRHLTTLAETGRLTDQSHLVIDHKRITIKTPVDIHSLAALDHTSELVLVEWLRYKEEWADETTRQELLRRLASVAGLFRAESSAQIPGSLQCQGMFHDPSHRAFGFVYGFPSQNTKPKTLHSLLSSRNDRPLLERRFRLAFNICHCICTFHMVGWLHRNLHSKNVLFFVPDGGDDAEWAKEPRILGFAGSRENELASFSNGPDESSQFRNYQHPVYLAHQERYREEFDYYSVGMLLLEIGLWSPLSKITDSDRFRGISDEQYKIEVLDRRVSQLGVAMGTRYMEATRACLLGDSSGDVGNGNRVWYTWFKDEVMDNIPLMD

SEQ ID NO: 12 - DNA, 3673 bp, Muscodor strobelii
  misc_feature: SGI EST ID NO. CUFF.383.0
  misc_feature: Variant of the nucleotide sequence at SEQ ID NO 10
ttttctcttaccatccttgttctgacttgctacccaggtagttgcataatggagcgtcagtctatctcaaacctctatatcaaattggaagaccttcgcacattgctcacgacaaaatttggggcgggaaacttcaaaatagtggaaagggaagaaagctacgagattaacgttccagagctgctaacaacggttggtccccaaaattataatgcataaccggaaaatgtgctcatgaaaatcagaatgaaatcaagtcgattcagtccaaataaataatctatataaatcaattcctattgcggcaagcacctccttggtctattgctcatttgcagtttgcggccgcctagtgcatatattcgcgtatctttatcatgttgtgggttcgcaaataggaaagatggacgacctacgtgcaaagatcaagagaattcgcttagacaacactaatattgagcgtcggcatttcattcccgaggcttccttatttgaggccatgtctaaagcggcaatcgaggcatctctcaaaagcctcaccgtccaacgtcatgaactactagatctaaccgacagcattctagcaggtgctcgaaagtgtttcgctatcttgatcttgatatcgtatgaagaggcaataccagactttttcaggcgtgactcactccaacagtcttggcctgacgatcgtttgccatactcctcggaagccctacagcagatttttgccgaagatgagagaggtctgagagttgcagattttctcgaaaaacaatgggaggttgctattccaatcatgcacaagaacatgattttccgaaaactagacacggaagtgattttgccctttttgcagaagcataaagtcggcaagggttcgatgggcactgcttgggagattaaactacatccgcaatgccatcggctttccttaccggaccacaaggttgtcaaaaaacagatcacatgtggagaggacgacgatatgaatgtttttgaaaaggaggtggcaaatttagccctccttgcgcacttgaagcacccaaacattgttcagttgtattgctcctatgtctatcggcaagaatacaaccttatctttgctgctgccgacggcggcacacttgaaactcttctcaaaggcaagaatgacatcaaggggccagaaggctcacagcttttacttgctctagccgatttggcatttgccatcaatgttatgcacaacttcacctccgaagcccttgatcttaccttgtcgggatgccaccacgaccttgcgccccggaatatcttggttcagggcgaaactctcttgctagctgattttgggctatcaactttccacaacgtggaggaggactccttaaccacattcaaagaagtacgcggctcgtatattgcccccgaatgccagacattacacggaaattctgtaagaacggaaaagattggccgagctagtgacatatggtctttcggttgcattctcgccgaaatattgatatatatggttcagggttcgaagggagtcgaacaatttcgtgaggagagaaaagttgaggttactcctgagattgaatggttccgttttcatcagggacctaatcaaccaaacccagtggtcgatcgttggctaactcagctgcaagacggtaaggagctattctgctcgcgaatggttgggttaattcgacaaatgctgtcaatgagcccagatcaacgccctcgctcgtcacaaattttagccgttcttcgtggtatttctatcgtctctatcgcagcgtctgtccttcaggacttgaacagtgcccgcaacacttgtgatagtgttgattggctactagggaaaatgcgatttcgtggctggatgtttgctttcattcaattgcttgataaaataattcgggaagggcacgaggttcgggaatttgactttgccgcaacagtcaaggccttgaaagaaacacaacgcatcgtggagagtattgggtcagcggcgaacgttgacgcccatcggcaacagccgctattacgctaccaatatgagagaatgatggagggactgccacagcactaccgcttcgtcgccaaagaacaactaaaaattctagtactcagcaaaaacgatgacgaggcagaaggcttattagcagccatgggtaatgaaaatgaaaaagacattggggtcttgctcgccgtgagacatcttaccacccttgctgagactggccgtcttaccgaccagagccatcttgtgattgatcacaagcggatcactataaagacacccgtcgatattcatagcctggcggcgcttgaccatacctcggaacttgtcctagtcgaatggctgagatacaaagaagaatgggctgacgagacgacgaggcaggagctgctccgccggctcgcctctgtagcaggcctattccgcgcagaaagttccgcgcagattccaggcagcttgcaatgccagggcatgttccatgatccgtctcatcgagcttttggcttcgtgtacggctttccatcgcagaacacaaaaccaaaaacactacattctcttctgagctcacgaaatgatcgtcctctgctcgaacgtcgatttcgtctagcattcaatatttgccattgtatttgcacatttcatatggttggatggctgcatcgaaacctccactcgaagaatgttcttttcttcgtaccagacgggggggatgacgccgaatgggccaaggaaccacgcatattgggtttcgcagggagccgtgagaacgagttggcttcctttagtaatggaccagatgaaagcagtcaatttcgaaattaccaacatcctgtataccttgcacatcaggagcgctatcgggaagaatttgattactattcagtcggcatgctcctgttggagatcggactctggagcccattatctaagatcacggattccgacaggtttcgagggatatcggacgaacaatacaagatagaggtcctcgaccgcagggtctcacagctcggtgttgctatgggcacacggtacatggaagctactcgtgcatgccttttaggagacagttctggggatgtagggaacgggaaccgcgtatggtatacgtggttcaaagatgaagtgatggataacattccgttgatggattgaggaacggattctgtgcagcttattctccacctcttccttttttcacgttataagaccttgatttcatttctttttcgtctgttcttgcgaataagatactgatcctcgaatattacataactccctactatatgttagcatttccgttgaggaattagagttaaggtgccggggtgaagtttctggaagaagctgacaatgactatttgccaggatcacaggtaagttaagagcgaaggtaaatcggctgtagcccaggtgggaccagccgctcatcatctggtatatcggtgacaacgctatgtcaactgaatggtagtgcgctcctgctgttctttgccctctaaacttgctagtcaccttgctagtttccttgcggcagtcacctagttagattggctgaacgtgctgttattggggtattatgggttggtgggcggtcgaaggtaacatgactaaaggagacgcggttaccgcaacttgaagtagacaaaaacaagaaaatca

SEQ ID NO: 13 - DNA, 1455 bp, Muscodor strobelii
  misc_feature: SGI cDNA ID NO. 559560
  misc_feature: Encodes the peptide sequence at SEQ ID NO 14
atgcatacttctgtcatcgcgggaacacccacccaagctctgaggtatcctgttgacgtagagtgttatgcaccaatcggagaggaccgccaattatgtcaccaaagactagtggaagagtctttaagtctgttccagattgctggaggaggctcagctatcttgagatcattacgagatagtgattctgtgaaatcgagtgtccggaaaagtttcgtcgcaagcgataagattgaagtgaaaggaatttccgagtatttactagatcagtcctggcatcaattggtattcattgttcaaccagctttttcatggagtcagctcgtcataactgaagctgcatttcaaaggatgctgtctgatgtacgggtattcactcctttcatgcatattgtacatgtctttggggcaagaacaaataataaggagcgagtaaacgatctagtgtaccatcacacggacctatcttctggacatgtagaattatgttacagcatccgctactttgaattgaatgggcggggtcgaggcaatccctggtcgctgagacagactggcgtatatcagagatgccactccacgacgcaatccacatggctcgtgctgaactattcggactacatgaatcagcggatagaagctgcacttgaagaagagaagaactcagctggagagtcttgcaaagcgatgcaactcttacctcatctctttattgtttctgtagcgactagaaactggcgatcgtatatcgagagtctgcgccagaagctttctcgatatgagacgaaagcatattcatcgcgtatcgatgagacgtacttagatgactataaaattatttttgcagatgtacaggaagccacagttctcagcgacaaagtggctgtagcgacagctgttatcatcaagcaaaaagacgtgcttgccaaatgtgccgacttacactccggccttcatggaaaagaatccccaacaagtcaatgcgatattgaaaatacactggcgaaaatcagaacagatctccagcatcattatggagaattggtaacattggcgcgggcaggatcgatgattactcaattgctcaacgatatagtggtcacccgaacaactaacgacctacaggagtctattatgggtatcggcaaggctatcagcgttatacaggtacaatcgaaccgaacggggctcgacacaggtcatttacgacagatagtcaccgggggacaaaaagatgctaaagtagtcaagctactggcgcaaatcgcgacaatgttccttccagcgtctctcacagcttctctttttggctcaacgatattcactgattcaggcagtaacattacatatattggcctatactttgcaattacacttccactcttattaatcatgctcttgcttctcatattgctagagaaggacgcattgagaggcgcctggccctggccttaa

SEQ ID NO: 14 - protein, 484 aa, Muscodor strobelii
  misc_feature: SGI Peptide ID NO. 559560
  misc_feature (104)..(433): NCBI GI: 67904628 Blast Desc: AN9301.2 [Aspergillus nidulans FGSC A4] gi|40747212|gb|EAA66368.1| AN9301.2 [Aspergillus nidulans FGSC A4]
  misc_feature (96)..(468): NCBI GI: 154300068 Blast Desc: BC1G_11223 [Botryotinia fuckeliana B05.10] gi|150856836|gb|EDN32028.1| BC1G_11223 [Botryotinia fuckeliana B05.10]
  misc_feature (100)..(473): NCBI GI: 46126871 Blast Desc: FG07813.1 [Gibberella zeae PH-1]
  misc_feature (108)..(477): NCBI GI: 115397151 Blast Desc: conserved [Aspergillus terreus NIH2624] gi|114192358|gb|EAU34058.1| conserved [Aspergillus terreus NIH2624]
  misc_feature (108)..(472): NCBI GI: 145243186 Blast Desc: An11g01260 [Aspergillus niger] gi|134078804|emb|CAK45863.1| protein product [Aspergillus niger]
  misc_feature (156)..(466): NCBI GI: 169604708 Blast Desc: SNOG_05370 [Phaeosphaeria nodorum SN15] gi|111066641|gb|EAT87761.1| SNOG_05370 [Phaeosphaeria nodorum SN15]
  misc_feature (128)..(472): NCBI GI: 169613667 Blast Desc: SNOG_09966 [Phaeosphaeria nodorum SN15] gi|111061181|gb|EAT82301.1| SNOG_09966 [Phaeosphaeria nodorum SN15]
  misc_feature (94)..(461): NCBI GI: 242799164 Blast Desc: conserved [Talaromyces stipitatus ATCC 10500] gi|218716667|gb|EED16088.1| conserved [Talaromyces stipitatus ATCC 10500]
  misc_feature (96)..(190): NCBI GI: 259480574 Blast Desc: TPA: conserved [Aspergillus nidulans FGSC A4]
  misc_feature (96)..(190): NCBI GI: 67541591 Blast Desc: AN6959.2 [Aspergillus nidulans FGSC A4] gi|40738411|gb|EAA57601.1| AN6959.2 [Aspergillus nidulans FGSC A4]
MHTSVIAGTPTQALRYPVDVECYAPIGEDRQLCHQRLVEESLSLFQIAGGGSAILRSLRDSDSVKSSVRKSFVASDKIEVKGISEYLLDQSWHQLVFIVQPAFSWSQLVITEAAFQRMLSDVRVFTPFMHIVHVFGARTNNKERVNDLVYHHTDLSSGHVELCYSIRYFELNGRGRGNPWSLRQTGVYQRCHSTTQSTWLVLNYSDYMNQRIEAALEEEKNSAGESCKAMQLLPHLFIVSVATRNWRSYIESLRQKLSRYETKAYSSRIDETYLDDYKIIFADVQEATVLSDKVAVATAVIIKQKDVLAKCADLHSGLHGKESPTSQCDIENTLAKIRTDLQHHYGELVTLARAGSMITQLLNDIVVTRTTNDLQESIMGIGKAISVIQVQSNRTGLDTGHLRQIVTGGQKDAKVVKLLAQIATMFLPASLTASLFGSTIFTDSGSNITYIGLYFAITLPLLLIMLLLLILLEKDALRGAWPWP

SEQ ID NO: 15 - DNA, 1806 bp, Muscodor strobelii
  misc_feature: SGI EST ID NO. CUFF.343.2
  misc_feature: Variant of the nucleotide sequence at SEQ ID NO 13
tccgtcctctgtgttttcagcagtcatctaatcttgggcatttctaggttcagtgctactcctggtcgatatttcaagctatgcatacttctgtcatcgcgggaacacccacccaagctctgaggtatcctgttgacgtagagtgttatgcaccaatcggagaggaccgccaattatgtcaccaaagactagtggaagagtctttaagtctgttccagattgctggaggaggctcagctatcttgagatcattacgagatagtggtcagtctttacatcttcaggttatgcccattcttaacataaattctagattctgtgaaatcgagtgtccggaaaagtttcgtcgcaagcgataagattgaagtgaaaggaatttccgagtatttactagatcagtcctggcatcaattggtattcattgttcaaccagctttttcatggagtcagctcgtcataactgaagctgcatttcaaaggatgctgtctgatgtacgggtattcactcctttcatgcatattgtacatgtctttggggcaagaacaaataataaggagcgagtaaacgatctagtgtaccatcacacggacctatcttctggacatgaattatgttacagcatccgctactttgaattgaatgggcggggtcgaggcaatccctggtcgctgagacagactggcgtatatcagagatgccactccacgacgcaatccacatggctcgtgctgaactattcggactacatgaatcagcggatagaagctgcacttgaagaagagaagaactcagctggagagtcttgcaaagcgatgcaactcttacctcatctctttattgtttctgtagcgactagaaactggcgatcgtatatcgagagtctgcgccagaagctttctcgatatgagacgaaagcatattcatcgcgtatcgatgagacgtacttagatgactataaaattatttttgcagatgtacaggaagccacagttctcagcgacaaagtggctgtagcgacagctgttatcatcaagcaaaaagacgtgcttgccaaatgtgccgacttacactccggccttcatggaaaagaatccccaacaagtcaatgcgatattgaaaatacactggcgaaaatcagaacagatctccagcatcattatggagaattggtaacattggcgcgggcaggatcgatgattactcaattgctcaacgatatagtggtcacccgaacaactaacgacctacaggagtctattatgggtatcggcaaggctatcagcgttatacaggtacaatcgaaccgaacggggctcgacacaggtcatttacgacagatagtcaccgggggacaaaaagatgctaaagtagtcaagctactggcgcaaatcgcgacaatgttccttccagcgtctctcacagcttctctttttggctcaacgatattcactgattcaggcagtaacattacatatattggcctatactttgcaattacacttccactcttattaatcatgctcttgcttctcatattgctagagaaggacgcattgagaggcgcctggccctggccttaattgctaaaataaatcgctttggccgaaggggaaaacaacagggctcgagggtggagtcaggtcatcatcgatataagcgagtcaatcaaattatgagactcacctattttggtattgatgtcttgtcagatataagcgaatcaagtaatttgggttgtattgatgattgattgatgtctggtgtatgttgcagtgaccagtattcttgacatgagtttattgtca

SEQ ID NO: 16 - DNA, 2028 bp, Muscodor strobelii
  misc_feature: SGI cDNA ID NO. 559561
  misc_feature: Encodes the peptide sequence at SEQ ID NO 17
atgacgatgtcaatctcagagaggccttcgtactgggaatactggcgatccgcttcgggtgctgaagtacgcacggaaattgtggagcctaacaggttcaatttcttgtccttcctcgccacggctcaggccttagggatagagtttctccacattgcctgggatgccgcacgcggcgtcgtcggcactggcggaacctcgagaattcatcaggctctcctgaatttggacaccagcctcgcattcaaaacgtaccataggcggaaccaggctgatgagcagcaggagttctgcactctcatcaatgagattaccgttttgagccagccatttgtgcgggagcatccaaacatcgctcagcttcagggaatctgctgggatatttctcccgatgacaaaccatggcccgtccttgtctttgagaaatcgcaccttggggatttgcatcactttgcgagacatggagggagagatatgacatttcacgaacggctcaagctttgcgtagacattggaagggctgtagcggacatgcactctaatcagatcgtgcatggggacataaaaccagagaatgtccttgttttcagggaaaagtcgggcacatacagcgcaagggtcacagacttcgggtactctactcgatacctccacgatggcgatcagcttatgctaccaagatcggacccgtggaacgcaccagagaatgatggtcgccggcgtgcatggtcaccctcagatgcactcaaaaccgacctgttttgttttggcatgctagctttttggctgctttttgagccgtccttgtcggaaattatacagctgggccatactcaaaaaacgccaaagattggatctgctggaggagcagaagggattctccgcacgataaaaggcggcctccaatcatatgctcagcagctgctatcgaagacagccttgatagaagacaagaaaatgacactccgaggcttctttgagtccagcttaagtgaagatccggcacagcgggcaacgggttgtctccgggagtttattagattggatccgcaatggtcagatatcaaaacggcagtaccattgcaaaaagaggagaacaagatatgcgacagtgatttcaagcttgaagactcgatctacgagttctatcgcaccgactaccgagtgcggcgctacatctttgaatgtcttctaaagagtttccatcgatcagcatgcatggctacgcagttagctctgtgtttctatcttggcttcggtgtggcacggaacgagaaccaggccgaaaatgtactacgggacagccagacgatcgacactgtccaaaaaataatctcatctcttggctcagaagaaaccagagctcggagatccagggcaatctttctgtccaatataagcaatttgggcatagttcgctggtcagactttacagatctctatctcgagaataaaagattagaggaagcagagacgcaacttacacaagagaaaaacgacgtatcggttgttttaagcccgagtcatgctttgatacgtataataaagcaaagtctctcagccatctatactgttagaggtcaatggaataaggcagagacgctggatatagaagtgatggagacaagcaagcagaaacttggagccgatcacccttctacgctgacttccatggctaacctggcatcgacatacaggaaccaggggcggtgggacgaggcagaagctggaagaaatatgggaaaggttgtcatctacttccaagcacatcggcatgcccacaaggtcccaactctgaatgtccctcgggaacagttcctcccaagaggtcctgccgtaatcctcgtaccatctgggctccgcgagcagtggtaccagcagctatgcaggtacatctctcccatgtcactgcttgagggcgatcagaagccagagatctggtccgatcatatagcagccgataagattacgagcgcaatgcgaagcacttatcctaggatcaagtttctgcctgcttctaaactttaa

SEQ ID NO: 17 - protein, 675 aa, Muscodor strobelii
  misc_feature: SGI Peptide ID NO. 559561
  misc_feature (115)..(195): Pfam Id: PF00069 Pfam Desc: Protein kinase domain
  misc_feature (115)..(211): Pfam Id: PF07714 Pfam Desc: Protein tyrosine kinase
  misc_feature (17)..(575): NCBI GI: 169618896 Blast Desc: SNOG_12640 [Phaeosphaeria nodorum SN15] gi|111058818|gb|EAT79938.1| SNOG_12640 [Phaeosphaeria nodorum SN15]
  misc_feature (30)..(446): NCBI GI: 258569847 Blast Desc: [Uncinocarpus reesii 1704] gi|237903997|gb|EEP78398.1| [Uncinocarpus reesii 1704]
  misc_feature (452)..(575): NCBI GI: 116204683 Blast Desc: CHGG_10225 [Chaetomium globosum CBS 148.51] gi|88176353|gb|EAQ83821.1| CHGG_10225 [Chaetomium globosum CBS 148.51]
  misc_feature (457)..(575): NCBI GI: 171685440 Blast Desc: protein product [Podospora anserina] gi|170942681|emb|CAP68334.1| protein product [Podospora anserina]
  misc_feature (452)..(575): NCBI GI: 116182196 Blast Desc: CHGG_01726 [Chaetomium globosum CBS 148.51] gi|88186023|gb|EAQ93491.1| CHGG_01726 [Chaetomium globosum CBS 148.51]
  misc_feature (446)..(575): NCBI GI: 189206514 Blast Desc: kinesin light chain 1 [Pyrenophora tritici-repentis Pt-1C-BFP] gi|187975684|gb|EDU42310.1| kinesin light chain 1 [Pyrenophora tritici-repentis Pt-1C-BFP]
  misc_feature (463)..(575): NCBI GI: 171685440 Blast Desc: protein product [Podospora anserina] gi|170942681|emb|CAP68334.1| protein product [Podospora anserina]
  misc_feature (471)..(575): NCBI GI: 116207884 Blast Desc: CHGG_03235 [Chaetomium globosum CBS 148.51] gi|88183832|gb|EAQ91300.1| CHGG_03235 [Chaetomium globosum CBS 148.51]
  misc_feature (474)..(575): NCBI GI: 189206514 Blast Desc: kinesin light chain 1 [Pyrenophora tritici-repentis Pt-1C-BFP] gi|187975684|gb|EDU42310.1| kinesin light chain 1 [Pyrenophora tritici-repentis Pt-1C-BFP]
  misc_feature (438)..(575): NCBI GI: 189211808 Blast Desc: kinesin light chain 3 [Pyrenophora tritici-repentis Pt-1C-BFP] gi|187979431|gb|EDU46057.1| kinesin light chain 3 [Pyrenophora tritici-repentis Pt-1C-BFP]
MTMSISERPSYWEYWRSASGAEVRTEIVEPNRFNFLSFLATAQALGIEFLHIAWDAARGVVGTGGTSRIHQALLNLDTSLAFKTYHRRNQADEQQEFCTLINEITVLSQPFVREHPNIAQLQGICWDISPDDKPWPVLVFEKSHLGDLHHFARHGGRDMTFHERLKLCVDIGRAVADMHSNQIVHGDIKPENVLVFREKSGTYSARVTDFGYSTRYLHDGDQLMLPRSDPWNAPENDGRRRAWSPSDALKTDLFCFGMLAFWLLFEPSLSEIIQLGHTQKTPKIGSAGGAEGILRTIKGGLQSYAQQLLSKTALIEDKKMTLRGFFESSLSEDPAQRATGCLREFIRLDPQWSDIKTAVPLQKEENKICDSDFKLEDSIYEFYRTDYRVRRYIFECLLKSFHRSACMATQLALCFYLGFGVARNENQAENVLRDSQTIDTVQKIISSLGSEETRARRSRAIFLSNISNLGIVRWSDFTDLYLENKRLEEAETQLTQEKNDVSVVLSPSHALIRIIKQSLSAIYTVRGQWNKAETLDIEVMETSKQKLGADHPSTLTSMANLASTYRNQGRWDEAEAGRNMGKVVIYFQAHRHAHKVPTLNVPREQFLPRGPAVILVPSGLREQWYQQLCRYISPMSLLEGDQKPEIWSDHIAADKITSAMRSTYPRIKFLPASKL

SEQ ID NO: 18 - DNA, 2860 bp, Muscodor strobelii
  misc_feature: SGI EST ID NO. CUFF.89.0
  misc_feature: Variant of the nucleotide sequence at SEQ ID NO 16
tagctacaggtatacagtctctcacagtggtccttggcagacccagagacttcacttctacaacttcaatccaatacaatccagtcagccagtccatcacacactcggtgtgccttgttggcgcgtttcggccttatcatgtactgtactccgtattcggcttgactatcaggtttgtgcgaacgttaggccttagattcgatagtccatgggttgatttattaagatgacacgggtgcgacgcgatggtaccccgtcatcatgcgcgcgctgttgactgaatagtagtgtacatgcgcgtgagcttcacagcgtgcacacgttatgcaacctatccttgctagtttccgtggtgggggcagaatgtgagggtatcttagattgtttgagacaagcgctgcgagcactgccgggcttgcaacattagacactgccgtcacaccggtttcagctatacatatttaaatagctgagatgtaatccagctggccttgagctttaacatctcctatgctcttaaattcaagcaaccgggaaaattatagaaaccaactagatcatcagctcactattcgaatatgacgatgtcaatctcagagaggccttcgtactgggaatactggcgatccgcttcgggtgctgaagtacgcacggaaattgtggagcctaacaggttcaatttcttgtccttcctcgccacggctcaggccttagggatagagtttctccacattgcctgggatgccgcacgcggcgtcgtcggcactggcggaacctcgagaattcatcaggctctcctgaatttggacaccagcctcgcattcaaaacgtaccataggcggaaccaggctgatgagcagcaggagttctgcactctcatcaatgagattaccgttttgagccagccatttgtgcgggagcatccaaacatcgctcagcttcagggaatctgctgggatatttctcccgatgacaaaccatggcccgtccttgtctttgagaaatcgcaccttggggatttgcatcactttgcgagacatggagggagagatatgacatttcacgaacggctcaagctttgcgtagacattggaagggctgtagcggacatgcactctaatcagatcgtgcatggggacataaaaccagagaatgtccttgttttcagggaaaagtcgggcacatacagcgcaagggtcacagacttcgggtactctactcgatacctccacgatggcgatcagcttatgctaccaagatcggacccgtggaacgcaccagagaatgatggtcgccggcgtgcatggtcaccctcagatgcactcaaaaccgacctgttttgttttggcatgctagctttttggctgctttttgagccgtccttgtcggaaattatacagctgggccatactcaaaaaacgccaaagattggatctgctggaggagcagaagggattctccgcacgataaaaggcggcctccaatcatatgctcagcagctgctatcgaagacagccttgatagaagacaagaaaatgacactccgaggcttctttgagtccagcttaagtgaagatccggcacagcgggcaacgggttgtctccgggagtttattagattggatccgcaatgatatcaaaacggcagtaccattgcaaaaagaggagaacaagatatgcgacagtgatttcaagcttgaagactcgatctacgagttctatcgcaccgactaccgagtgcggcgctacatctttgaatgtcttctaaagagtttccatcgatcagcatgcatggctacgcagttagctctgtgtttctatcttggcttcggtgtggcacggaacgagaaccaggccgaaaatgtactacgggacagccagacgatcgacactgtccaaaaaataatctcatctcttggctcagaagaaaccagagctcggagatccagggcaatctttctgtccaatataagcaatttgggcatagttcgctggtcagactttacagatctctatctcgagaataaaagattagaggaagcagagacgcaacttacacaagagaaaaacgacgtatcggttgttttaagcccgagtcatgctttgatacgtataataaagcaaagtctctcagccatctatactgttagaggtcaatggaataaggcagagacgctggatatagaagtgatggagacaagcaagcagaaacttggagccgatcacccttctacgctgacttccatggctaacctggcatcgacatacaggaaccaggggcggtgggacgaggcagaagctggaagtggaagtgatggagataagcaagcagaaacttggagctgatctttaatattagacaggaaatatgggaaaggttgtcatctacttccaagcacatcggcatgcccacaaggtcccaactctgaatgtccctcgggaacgtacgtcagaggcttcgcctgtccctgcgttgagcgactcccgacagcccaacttctagagttcctcccaagaggtcctgccgtaatcctcgtaccatctgggctccgcgagcagtggtaccagcagctatgcaggtacatctctcccatgtcactgcttgagggcgatcagaagccagagatctggtccgatcatatagcagccgataagattacgagcgcaatgcgaagcacttatcctaggatcaagtttctgcctgcttctaaactttaacaagacgagattactaataaccaaaagcattaggaacaagataccgttaatttagagaaaatgctcctaagattgcatgggaagaaaaagggggggaatagccacattattataattatgccggctttctctgcaggattgg

SEQ ID NO: 19 - DNA, 404 bp, Muscodor strobelii
  misc_feature: SGI cDNA ID NO. 559562
  misc_feature: Elevated expression when VOC is produced
  misc_feature: Encodes the peptide sequence at SEQ ID NO 20
atgaccgagccaaagagcttcaaggtgatcattgccggtggcggcgtcattggcctgacattggctaacgccttggagcgtgctgggatcgactttatcctgctcgagaagaggcagatcgcgcccgacctcggcgcatccacctccctgctctgccacaatgcaaaggtgtacgagcagctcgggatagtcgacctcttcaacgcggcgaccgtaccactacttgatagacatcatttcgatcgggacggtcacctgttcgaagacggcggggtgctgaagggcataagtgtcaagacgcaacggccttttcggttcatggagaggcgcttccaccttcagatcctgtttgacaacctgcgcaataagtccaagatccgcactcaagcttgtgtgcaatcatt

SEQ ID NO: 20 - protein, 134 aa, Muscodor strobelii
  misc_feature: SGI Peptide ID NO. 559562
  misc_feature (8)..(41): Pfam Id: PF01266 Pfam Desc: FAD dependent oxidoreductase
  misc_feature (6)..(38): Pfam Id: PF01494 Pfam Desc: FAD binding domain
  misc_feature (1)..(127): NCBI GI: 154324026 Blast Desc: BC1G_00412 [Botryotinia fuckeliana B05.10] gi|150842641|gb|EDN17834.1| BC1G_00412 [Botryotinia fuckeliana B05.10]
  misc_feature (1)..(134): NCBI GI: 146324709 Blast Desc: FAD-dependent monooxygenase [Aspergillus fumigatus Af293] gi|129555457|gb|EBA27209.1| FAD-dependent monooxygenase, [Aspergillus fumigatus Af293] gi|159123852|gb|EDP48971.1| A1163]
  misc_feature (1)..(134): NCBI GI: 119483958 Blast Desc: FAD binding domain protein [Neosartorya fischeri NRRL 181] gi|119410038|gb|EAW19985.1| FAD binding domain protein [Neosartorya fischeri NRRL 181]
  misc_feature (4)..(128): NCBI GI: 238500203 Blast Desc: monoxygenase, [Aspergillus flavus NRRL3357] gi|220693089|gb|EED49435.1| monoxygenase, [Aspergillus flavus NRRL3357]
  misc_feature (4)..(128): NCBI GI: 169779541 Blast Desc: [Aspergillus oryzae RIB40] gi|83772974|dbj|BAE63102.1| protein product [Aspergillus oryzae]
  misc_feature (3)..(134): NCBI GI: 255952903 Blast Desc: Pc21g01340 [Penicillium chrysogenum Wisconsin 54-1255] gi|211588915|emb|CAP95031.1| Pc21g01340 [Penicillium chrysogenum Wisconsin 54-1255]
  misc_feature (5)..(126): NCBI GI: 121710708 Blast Desc: FAD binding domain protein [Aspergillus clavatus NRRL 1] gi|119401120|gb|EAW11544.1| FAD binding domain protein [Aspergillus clavatus NRRL 1]
  misc_feature (6)..(127): NCBI GI: 119483518 Blast Desc: FAD binding domain protein [Neosartorya fischeri NRRL 181] gi|119409818|gb|EAW19765.1| FAD binding domain protein [Neosartorya fischeri NRRL 181]
  misc_feature (5)..(134): NCBI GI: 169780646 Blast Desc: [Aspergillus oryzae RIB40] gi|83773527|dbj|BAE63654.1| protein product [Aspergillus oryzae]
  misc_feature (5)..(132): NCBI GI: 46117506 Blast Desc: FG04595.1 [Gibberella zeae PH-1]
  misc_feature: Useful for introducing or modulating the production of volatile compounds
MTEPKSFKVIIAGGGVIGLTLANALERAGIDFILLEKRQIAPDLGASTSLLCHNAKVYEQLGIVDLFNAATVPLLDRHHFDRDGHLFEDGGVLKGISVKTQRPFRFMERRFHLQILFDNLRNKSKIRTQACVQS

SEQ ID NO: 21 - DNA, 582 bp, Muscodor strobelii
  misc_feature: SGI EST ID NO. CUFF.31.0
  misc_feature: Variant of the nucleotide sequence at SEQ ID NO 19
tgggcatcaacccttgtagagagaagcaagggggaggctggcccatgttgcaagaccatgaacgctggtcaccatgcctagagaacagtttgaagtaatggtatataaaaccgtgcccttccgcaaaagatgatcgagtcgtgcctagaaatcttcacccctagcactggtcccagccatgaccgagccaaagagcttcaaggtgatcattgccggtggcggcgtcattggcctgacattggctaacgccttggagcgtgctgggatcgactttatcctgctcgagaagaggcagatcgcgcccgacctcggcgcatccacctccctgctctgccacaatgcaaaggtgtacgagcagctcgggatagtcgacctcttcaacgcggcgaccgtaccactacttgatagacatcatttcgatcgggacggtcacctgttcgaagacggcggggtgctgaagggcataagtgtcaagacgcaacggccttttcggttcatggagaggcgcttccaccttcagatcctgtttgacaacctgcgcaataagtccaagatccgcactcaagcttgtgtgcaatcatt

SEQ ID NO: 22 - DNA, 795 bp, Muscodor strobelii
  misc_feature: SGI cDNA ID NO. 559563
  misc_feature: Elevated expression when VOC is produced
  misc_feature: Encodes the peptide sequence at SEQ ID NO 23
atgaagtctgctatcgtcgccggcgctctattcgccaccagtgctcttgctgcacccggtactgcctctcgttgggctaaccatgctaagcgtgcagatgctcgcaagggaaaccttcggcaagccgctgagcatcccgatatcgaggtgtacaacaaggacggcagcatccgacatgtcgagtactcgagcaactgggctggtgctgttctgactagcactgggtggacctctgtcctcggcacgatcaccgtccccacccccgtaaataccggcaagtctggtgcaggttctgcgtgggtcggtatcgatggtgacacttgcggtactgccatcctgcagaccggtatcgactggtacatcacatccagtggcagtgtcagttacgatgcttggtatgagtggtatcccgactatgcctacgactttacaggcatcaccatcagcaagggcgactctgtcaagttcacagtcaaagccaactccaaaagctccggcactgccaccatcaacaacttgaccaccggcaagtccgtgtcgcacaccttcaccggcgagactagcgcccagctatgcgagtacgacgccgagtggatcgtcgaggactttgagagtggtggatcgcaagtccagttcgccaactttggcaccgttaccttcacctcccctcaagcactgaagggcagcaccgtctacactccctctggcgccaccattatcgatatcgagcagagcaactcggtcttgacctcttgttcgtcttctagtagccaagtcacctgcacctacacctaa

SEQ ID NO: 23 - protein, 264 aa, Muscodor strobelii
  misc_feature: SGI Peptide ID NO. 559563
  misc_feature (63)..(264): Pfam Id: PF01828 Pfam Desc: Peptidase A4 family
  misc_feature (1)..(263): NCBI GI: 73543258 Blast Desc: acidic protease 1 [Botryotinia fuckeliana]
  misc_feature (1)..(263): NCBI GI: 154293948 Blast Desc: BC1G_14153 [Botryotinia fuckeliana B05.10] gi|150845125|gb|EDN20318.1| BC1G_14153 [Botryotinia fuckeliana B05.10]
  misc_feature (1)..(245): NCBI GI: 156050497 Blast Desc: SS1G_07836 [Sclerotinia sclerotiorum 1980] gi|154692236|gb|EDN91974.1| SS1G_07836 [Sclerotinia sclerotiorum 1980]
  misc_feature (1)..(245): NCBI GI: 6984107 Blast Desc: AF221843_1 acid protease [Sclerotinia sclerotiorum]
  misc_feature (1)..(249): NCBI GI: 70986250 Blast Desc: aspergillopepsin [Aspergillus fumigatus Af293] gi|66846248|gb|EAL86581.1| aspergillopepsin, [Aspergillus fumigatus Af293] gi|159128238|gb|EDP53353.1| aspergillopepsin,
  misc_feature (1)..(249): NCBI GI: 119474281 Blast Desc: aspergillopepsin, [Neosartorya fischeri NRRL 181] gi|119407169|gb|EAW17119.1| aspergillopepsin, [Neosartorya fischeri NRRL 181]
  misc_feature (4)..(263): NCBI GI: 238499183 Blast Desc: aspergillopepsin, [Aspergillus flavus NRRL3357] gi|220692579|gb|EED48925.1| aspergillopepsin, [Aspergillus flavus NRRL3357]
  misc_feature (5)..(263): NCBI GI: 255940586 Blast Desc: Pc16g07360 [Penicillium chrysogenum Wisconsin 54-1255] gi|211585685|emb|CAP93406.1| Pc16g07360 [Penicillium chrysogenum Wisconsin 54-1255]
  misc_feature (1)..(263): NCBI GI: 67901056 Blast Desc: AN7515.2 [Aspergillus nidulans FGSC A4] gi|40742905|gb|EAA62095.1| AN7515.2 [Aspergillus nidulans FGSC A4] gi|259483831|tpe|CBF79544.1| TPA: aspergillopepsin, nidulans
  misc_feature (1)..(246): NCBI GI: 115491521 Blast Desc: ATEG_00302 [Aspergillus terreus NIH2624] gi|114197248|gb|EAU38948.1| ATEG_00302 [Aspergillus terreus NIH2624]
  misc_feature (47)..(243): SWISSPROT Homolog: EC 3.4.23.19 Aspergillopepsin II
  misc_feature: Useful for introducing or modulating the production of volatile compounds
MKSAIVAGALFATSALAAPGTASRWANHAKRADARKGNLRQAAEHPDIEVYNKDGSIRHVEYSSNWAGAVLTSTGWTSVLGTITVPTPVNTGKSGAGSAWVGIDGDTCGTAILQTGIDWYITSSGSVSYDAWYEWYPDYAYDFTGITISKGDSVKFTVKANSKSSGTATINNLTTGKSVSHTFTGETSAQLCEYDAEWIVEDFESGGSQVQFANFGTVTFTSPQALKGSTVYTPSGATIIDIEQSNSVLTSCSSSSSQVTCTYT

SEQ ID NO: 24 - DNA, 2827 bp, Muscodor strobelii
  misc_feature: SGI EST ID NO. CUFF.38.0
  misc_feature: Variant of the nucleotide sequence at SEQ ID NO 22
tttccaacatcgcgcatctggccccgccttgctcgcctccgacccctaagatgttcttcggccccctgtcatgcagtcgagtggggttcttcggcagacgtgagcttggcgagttaagtggtggaatatccagacttgacgcgtacatccttccttaatctgtcatcttgccattgtttccctgcattccaatcacgctgtcgcatcgcgtgcgattccatgcaagagatcgccactttgtgctcctttttcagtctttaacaagtaaagtagcttcatgtttggcaattggacgataagaagaggctcaagatcaagacatcatgtctgctagcacatgcctcaccacgtaagccacctgaggttccaacgttgcagttgtagtgaatgtggctctttgtgctatctaaatgtatccaacagtttgacaggtcgcgctactgtgggctcgcataaatgtgtctgtaaataacgcagcaaacgccacatactcgtcgcgtacctagggtagaagacatcacgctatcatttcaactgtttttcgtgtaccgagacaacttacattagtacatccacgtggttcaaaagcttattcaacccactcccatgatgacagtgctgctaagccttttgaaagcgacactatcgcctgtcaaaatctcttggtgttcttggttttcttgggtgtgcttggccgcagcattccccggacgcctcattgccatacagtatcgccctgtcgcctgtactccaattcttggcaaggtgcgatacctgtaatactgccttggctgaccaccaataccttgccatcctacttaaattgtgctgggctcgagcatgcacgactcttttgtgctgtcacggcgccaaggaaccccccctcgggagccaagattcattccacccctgccgctcatccttgttgtaaagtcccggcgagtagatatatgccgataaggcacttttcatatatatgtcttctgcgtccgatcttgagcatgtaaccttccccatctgctgacatcgccgacggtccttgactggcctcgaatgcattgatgcttgcgttcagtgatatctcattcgatagtgtggcttttggcgcgggagaacggggttctgtcgacattggaggcatcaaagagtgtccaggatcaaacaggtactcactcgcatttgttagtcgaacctatcgtgtagccggctctcgtagacatgaccgatagtcagtgcccatctagtgcccgtccagttccccatcgaatccttgtttgtccttggttcctcgcatctgatcacgacagtctttgttttcggaaggtgatcatcggtcttgaatgctagccttgttctcgcctcgacccatctcctgcatcgagaccattatcgtcaacacgatcatgggttggggatgctatcagaagcattccggcgaaaacaattcgtggatggccatgtttgttgtcacatttcgttctcttggcatatgcaggttggatgtcgtcgtctcgtgagaactttcctggacctatctcctcgtttgccgtcgagcctgtcgtctgctccttgtgcataaagtcggcgcgatcccgtcgaagccatctatcgaccatgtcctctcaccacgctcctacagtcaagtccatctactgtcactacttgatactccttcgtcgtatcactagccactcaatatgaagtctgctatcgtcgccggcgctctattcgccaccagtgctcttgctgcacccggtactgcctctcgttgggctaaccatgctaagcgtgcagatgctcgcaagggaaaccttcggcaagccgctgagcatcccgatatcgaggtgtacaacaaggacggcagcatccgacatgtcgagtactcgagcaactgggctggtgctgttctgactagcactgggtggacctctgtcctcggcacgatcaccgtccccacccccgtaaataccggcaagtctggtgcaggttctgcgtgggtcggtatcgatggtgacacttgcggtactgccatcctgcagaccggtatcgactggtacatcacatccagtggcagtgtcagttacgatgcttggtatgagtggtatcccgactatgcctacgactttacaggcatcaccatcagcaagggcgactctgtcaagttcacagtcaaagccaactccaaaagctccggcactgccaccatcaacaacttgaccaccggcaagtccgtgtcgcacaccttcaccggcgagactagcgcccagctatgcgagtacgacgccgagtggatcgtcgaggactttgagagtggtggatcgcaagtccagttcgccaactttggcaccgttaccttcacctcccctcaagcactgaagggcagcaccgtctacactccctctggcgccaccattatcgatatcgagcagagcaactcggtcttgacctcttgttcgtcttctagtagccaagtcacctgcacctacacctaaattaggccatacgacgttttgaagtcctttgagctgtcgatgacgccgtgttggacatgccgtgtgtctggaattgttggcgtgggaggtttgagtggcacatgactgtatatagcaataatcattgatcagttgtcctctagacattattcaatcaaattcaatgagtaacagccacatgactagcgccatcgttgtgataatgcatcatcagtaactcgtaatggactttgctagtgtgcgttgacgccgctgaacctatcgtcgaagagggatggaatggccggtaaataaggagtccggcctcgcaaaaaatcatcatagaccgaggttga

SEQ ID NO: 25 - DNA, 1245 bp, Muscodor strobelii
  misc_feature: SGI cDNA ID NO. 559564
  misc_feature: Encodes the peptide sequence at SEQ ID NO 26
atggcttcagtcatcattccagcagccctggcggcgcttcctcttgcaaatgcgggtctcccatctatcccacaactgttcaaacgcgccgatagctgtcccagtactgccgtacagagctgttcttcagaggccaactcgactgcaacctgctgtgttgttagacccggtggtcagctactaatgacacaattctgggatactgacccggttactggaccatcgaattcctggactatccacgggttgtggcccgacaattgcgacggcacctttgaacagagctgcgactcttctcgtgaatataccgacatcacttcgctgttgaacaatgcgggcgagacagatctcgttagcttcatgcaagattactggcagagtaacgacgggacacccgaatcgttctgggaacacgaatggggaaaacacggtacctgtgtcagcactctcgaccccgattgctacaccgattatactgagggtgatgaggcggttgatttcttcaagacggccgtggccttgttcaagactctcgacacttacactgctctgagcgacgcgggcatcactccctcttcttctcaaacatacacctcatctgaaatcattgctgctttgaaggggttgacaggatttgagccgatcctacaatgtgacagcaacgagatctaccaggtcgaatacggcttctttgccaatggacctcttcaaaatggtgactttgagggttccaccattatcggagcggactctagctgtcccgacagcggcatcaagtacttgcccaaggacggggatggtacgtcatcgcccacgtccacatctgcgactgcgaccgcgacatcaaccaaaacaacatcaaccggcccaacaagcactcctaccagcactggtgcatttagtggatctggttatttgacagcggtctacgatgggcaagaggatggatgcttgatcggcgctggaacatggtatacctcaggaacatgcgcgacctacaaagcgacagcatccgactctgggtttactctaaagagctcaaaaggcacctgtggtatttcagacgacgcattcacttgcgggtctggtgtcagcgccacagtcttcacggcatctggtggcaatttagcttacaacggagccacgaccttctacgtggactctgtgccctctggttcaacgcaggcaactgtatacacctcatcacagtctgtgtccgtatcattcaagtggacatctatatag

SEQ ID NO: 26 - protein, 414 aa, Muscodor strobelii
  misc_feature: SGI Peptide ID NO. 559564
  misc_feature (48)..(243): Pfam Id: PF00445 Pfam Desc: Ribonuclease T2 family
  misc_feature (56)..(226): Pfam Id: PF00445 Pfam Desc: Ribonuclease T2 family
  misc_feature (67)..(414): NCBI GI: 154298902 Blast Desc: BC1G_11698 [Botryotinia fuckeliana B05.10] gi|150857603|gb|EDN32795.1| BC1G_11698 [Botryotinia fuckeliana B05.10]
  misc_feature (1)..(414): NCBI GI: 238839723 Blast Desc: ribonuclease T2-like protein [Microsporum canis CBS 113480]
  misc_feature (35)..(414): NCBI GI: 119189867 Blast Desc: CIMG_04981 [Coccidioides immitis RS]
  misc_feature (1)..(414): NCBI GI: 240111069 Blast Desc: Ribonuclease Trv , [Coccidioides posadasii C735 delta SOWgp]
  misc_feature (13)..(414): NCBI GI: 258565717 Blast Desc: ribonuclease Trv [Uncinocarpus reesii 1704] gi|237907304|gb|EEP81705.1| ribonuclease Trv [Uncinocarpus reesii 1704]
  misc_feature (32)..(413): NCBI GI: 189200809 Blast Desc: ribonuclease M [Pyrenophora tritici-repentis Pt-1C-BFP] gi|187983840|gb|EDU49328.1| ribonuclease M [Pyrenophora tritici-repentis Pt-1C-BFP]
  misc_feature (40)..(414): NCBI GI: 169617858 Blast Desc: SNOG_12109 [Phaeosphaeria nodorum SN15] gi|160703501|gb|EAT80521.2| SNOG_12109 [Phaeosphaeria nodorum SN15]
  misc_feature (13)..(411): NCBI GI: 242784311 Blast Desc: ribonuclease T2 family, [Talaromyces stipitatus ATCC 10500] gi|218720509|gb|EED19928.1| ribonuclease T2 family, [Talaromyces stipitatus ATCC 10500]
  misc_feature (1)..(413): NCBI GI: 156064073 Blast Desc: SS1G_00044 [Sclerotinia sclerotiorum 1980] gi|154690906|gb|EDN90644.1| SS1G_00044 [Sclerotinia sclerotiorum 1980]
  misc_feature (2)..(411): NCBI GI: 67537408 Blast Desc: AN4874.2 [Aspergillus nidulans FGSC A4] gi|74595574|sp|Q5B3K6.1|RNY1_EMENI RecName: Full=Ribonuclease T2-like; Short=RNase T2-like; Flags: Precursor AN4874.2 nidulans
  misc_feature (40)..(392): SWISSPROT Homolog: EC 3.1.27.1 Ribonuclease T(2)
MASVIIPAALAALPLANAGLPSIPQLFKRADSCPSTAVQSCSSEANSTATCCVVRPGGQLLMTQFWDTDPVTGPSNSWTIHGLWPDNCDGTFEQSCDSSREYTDITSLLNNAGETDLVSFMQDYWQSNDGTPESFWEHEWGKHGTCVSTLDPDCYTDYTEGDEAVDFFKTAVALFKTLDTYTALSDAGITPSSSQTYTSSEIIAALKGLTGFEPILQCDSNEIYQVEYGFFANGPLQNGDFEGSTIIGADSSCPDSGIKYLPKDGDGTSSPTSTSATATATSTKTTSTGPTSTPTSTGAFSGSGYLTAVYDGQEDGCLIGAGTWYTSGTCATYKATASDSGFTLKSSKGTCGISDDAFTCGSGVSATVFTASGGNLAYNGATTFYVDSVPSGSTQATVYTSSQSVSVSFKWTSI

SEQ ID NO: 27 - DNA, 2504 bp, Muscodor strobelii
  misc_feature: SGI EST ID NO. CUFF.50.0
  misc_feature: Variant of the nucleotide sequence at SEQ ID NO 25
ccactactgtatgtccaagacacgacgagggcatgttggttccacgttacacaatgacgaacgtatttagtcttgctcttccgtcctcggacgacttgtttggggaatctttcgtttcacatcgttgatcgatacctatccttcagacattacatacaggctcccaatagggtctaaattgtcgtcatcatggcttcagtcatcattccagcagccctggcggcgcttcctcttgcaaatgcgggtctcccatctatcccacaactgttcaaacgcgccgatagctgtcccagtactgccgtacagagctgttcttcagaggccaactcgactgcaacctgctgtgttgttagacccggtggtcagctactaatgacacaattctgggatactgacccggttactggaccatcgaattcctggactatccacgggttgtggcccgacaattgcgacggcacctttgaacagagctgcgactcttctcgtgaatataccgacatcacttcgctgttgaacaatgcgggcgagacagatctcgttagcttcatgcaagattactggcagagtaacgacgggacacccgaatcgttctgggaacacgaatggggaaaacacggtacctgtgtcagcactctcgaccccgattgctacaccgattatactgagggtgatgaggcggttgatttcttcaagacggccgtggccttgttcaagactctcgacacttacactgctctgagcgacgcgggcatcactccctcttcttctcaaacatacacctcatctgaaatcattgctgctttgaaggggttgacaggatttgagccgatcctacaatgtgacagcaacgagatctaccaggtcgaatacggcttctttgccaatggacctcttcaaaatggtgactttgagggttccaccattatcggagcggactctagctgtcccgacagcggcatcaagtacttgcccaaggacggggatggtacgtcatcgcccacgtccacatctgcgactgcgaccgcgacatcaaccaaaacaacatcaaccggcccaacaagcactcctaccagcactggtgcatttagtggatctggttatttgacagcggtctacgatgggcaagaggatggatgcttgatcggcgctggaacatggtatacctcaggaacatgcgcgacctacaaagcgacagcatccgactctgggtttactctaaagagctcaaaaggcacctgtggtatttcagacgacgcattcacttgcgggtctggtgtcagcgccacagtcttcacggcatctggtggcaatttagcttacaacggagccacgaccttctacgtggactctgtgccctctggttcaacgcaggcaactgtatacacctcatcacagtctgtgtccgtatcattcaagtggacatctatatagtgttggatacagagaaagagaccaaacaaatcatcgaacaagccaaacctcttcaatctgatgcccatacgtgactcgtttcaattgtttaaaggtatactgtttcaatgatagacacaatgttgcttgaatcatgcatgtgtacagctgtttattcgatatgtaataatgtggtctaatcgattgcttatcccatgcagtggcaggtcttgcggcatgaaaagtgtggactatctagttcgaccccaaatcccataacctcttgaattcactgtctcgagacaatagttctttcggactaccccactccaggacatgcccacctcccatgacggcaatacggtcaaagtctgcaatagcgccgagcctgtgaaccacggcaataacagtgcaggccgtgaatctttcgcggatcacgtcgcggatgagctgctccgacctctcgtcgacattactgctcgcctcgtcaagcagaacaatcttcttgcctgcgagtatagctctagcaagtgacagtagctgacgttggcccaatgacaagagctccgcgtcgagcagagtatcgagacctcccagtcgctccaccacatcgtctaccttgagagactgtagaacccctagaatgtcctcatctctacgttcactgtgaggtgtcaagttctcacgaatgctcttagtttttaagaagaatggctgctgaggtacgactaccacggcggatcggacgtcctggcggcgcatggtggtgatatcgatgccatcaatcataatgcgcgactctgaactgacctcaagcatgcgaaggagacatgcgactaacgaactcttgccgcttccactccgaccacatataccgaccttgtagccgggtgcgatatcgagattcacgtcgcgcagtacggggtcgccctctggtgtataggaagctgttagattctgtatggtgatgcgaccttgagacggccacgcttcaggaactaactcggtctcagtcggcaggttctctgtcgcagtctcttgacaaaatgccttgacgcgtgcaattgcaccaaatgacgtctccaataaag

SEQ ID NO: 28 - DNA, 4329 bp, Muscodor strobelii
  misc_feature: SGI cDNA ID NO. 559565
  misc_feature: Encodes the peptide sequence at SEQ ID NO 29
atggctctcgacgggaaggccaactttggtcccgcagcaggtgaacgcttcgattttacacttgcctttgagagctcaatattgtcaattcttccgacatcactcttcctactgctatcctttcctaggctgttccttttgacgagacggtcacgcaagacgagcaaacatctgctggctgtggcgaaaccagtcttaatcaccatatacgcagccttgcagcttgcagtcctcttatcttgggttctcgggcatgggtcccttgagatacagactgctgctgctgcactttcattcgttgctggactcgtgttgatctatctatcgcatgtcgagcatagacgatctatcaaaccctcgagcctgatcacagtctacttatttcttactctattattcgatattgccattacgaggacactatggcttatcggagagccatctcccgtcgccgagctgtttgcaatggctactatcgtgaagctgcttgttttggctattgaaattcaagagaagaggttcatcctattatcacagtacaagagcatctctccggagtctaccagcagccttgtcagtcgaggggtgttttggtggctgaattcgttgatgagaactggctacagacgctatctcaacgatgatgacctgtttcctattcacggtacaatgagtgcaaaaaggttaatgaatcaagcaacgaaagcttggaaatcagcgacccaagcaagaccaaacgctctcgcgatagcaattgtttggtgtaacaagatgacttttctgtctggcgttctacctcgcttgttcctcgtaggattcaaatatactttaccgatgttgattgagaggacaactcgttttgctggcgactcggggcagtctgatgccattggatggggtcttactggagcatggtttctagtgtttgctggacgtgcgatttccaatggtttctactatcaaatgacatacagattcgtcacttgtgtcaggggtagtctctgcagcttgatctacgataaagcactcgagctgagcatcacggccctggacaaatcagccgctgtgacgttgatgtccacggatacggagactatttgctacagtactgcactttggcatgagatatgggcttcgccacttgaagttggtgtagcattgtatctcttgtatagacagttggatctggccgccttagcacctgtgattgtcgcgatactgagtacggtggccatcctacagctcgcggcgtatatgggcaacgctcaaaagagatgggtccgcggcattcaagacagagtggacgctacggcaggagttcttggctacatgaaggaggtgaaaatgctcgggctatcggaccaggtaaccaagatgattcaagatcttcgcgtgagggagcttgacctgtccaaagtgtatcgaagactcgtcgcattgcgtgtctttattggaagcaacacgcaagtagtatcaccgctggctacatttgcgacttttgtcatcatggcacagggtagtggcaagccgctggacacggcatccgcatatacttcgctctcattgatatacttgttatctgaccccttagtgaccgctatccgcaccattcccttaatcagcactgctctagcatgctacggtcgtattcaagcctttctggagtccgaaagccgaaaggactgcagacagcccaccacgatcagcagcacagagacatccagtctcagcgagtcctacacgacagcttcagagaaaggagtgtcggttgaaaaggttacactctcagaaacacctgcaattgtcatgtcgaatgctagttttggctggaagactagcgaggttcccatcctgaaggacatatcaatcactgttcgagctggggagttcacgtatatcattggaagcgtgggtgtaggaaagagtaccctcgtacaggcgatgctcggagaggtcccactgttacaaggctcaatcaacactggcatctcgaaaatcgcctatgttggtcaagaaccatggatacagaacctgacgatacgccagaatatcctgggcctactagcctacgacgagaaatggtatcgcagggtcgtcggagcttgtggattggagcaagacttgtcagagcttccagagggtgatgcgacgagtgcaggcagtggtggcgtgtcattgagtggtggtcaaaagcagcgtgtagctctggcccgcgcagtctacagcagggaacggaccgtcattctagacgacgtgtttgctggacaggatgcggcaaccgaagaacatatataccaagcccttttctccgttagcgggatatttcgggagttggcaacaacggtaatctgtgtgacgaactctatccatcgtctagtgaatgccgaccatatcatcgcattgggcgagaagggtgtcgtattgcatcaaggctcactcgaacacctacagaatgataccgattatctccaaggtcttcaattccgccagccaccacccgtcgtatctcaatcaaaaagtacctcgaaagagatccagactgaccctacatcattgcgttcccagagtcaacctcaggccggcaatcaagtcgggttggctcgcaagatagcaggggaatttgcgacatacggatactacatcagatctgtacctttttggaatatctgcgcattcattggtctcgagatcctctacgcaggtagtttcaagttaaccgaactcctgctcagcttctggacggcacacgagtctgcagattcaagcaccaacaatttctatctcggtctctacggtatgctttcggcgttggctctattaggcataactggaggcgcattcttctaccttgccatcgtcgtacccgaaagctccaaagtactacacgcgcgactcttaaaatcagtcgtagatgcaccgctttctttcttttcgtcgaccgatatcggtgtcaccacaaacaggttcagtcaagacatgacagtcattgaccaagagctggcgatcagcatgattgatttcgtaatcaacctgtctattacgctgttcggcgcggcattgatgtttgtgttttcgggatactttgcagccgttataccccctgtgctagtattctgttatttcctgcagagatattatgtcaagacatcgcgtcaaatccgaattctcgacctcgaagctaaatcccccctattcactcaattcctcgaccttttgcagggcctttccagcgtcagggcgttcgcatgggaggcggcattgaaggagaagtatcttgagctcctggatgcatctcaacgtccttactacctactattttgcgtgcagagatggctcggactggtgctggacctcatggtcgccgtgctagcaacgatcttgatggttctagtcgtcaagctccgaggacagtttgcaccccagttcgttgccctcgccaccctcaatgtcgtcacattcagtcaatctctgggacttgtcattcagggatgggctttattggagacgtcatttggtgcaattgcacgcgtcaaggcattttgtcaagagactgcgacagagaacctgccgactgagaccgagttagttcctgaagcgtggccgtctcaaggtcgcatcaccatacagaatctaacagcttcctatacaccagagggcgaccccgtactgcgcgacgtgaatctcgatatcgcacccggctacaaggtcggtatatgtggtcggagtggaagcggcaagagttcgttagtcgcatgtctccttcgcatgcttgaggtcagttcagagtcgcgcattatgattgatggcatcgatatcaccaccatgcgccgccaggacgtccgatccgccgtggtagtcgtacctcagcagccattcttcttaaaaactaagagcattcgtgagaacttgacacctcacagtgaacgtagagatgaggacattctaggggttctacagtctctcaaggtagacgatgtggtggagcgactgggaggtctcgatactctgctcgacgcggagctcttgtcattgggccaacgtcagctactgtcacttgctagagctatactcgcaggcaagaagattgttctgcttgacgaggcgagcagtaatgtcgacgagaggtcggagcagctcatccgcgacgtgatccgcgaaagattcacggcctgcactgttattgccgtggttcacaggctcggcgctattgcagactttgaccgtattgccgtcatgggaggtgggcatgtcctggagtggggtagtccgaaagaactattgtctcgagacagtgaattcaagaggttatgggatttggggtcgaactag

SEQ ID NO: 29 - protein, 1442 aa, Muscodor strobelii
  misc_feature: SGI Peptide ID NO. 559565
  misc_feature (884)..(1160): Pfam Id: PF00664 Pfam Desc: ABC transporter transmembrane region
  misc_feature (1233)..(1415): Pfam Id: PF00005 Pfam Desc: ABC transporter
  misc_feature (628)..(805): Pfam Id: PF00005 Pfam Desc: ABC transporter
  misc_feature (3)..(1441): NCBI GI: 256722196 Blast Desc: NECHADRAFT_52409 [Nectria haematococca mpVI 77-13-4]
  misc_feature (8)..(1438): NCBI GI: 212536286 Blast Desc: multidrug resistance-associated protein, [Penicillium marneffei ATCC 18224] gi|210070698|gb|EEA24788.1| multidrug resistance-associated protein, [Penicillium marneffei ATCC 18224]
  misc_feature (4)..(1438): NCBI GI: 242795337 Blast Desc: ATP-binding cassette transporter, [Talaromyces stipitatus ATCC 10500] gi|218719153|gb|EED18573.1| ATP-binding cassette transporter, [Talaromyces stipitatus ATCC 10500]
  misc_feature (17)..(1437): NCBI GI: 242798985 Blast Desc: ABC multidrug transporter, [Talaromyces stipitatus ATCC 10500] gi|218716626|gb|EED16047.1| ABC multidrug transporter, [Talaromyces stipitatus ATCC 10500]
  misc_feature (9)..(1437): NCBI GI: 212541342 Blast Desc: ABC multidrug transporter, [Penicillium marneffei ATCC 18224] gi|210068125|gb|EEA22217.1| ABC multidrug transporter, [Penicillium marneffei ATCC 18224]
  misc_feature (9)..(1437): NCBI GI: 119175968 Blast Desc: CIMG_09753 [Coccidioides immitis RS]
  misc_feature (9)..(1437): NCBI GI: 240108805 Blast Desc: multidrug resistance protein MDR, [Coccidioides posadasii C735 delta SOWgp]
  misc_feature (17)..(1437): NCBI GI: 119495913 Blast Desc: ABC multidrug transporter, [Neosartorya fischeri NRRL 181] gi|119412894|gb|EAW22835.1| ABC multidrug transporter, [Neosartorya fischeri NRRL 181]
  misc_feature (17)..(1437): NCBI GI: 146322566 Blast Desc: ABC multidrug transporter [Aspergillus fumigatus Af293] gi|129557731|gb|EAL90367.2| ABC multidrug transporter, [Aspergillus fumigatus Af293] gi|159131160|gb|EDP56273.1| ABC
  misc_feature (298)..(1430): NCBI GI: 156035815 Blast Desc: SS1G_13112 [Sclerotinia sclerotiorum 1980] gi|154698516|gb|EDN98254.1| SS1G_13112 [Sclerotinia sclerotiorum 1980]
  misc_feature (181)..(1436): SWISSPROT Homolog: EC 3.6.3.44 Xenobiotic-transporting ATPase
MALDGKANFGPAAGERFDFTLAFESSILSILPTSLFLLLSFPRLFLLTRRSRKTSKHLLAVAKPVLITIYAALQLAVLLSWVLGHGSLEIQTAAAALSFVAGLVLIYLSHVEHRRSIKPSSLITVYLFLTLLFDIAITRTLWLIGEPSPVAELFAMATIVKLLVLAIEIQEKRFILLSQYKSISPESTSSLVSRGVFWWLNSLMRTGYRRYLNDDDLFPIHGTMSAKRLMNQATKAWKSATQARPNALAIAIVWCNKMTFLSGVLPRLFLVGFKYTLPMLIERTTRFAGDSGQSDAIGWGLTGAWFLVFAGRAISNGFYYQMTYRFVTCVRGSLCSLIYDKALELSITALDKSAAVTLMSTDTETICYSTALWHEIWASPLEVGVALYLLYRQLDLAALAPVIVAILSTVAILQLAAYMGNAQKRWVRGIQDRVDATAGVLGYMKEVKMLGLSDQVTKMIQDLRVRELDLSKVYRRLVALRVFIGSNTQVVSPLATFATFVIMAQGSGKPLDTASAYTSLSLIYLLSDPLVTAIRTIPLISTALACYGRIQAFLESESRKDCRQPTTISSTETSSLSESYTTASEKGVSVEKVTLSETPAIVMSNASFGWKTSEVPILKDISITVRAGEFTYIIGSVGVGKSTLVQAMLGEVPLLQGSINTGISKIAYVGQEPWIQNLTIRQNILGLLAYDEKWYRRVVGACGLEQDLSELPEGDATSAGSGGVSLSGGQKQRVALARAVYSRERTVILDDVFAGQDAATEEHIYQALFSVSGIFRELATTVICVTNSIHRLVNADHIIALGEKGVVLHQGSLEHLQNDTDYLQGLQFRQPPPVVSQSKSTSKEIQTDPTSLRSQSQPQAGNQVGLARKIAGEFATYGYYIRSVPFWNICAFIGLEILYAGSFKLTELLLSFWTAHESADSSTNNFYLGLYGMLSALALLGITGGAFFYLAIVVPESSKVLHARLLKSVVDAPLSFFSSTDIGVTTNRFSQDMTVIDQELAISMIDFVINLSITLFGAALMFVFSGYFAAVIPPVLVFCYFLQRYYVKTSRQIRILDLEAKSPLFTQFLDLLQGLSSVRAFAWEAALKEKYLELLDASQRPYYLLFCVQRWLGLVLDLMVAVLATILMVLVVKLRGQFAPQFVALATLNVVTFSQSLGLVIQGWALLETSFGAIARVKAFCQETATENLPTETELVPEAWPSQGRITIQNLTASYTPEGDPVLRDVNLDIAPGYKVGICGRSGSGKSSLVACLLRMLEVSSESRIMIDGIDITTMRRQDVRSAVVVVPQQPFFLKTKSIRENLTPHSERRDEDILGVLQSLKVDDVVERLGGLDTLLDAELLSLGQRQLLSLARAILAGKKIVLLDEASSNVDERSEQLIRDVIRERFTACTVIAVVHRLGAIADFDRIAVMGGGHVLEWGSPKELLSRDSEFKRLWDLGSN

SEQ ID NO: 30 - DNA, 604 bp, Muscodor strobelii
  misc_feature: SGI EST ID NO. CUFF.60.0
  misc_feature: Variant of the nucleotide sequence at SEQ ID NO 28
gtggtcaaaagcagcgtgtagctctggcccgcgcagtctacagcagggaacggaccgtcattctagacgacgtgtttgctggacaggatgcggcaaccgaagaacatatataccaagcccttttctccgttagcgggatatttcgggagttggcaacaacggtaatctgtgtgacgaactctatccatcgtctagtgaatgccgaccatatcatcgcattgggcgagaagggtgtcgtattgcatcaaggctcactcgaacacctacagaatgataccgattatctccaaggtcttcaattccgccagccaccacccgtcgtatctcaatcaaaaagtacctcgaaagagatccagactgaccctacatcattgcgttcccagagtcaacctcaggccggcaatcaagtcgggttggctcgcaagatagcaggggaatttgcgacatacggatactacatcagatctgtacctttttggaatatctgcgcattcattggtctcgagatcctctacgcaggtagtttcaagttaaccgaactcctgctcagcttctggacggcacacgagtctgcagattcaagcaccaacaatttctatctcgg

SEQ ID NO: 31 - DNA, 1413 bp, Muscodor strobelii
  misc_feature: SGI cDNA ID NO. 559566
  misc_feature: Encodes the peptide sequence at SEQ ID NO 32
atggtagctgcactctctgccccagctatacgtctcgacgttaccctcgccgacctctacaagcaagaaggtcttgacaacctcatctatcttcctcattacccgagctcttactatgactatggcccaaagcaccctcgcaatcggatatttcgtatcgatgacttccttgccactgtcactttcgacatgccggagtctgaacggcagccgttcgttatgaaatggattgtctgcttcatgaatcgcttcaaattctttctcggggacatggatgtcttgatgatctgttcacaagaatgtccacctcaaccaatcaacacggacgacgatctccctctccctagcaacgttgacacctcccagcttcccaaaaacatcaggctattgcctttggatgatgccaatgtcgacccggtagattttctgcgtcgcttagggaagtcactcgttgtgccattcccgcaagactggtgcgcctctctgccacatgtcgtcgcacctgaggcgcactatgagatgcattcgaaagcgtatctcagcagcttgccaaaccacgtgcctcgtcaggaggttctcgatctagatgaaatggtgataggcgagttgacagtgaagcctatgccgtttgttgtcaagatcacacatggatacggaggtggcggcacgtgggtggtgacggacgaaaagagtcggcagaagatgctcaatacggtatgcaagaggtacaggccaaagtacacatcggagcacgtgtccccgtcatcatccacgtcttcactatcatcgacttcgctcgcatggggcaagcagatcgtagtatcggagcacatcgatgtagtgcacaactattgcgcgcatttcttcgtcgggcggcagggtcgctcaaagtttctaggggtcactgcgcagaaggtcgaccacacgggcatgtggcagggcatcattgactacagcgaccaggagagactgatgcagctgtttgacgacgccactgcatctctaagtcgtgctttagcagcggatggatacgtcggtcccgcaggagcagactatttaattgatgctaagggcaagcagtggcttgtggatctcaatccacgcatcaatggtggcacgccgctctgtatgatgagccagcatctgaacgtgaagcggggttttgaccatgctacgttgcttgcgagcgtcaagttcacggctttgctcagcgatttcactactcgcttcggtgaacatatgtacgatggtagcatgattgttttaagtgtctctacagcagagcaaggagagggtcggcctgacaagcactctttgatggtgatctgtgcagcagagaccgagaagcagttggatagattagccagagacgtctacagtttttgcaatggtgctgaagtgccgaaaagctag

SEQ ID NO: 32 - protein, 470 aa, Muscodor strobelii
  misc_feature: SGI Peptide ID NO. 559566
  misc_feature (3)..(470): NCBI GI: 145251772 Blast Desc: An16g00860 [Aspergillus niger] gi|134082936|emb|CAK46772.1| protein product [Aspergillus niger]
  misc_feature (3)..(463): NCBI GI: 256730850 Blast Desc: NECHADRAFT_89835 [Nectria haematococca mpVI 77-13-4]
  misc_feature (135)..(469): NCBI GI: 220909807 Blast Desc: protein of function DUF201 [Cyanothece sp. PCC 7425] gi|219866418|gb|ACL46757.1| protein of function DUF201 [Cyanothece sp. PCC 7425]
  misc_feature (9)..(462): NCBI GI: 255939342 Blast Desc: Pc16g00150 [Penicillium chrysogenum Wisconsin 54-1255] gi|211585063|emb|CAP92685.1| Pc16g00150 [Penicillium chrysogenum Wisconsin 54-1255]
  misc_feature (7)..(449): NCBI GI: 169763150 Blast Desc: [Aspergillus oryzae RIB40] gi|83770503|dbj|BAE60636.1| protein product [Aspergillus oryzae]
  misc_feature (7)..(449): NCBI GI: 238489017 Blast Desc: solid-state culture specific ATP-grasp domain protein [Aspergillus flavus NRRL3357] gi|220698134|gb|EED54474.1| solid-state culture specific ATP-grasp domain protein flavus
  misc_feature (75)..(382): NCBI GI: 238496301 Blast Desc: conserved [Aspergillus flavus NRRL3357] gi|220694266|gb|EED50610.1| conserved [Aspergillus flavus NRRL3357]
  misc_feature (75)..(382): NCBI GI: 169775065 Blast Desc: [Aspergillus oryzae RIB40] gi|28144494|dbj|BAC56097.1| aos20 [Aspergillus oryzae] gi|83769863|dbj|BAE59998.1| protein product [Aspergillus oryzae]
  misc_feature (150)..(463): NCBI GI: 238841678 Blast Desc: conserved [Microsporum canis CBS 113480]
  misc_feature (150)..(382): NCBI GI: 218442659 Blast Desc: protein of function DUF201 [Cyanothece sp. PCC 7424] gi|218175017|gb|ACK73749.1| protein of function DUF201 [Cyanothece sp. PCC 7424]
MVAALSAPAIRLDVTLADLYKQEGLDNLIYLPHYPSSYYDYGPKHPRNRIFRIDDFLATVTFDMPESERQPFVMKWIVCFMNRFKFFLGDMDVLMICSQECPPQPINTDDDLPLPSNVDTSQLPKNIRLLPLDDANVDPVDFLRRLGKSLVVPFPQDWCASLPHVVAPEAHYEMHSKAYLSSLPNHVPRQEVLDLDEMVIGELTVKPMPFVVKITHGYGGGGTWVVTDEKSRQKMLNTVCKRYRPKYTSEHVSPSSSTSSLSSTSLAWGKQIVVSEHIDVVHNYCAHFFVGRQGRSKFLGVTAQKVDHTGMWQGIIDYSDQERLMQLFDDATASLSRALAADGYVGPAGADYLIDAKGKQWLVDLNPRINGGTPLCMMSQHLNVKRGFDHATLLASVKFTALLSDFTTRFGEHMYDGSMIVLSVSTAEQGEGRPDKHSLMVICAAETEKQLDRLARDVYSFCNGAEVPKS

SEQ ID NO: 33 - DNA, 1038 bp, Muscodor strobelii
  misc_feature: SGI cDNA ID NO. 559567
  misc_feature: Encodes the peptide sequence at SEQ ID NO 34
atgtcttcctcacttgtggttcttggggctggtatcatagggctgcagacagcactagtccttaacgaggccggtttcgacgttgtcattgtagccaaagatttcccagggtcttctgatcccctctacacctctacctggtctggcgcacaatggcgatcaaacgtcgacgtcggtaatcagcagaactgggatcatcaaacctttctgcattggcgcgaactcgtcaagaagacccctcccgccgtttgtggactagagttgaagaaggccatctacctctgggaccgacctgaagctagattcgccagacctgaagactctcattggtgggcttcggaattatttccaaatggccccggctgcagggtgctgaaacccgacgaggttgtcgttgaagggtcttttgaagccggacttgcttacgaaacgttcgcactctgcccatccatctatctaaaatacctgtacgatcagtgtgtggcaaatggcatcgcctgcgagaccgccacggtagattcaattgccgacgtgttccagcttcctgaattcgaacatgtacgcggagttatcaattgcgcgggattggccgcaggtaagttagtaggcgacgacgatgtatatgctatcaaaggccagactgttgtggtgaaggggaccgcaaaccgcattgctacccgttgcggggatgaaggcgcatgggaagccctggtaatcccctggccaggcacaggagagacgatgctgggtggctgtaagattgtggatgactggtccaccactcccgatgctgagatgaccaagactatccttgctcgctgcaaacccatcgcacccgagctactgaacgacaatggtgagtttgaagttgtgacggagcgtgttggcctgcgcccggcgagacgaggaggtccacgcatgcaacttgagcatctgggggatagcaaattcgtcttccatgcatatggacatggtagtgctggtgcctcggcatttgggagaccttccgtgcctggcaatcccgcagttcgaagctaa

SEQ ID NO: 34 - protein, 345 aa, Muscodor strobelii
  misc_feature: SGI Peptide ID NO. 559567
  misc_feature (4)..(326): Pfam Id: PF01266 Pfam Desc: FAD dependent oxidoreductase
  misc_feature (4)..(328): Pfam Id: PF01266 Pfam Desc: FAD dependent oxidoreductase
  misc_feature (3)..(328): NCBI GI: 119181389 Blast Desc: CIMG_05805 [Coccidioides immitis RS]
  misc_feature (6)..(331): NCBI GI: 256720383 Blast Desc: NECHADRAFT_56002 [Nectria haematococca mpVI 77-13-4]
  misc_feature (2)..(328): NCBI GI: 210076109 Blast Desc: YALI0F31427p [Yarrowia lipolytica] gi|199424997|emb|CAG78908.2| YALI0F31427p [Yarrowia lipolytica]
  misc_feature (4)..(328): NCBI GI: 119477558 Blast Desc: FAD dependent oxidoreductase superfamily [Neosartorya fischeri NRRL 181] gi|119407439|gb|EAW17388.1| FAD dependent oxidoreductase superfamily [Neosartorya fischeri NRRL 181]
  misc_feature (4)..(328): NCBI GI: 70997015 Blast Desc: FAD dependent oxidoreductase superfamily [Aspergillus fumigatus Af293] gi|66850898|gb|EAL91224.1| FAD dependent oxidoreductase superfamily [Aspergillus fumigatus Af293] FAD
  misc_feature (4)..(328): NCBI GI: 169779617 Blast Desc: [Aspergillus oryzae RIB40] gi|238500297|ref|XP_002381383.1| FAD dependent oxidoreductase superfamily [Aspergillus flavus NRRL3357] protein product oryzae]
  misc_feature (4)..(328): NCBI GI: 259480550 Blast Desc: TPA: FAD dependent oxidoreductase superfamily (AFU_orthologue; AFUA_5G13940) [Aspergillus nidulans FGSC A4]
  misc_feature (3)..(333): NCBI GI: 2494036 Blast Desc: OXDA_TRIVR RecName: Full=D-amino-acid oxidase; Short=DAMOX; Short=DAAO; Short=DAO gi|1246860|emb|CAA90322.1| D-amino acid oxidase [Trigonopsis variabilis]
  misc_feature (6)..(331): NCBI GI: 58267154 Blast Desc: [Cryptococcus neoformans var. neoformans JEC21] gi|134111541|ref|XP_775306.1| CNBE0250 [Cryptococcus neoformans var. neoformans B-3501A] gi|50257965|gb|EAL20659.1| CNBE0250 var.
  misc_feature (3)..(333): NCBI GI: 41057628 Blast Desc: D-amino acid oxidase [Trigonopsis variabilis]
  misc_feature (5)..(312): SWISSPROT Homolog: EC 1.4.3.3 D-amino-acid oxidase
MSSSLVVLGAGIIGLQTALVLNEAGFDVVIVAKDFPGSSDPLYTSTWSGAQWRSNVDVGNQQNWDHQTFLHWRELVKKTPPAVCGLELKKAIYLWDRPEARFARPEDSHWWASELFPNGPGCRVLKPDEVVVEGSFEAGLAYETFALCPSIYLKYLYDQCVANGIACETATVDSIADVFQLPEFEHVRGVINCAGLAAGKLVGDDDVYAIKGQTVVVKGTANRIATRCGDEGAWEALVIPWPGTGETMLGGCKIVDDWSTTPDAEMTKTILARCKPIAPELLNDNGEFEVVTERVGLRPARRGGPRMQLEHLGDSKFVFHAYGHGSAGASAFGRPSVPGNPAVRS

SEQ ID NO: 35 - DNA, 1156 bp, Muscodor strobelii
  misc_feature: SGI EST ID NO. CUFF.255.0
  misc_feature: Variant of the nucleotide sequence at SEQ ID NO 33
aggccatctacctctgggaccgacctgaagctagattcgccagacctgaagactctcattggtgggcttcggaattatttccaaatggccccggctgcagggtgctgaaacccgacgaggttgtcgttgaagggtcttttgaagccggacttgcttacgaaacgttcgcactctgcccatccatctatctaaaatacctgtacgatcagtgtgtggcaaatggcatcgcctgcgagaccgccacggtagattcaattgccgacgtgttccagcttcctgaattcgaacatgtacgcggagttatcaattgcgcgggattggccgcaggtaagttagtaggcgacgacgatgtatatgctatcaaaggccagactgttgtggtgaaggggaccgcaaaccgcattgctacccgttgcggggatgaaggcgcatgggaagccctggtaatcccctggccaggcacaggagagacgatgctgggtggctgtaagattgtggatgactggtccaccactcccgatgctgagatgaccaagactatccttgctcgctgcaaacccatcgcacccgagctactgaacgacaatggtgagtttgaagttgtgacggagcgtgttggcctgcgcccggcgagacgaggaggtccacgcatgcaacttgagcatctgggggatagcaaattcgtcttccatgcatatggacatggtagtgctgggtaagttgcaagtctttctcgtattctctgtcctatcacgctagtcttgctagtctcgccagcttcttagtgcctcggcatttgggagaccttccgtgcctggcaatcccgcagttcgaagctaacgatggcgtcaatcggtagttatgagggttcaatgggaatagctagggaggtattgagtgccgttcagagctttgtcagcactgcccactagttttgtaatgaagggttctgtcgctagtgataggggataatgtaggggaccaatacatcttcaaatcagacgatcgaattgtttcacactttgaattctgctgtatcgtgatttgcattatgcagaaattgctcttgagtctaaatatgctcactgaaaggttgccacaaagcttaaaaagaaacattgcatgcaaaagacagcaggtgtcgagtattggacgg

SEQ ID NO: 36 - DNA, 1473 bp, Muscodor strobelii
  misc_feature: SGI cDNA ID NO. 559568
  misc_feature: Encodes the peptide sequence at SEQ ID NO 37
atgactatcatcacaacctccccacaatgtttgaacgtctacagcgggcctcagggcctgcaacgatactttgaccccgatcagcagccgatgatgccacttgtagagctgccagcgagactaaatcccttcctgaaagatggtgtgcatatctacgcaaagatgctgaccactctcccggcgcaaaacgtaaaggcactcccagctttgaacatgctgaagaatgcaccagaggcaagggggaaagccatcgtcgagtctagttcgggatcgaccatcatctcgctatccatggcgtcacgtgttctgaacgagaatgacgacgtcaccgcctatgtgaccaataagatcgaaaagtcccggttgcagacgttggcctttttcgggctgaaagttgtcctctacggcgggcctgcacagccagaaatatcagatgatcgtgggatcatgagcaagatccaccgatgggttgaagaggacgacggcttgtgggcaccttcacagtataccaacgagaacaactacaagtcgcacattcgttggacgggaccccagctcctgaggcaattgcctaacattgacatattctgtgcgggcatgggcagtgcaggctgtgtaacggggacgggactttacttgaaggagcataagagggacgtaaagattattggtgtttgcaatcgaactggagattcaatacctggtccgcggccggcacccttgtttgaatccgtctcgtttccctggaagcaggtggtcgacagcatcgaagaagtcggttcggtgccatcgtatcgactctccatgaagctgtcccgtgaaggtatcatctgtgggccttcatcgggtatggcactgcagggtcttctcaacgtactcgggaaggcgaaaaaggatggttctttaagagaccttgcaggacccgatggtcatgtccatgctgtattcccatgctgcgatctgccgtaccagtacatggacaactacttcaagaagctgggaccctttgaatttcatccgatcagcaacgatcaactcctaaatgtggataccaatatctacgtgtcatcatgggaactagacgccactgccgctagggaactactctggggaagcgatggccaggagatggcgccgagcgcaacggttgtagacatgcgcgatcacattgattacctcaagggcagtgtaccgggcgctaggaacttagaatttggatctgtgaggagcgattccggcagtccgtttgacgatgttacggttttagaggcgcagtggttagacatgaaggatcgtctaagccaagggattgagagcatactaccagggcttaagcatggcagccctgtcatcaccctttgctacaatggggaaagcgcccgtatgctgactacaatcttgagggcacaggagcttgaggcctatagcatcaagggcggatatccggcttggacggcgcttgcaactgtctag

SEQ ID NO: 37 - protein, 490 aa, Muscodor strobelii
  misc_feature: SGI Peptide ID NO. 559568
  misc_feature (31)..(307): Pfam Id: PF00291 Pfam Desc: Pyridoxal-phosphate dependent enzyme
  misc_feature (49)..(225): Pfam Id: PF00291 Pfam Desc: Pyridoxal-phosphate dependent enzyme
  misc_feature (6)..(488): NCBI GI: 261193869 Blast Desc: cysteine synthase B [Ajellomyces dermatitidis SLH14081] gi|239588945|gb|EEQ71588.1| cysteine synthase B [Ajellomyces dermatitidis SLH14081]
  misc_feature (6)..(488): NCBI GI: 239613737 Blast Desc: cysteine synthase B [Ajellomyces dermatitidis ER-3]
  misc_feature (11)..(483): NCBI GI: 67541899 Blast Desc: AN7113.2 [Aspergillus nidulans FGSC A4] gi|40742128|gb|EAA61318.1| AN7113.2 [Aspergillus nidulans FGSC A4] gi|259483564|tpe|CBF79057.1| TPA: cysteine synthase B, FGSC
  misc_feature (11)..(483): NCBI GI: 119487114 Blast Desc: cysteine synthase B, [Neosartorya fischeri NRRL 181] gi|119410569|gb|EAW20515.1| cysteine synthase B, [Neosartorya fischeri NRRL 181]
  misc_feature (11)..(483): NCBI GI: 70982103 Blast Desc: cysteine synthase B [Aspergillus fumigatus Af293] gi|66844203|gb|EAL84542.1| cysteine synthase B, [Aspergillus fumigatus Af293] gi|159122186|gb|EDP47308.1| cysteine synthase B,
  misc_feature (8)..(489): NCBI GI: 225685169 Blast Desc: conserved [Paracoccidioides brasiliensis Pb03]
  misc_feature (8)..(489): NCBI GI: 226294492 Blast Desc: cysteine synthase K/M:Cysteine synthase B [Paracoccidioides brasiliensis Pb18]
  misc_feature (6)..(483): NCBI GI: 121714439 Blast Desc: cysteine synthase B, [Aspergillus clavatus NRRL 1] gi|119402984|gb|EAW13404.1| cysteine synthase B, [Aspergillus clavatus NRRL 1]
  misc_feature (11)..(483): NCBI GI: 115387793 Blast Desc: conserved [Aspergillus terreus NIH2624] gi|114195486|gb|EAU37186.1| conserved [Aspergillus terreus NIH2624]
  misc_feature (11)..(489): NCBI GI: 226279395 Blast Desc: cysteine synthase K/M:Cysteine synthase B [Paracoccidioides brasiliensis Pb01]
  misc_feature (33)..(292): SWISSPROT Homolog: EC 2.5.1.47 Cysteine synthase
MTIITTSPQCLNVYSGPQGLQRYFDPDQQPMMPLVELPARLNPFLKDGVHIYAKMLTTLPAQNVKALPALNMLKNAPEARGKAIVESSSGSTIISLSMASRVLNENDDVTAYVTNKIEKSRLQTLAFFGLKVVLYGGPAQPEISDDRGIMSKIHRWVEEDDGLWAPSQYTNENNYKSHIRWTGPQLLRQLPNIDIFCAGMGSAGCVTGTGLYLKEHKRDVKIIGVCNRTGDSIPGPRPAPLFESVSFPWKQVVDSIEEVGSVPSYRLSMKLSREGIICGPSSGMALQGLLNVLGKAKKDGSLRDLAGPDGHVHAVFPCCDLPYQYMDNYFKKLGPFEFHPISNDQLLNVDTNIYVSSWELDATAARELLWGSDGQEMAPSATVVDMRDHIDYLKGSVPGARNLEFGSVRSDSGSPFDDVTVLEAQWLDMKDRLSQGIESILPGLKHGSPVITLCYNGESARMLTTILRAQELEAYSIKGGYPAWTALATV

SEQ ID NO: 38 - DNA, 660 bp, Muscodor strobelii
  misc_feature: SGI EST ID NO. CUFF.93.0
  misc_feature: Variant of the nucleotide sequence at SEQ ID NO 36
cgagacgatcgtagtaagagttacgagcagtaaagcagtaaatgttgatgtttgatgcacagggtcttctcaacgtactcgggaaggcgaaaaaggatggttctttaagagaccttgcaggacccgatggtcatgtccatgctgtattcccatgctgcgatctgccgtaccagtacatggacaactacttcaagaagctgggaccctttgaatttcatccgatcagcaacgatcaactcctaaatgtggataccaatatctacgtgtcatcatgggaactagacgccactgccgctagggaactactctggggaagcgatggccaggagatggcgccgagcgcaacggttgtagacatgcgcgatcacattgattacctcaagggcagtgtaccgggcgctaggaacttagaatttggatctgtgaggagcgattccggcagtccgtttgacgatgttacggttttagaggcgcagtggttagacatgaaggatcgtctaagccaagggattgagagcatactaccagggcttaagcatggcagccctgtcatcaccctttgctacaatggggaaagcgcccgtatgctgactacaatcttgagggcacaggagcttgaggcctatagcatcaagggcggatatccggcttggacggcgc

SEQ ID NO: 39 - DNA, 15180 bp, Muscodor strobelii
  misc_feature: SGI cDNA ID NO. 559569
  misc_feature: Encodes the peptide sequence at SEQ ID NO 40
atggcggtcctacaattcacagcaaagagtctcccatcaaagggacatgtcagtaaaggggctttggccgcgacggcttggacagtactgagctcgaagctgtcaggaagcgaggaggtagtattgaatcggaatgttcttgctcgaaagagcgacagtccccaatgtgtcgtctctgtctcccgcgaggccaggctgaacgcagtcgtcgattgtgtcagcggcgcctcttatgccaacgacggcaatcgtatgtggcagtttagtctgcagttgaatagccagagcgcggcttcgtctacaaagatgaggctgttggtcgtagagactgacagcgcaactgggacacccgagaagctggccgtggatgacaacactcggtacatgctactcgtggttcgtcctctagctgatgacacctgcgacattacgcttacggtatcgagcaaagccgtgaccaaaactcgatcagagaggctgtttcagcagttcgttcacattctcgaccaattagagagtgttgctgaggtggatgcagccgtgattcaagatttaggagtcgtatgttccgaggacgtgtctaccattgaacggtggaatgccactcctgtggaacctgtcttaagctgcgtgcactttgcgatagagtcgcaggcacgtgcaagacccgtagctcccgccgtgtgcgcttgggacgggcaattgacatatagggaactatcatatgcctcgaatcggctggcgaggcagctcgtaagttatggcgtcgggcccgaagtatttgtgcctgtgctgttcgaaaaatcagtatgggcagtcgtggcaatggtggccatactcaaagcaggcggtgctgttgtcccgctaaatcctgatcaccccaaaagtcgtcaacaggccatcctaaaagatattagtgctagcgtgatactctgctccgagatgcattctgaagttgctcagacacttcacggcgatgtcttggttgtcagccggactgacattgacgcgctagagagccacgacgcgtcggatcttcaagatatcagagtcggaccaaataaccctgcatttgctgtctttacatctggtagcactggtcagccaaaaggcataataattgaacacgtggctatctgcaccagcatgcgcgaccacggcaaaacattccgcttcggaccggatacgagaactatccaatttgcagcgttcacctttgacgacagcttctccgacatcttcactacccttgttttcggcggttgcatatgtatgccctcagaccacggccggctggacgatctcgctggctgtatacgggagatgaatgccaactatgcgtgtctgacggtaacggtggcagctcaactccgtcctcgagatgttccgtctctgaagactctcatagtaggcggtgaaagtgtgactgcgagggtggttcagcaatgggcagaacatgtccatctcatcaattcgtacggtccggccgaggcatccatcttttgttcggccaacgctggcatggcttacgatgatgacccgatcaatatcggaattggtgttggttgtctccttcacatcactgacgtccacgaccacaataatctagttcctattggagctattggcgaattgcttattgagggaccgatcctggcacggtcctatattaaaaatgaagccaaaacagaagcgtcgttcatcactgatccgacctgggcagtcggcacgaacctcggcccgagacgcctctacaaaaccggtgacctggcacgttacaacgatgacgggactatccaagtactaggacgaaatgacacgcaggtcaagttgtacgggcagcggattgaacttggagagattgagcaccagatccgtcgtgaagtaggcgagtgccgagaagtcgctgtggaggtgctcaagcataagaaagcatctggtgacgaagtaccgatccttgccgctttcatatctatgacagaagcatccaatattacggggggatctcagggagtcgaagtgatgcacgactttctgcaagctagtggcaagagattgccaaaagtgctcccctcatacatggtcccgtccgtctacatccgagtccaagatatgccgctgatgatttcgggcaagcttgatcgcaagaagctccacgaattggcatcgaatcttgctctagtcgacggcttgagcaagggcgaagatgtggatggtctgacggcaccggaaacaaactccgaaaaggctctacaggctctctgggcagatgtgcttggtgttgacaagaaatccatcaagaaggaaagcaacttctttcgacttggtggtgactctgttgctgcaatgagattggtcactgctgctcgcgacgcaggttccaagatctcggttcgccagattttccaaactccaacattggccgatcaatcgttagcggtagaattttcccaccatgttaacgccgaaatagagaccgttcagaaattcagtttactccgaaacgtcgagcaaaccttggacgcagctcttacagcaattcagcatcatgatccacgcatccagaagcaagcactgttagatgcgtacccgtgtagtccgttacaagagggtgttgcggcgctatctataaggaatgcaggctcgtatgtggctcagatggcctacaagctttccgacgacattgatatcagtcgtttcaaggcggcctgggacactgtagtcaagagcgaggatatcttgcgaacgaggatcatacaagaccacgatgattcggcgctatggcaggctgttgtggatgaacaggttccttggcttgaaacatatcaaggtctccaggcatatctggacagcgacaagaaatcaacaatggcccttggatctaggctcaaccgactggccattgtccactccgagtctggtgatgactgctggtttgtgtggacggcgcatcatgccctctttgacgacgattctctacaaatggttctttcggcagttgaacgggtatatcaaggtctcgatattgagccgcatccacagttcaacgtcttcatcaagcatattcaagaagctggcataactgctaccgcagacttctggaggaaagagctcgctgaccctccgccgccctcgttcccagtgcttccaagctcagttcatctgccatccgccaatcgaacgatacatcgtgctgtggcgctcgatttcctgcgtggatccgaaaccacagcgtcgacactgcttcgtgccgcctgggctatgctccttgcacagtactcggaaagcagcgaggtggtttttggctgtactgtgaacggtcggagtgtcccattagacagaatcgacacgatcgctggcccgacatttgcaaccatcccgttgagagtgatggtgaaccgggacaatggtgttcaggacttccttcgtcaaatacaggaccagtatgtcgccatgatgccacacgagcaggccggtcttcaacgtattgctcgctgggttcccgaagccagggcggcatgtaactttcaaagtcttcttgtcgttcaggctgctactgatgcaccagatgggggtagtcttttgggcgcacctgaactcctgggcatctcgtcgggattcgttacaaatgctcttacagccgagtgccgcccatcaactgatggccatttgaatatccagctgcattatgacgatcgtgtgattctgcccgctcaagcagaacgactagcaagtcagttcgatcatatcttgcgacagatgcacgctgccgctaatgtcgctgacggagtgaccaccatcaagcagctggatttggttagcgaagccgacatgcaggacctcgcaaaatggaacaacgagtcgccagatgaacgtgttgatgacatgatacaccgtggttactacaagcacctcggtctccaaccttcaatgcctgcagctgaggactacgacagctcgatcactttcgcagaactcgaggcattgtcaaatcgcctcgcgcagagcttagtagcgcagttcgggacgcaaaatggccaatttgttgctctctgcgtagaaaagtcagtttttactgtgatagcagcattggccatcgtgaaaatgggcggcgcccttgccatgttggatccatctctgccggtcgatcgacttcaccatatgcttaacatttcaaaggcatccttcatcttgtactctactacttctgctgccaagttgaggtcttccatctctctccattcattcgctgccgaccggtcattcctggaaagcttgcctcctgttgagactttccaggtcgcgattgaccctagcagccctgcgtgcatcgtatttacatctggttcaactggagttcccaaaggcaccatcttctctcacacctcgtggctgtcaggcacacgccagcttgcccgtgtaggtgggatggaagaacatcgcccccttcgtgttctacagttcgcgggcatgtcgttcgacatctgtatcttcgaaatcatgtcgaccatttcttttggtggatgtgtctgtatggttcccgacaatgagcggacaagcgagggcgttgtgcgtgccatgaatcgactgcgagtctcttgggcattcttgatccccacgttcgcctcattaatcgaccgctctgccctttcgacccttcgcaccttgatcatcggaggcgaaacgttcgatcccaacttgttcaccagttttcctcctcatgtccagcttatggaagcgtatggcccgagcgaatgtactcccatcacgttccttaacacgaatccccatccgaataggccccggaatgtaggtcgcgctgttgtcggatcgggatggatcgtagatccggatgaccaccatcgactcgctccgattggggctgttggtgagcttatccttagcggtccaaacattggcggcggctatcttggggatagtgtcaggacagcacagtctttcgtccagcttcctcaatggacgaagcactttccagctttgcaaaatggtcgacatatatatctaactggtgatctcttccgctatgagtctgacggatcgctcatctttgtgggacgaaaagatacccaggtgaaactgcgaggtcaacgtattgagctcggtgagatcgagcaccatctgcgtcaacttgtcccgcaggcaaagacagtcgtcgtcgaaagtatacaacccaaggatcaaaaccgcaagatgctcgttgccttcctgagcgtcccatcactgagcacggctactgatccggacaccatactcttaccgcccgaggttctcgatctgattgaccttcgaacagtggttgatcggctgggaactgctctaccccgatacatggttccaaatgcctttctcccggttcagcgactcccgttcatggcaacctcgagcaaggtcgaccgtaaggcgctgcgtgccatctgtgatcagctcgagacggcttctttccgcccatacacgatccagcatcgtaacaaaaaggcgccctcttcaccaattgaagcaaagctgagagagctgtttgcccgtgtcttgcagatcgaagagcaatccgtcggtgtcaacgatagctttatcctacttggaggtgactctatcgatgccatgcgattggtatctcttgcaagagccgcctccttgccgctcacggtcgcaaagatatttgaacagcctattcttgaagagttagctgaatatttggcagctctaaaggagtcagatcctacagttggaggtgagcctgattcgtctattgctaactgggaacttctaggagattcgcaaagtatcgaaatcgtacgccgcgaggcactcaaacagtgtcaactgtcgtccgaagatgtgatcgaagacggatacccttgtactgcgcttcaacaaggtcttctcgctctatcgattgcccgacctggtacatactttgctcgacatgtctttaccgcttcatcgtctgtgacagccgacaacctgaagaatgcattcgataagttggccgccagtcttgctatcttcaggacgcgaattattcagcttccgtcctctgagctggtacaagtggtcacgcgagagccaatcgaatggactgaaatgaagaatctagatgaatatatccaacaagacaagatgacgccgttcgagttaggatctcgcttgaaccgcttcgctcttatccagtctgacacttcatcttcgccaatggtcgtttggactgctcatcatagcgtctatgacggcttttcaattcctctggtagttgaggcattggaattagccattgcagccgggttagacgatgatttcgcccataccgctgacttccgccaatacatcaaatacatcaccgatgccaacgaggagacctgtcgagattactggacaaagcagttctcagacgggacctttgccgaattcccctcagccactagtcaggttggcgacagcgtggagcgagatctcgttgttgagaaagcaccgtacagtcaaaccctcacttccgttactgtctcgtcaattgtacgagctgcatgggctctcactctatctcgctatacgggatcaacagataccgtgttcggcgcaacgctgtccggtcgtgatgctgcagtacaaaacataacagatatcattggccccaccatttcaactgttcctgtgcgcatcaaggtggacgacaaaatggatgtggaggcgttcgtcacggcgattcaccagcaggctgtagaaatgatcgactatcaacactttggtcttcggaacattggccaatgcagtgccgaggcttccagtgcagctcaattccaaaatctcctcgttatggatccatcttcgttcgggaaggaatcggacctgatcagccaccgattcgccgatgacgatggatcccaaacgcacacatatcctctcgtcgtcaactgctccgctacatctgatgacctagaagtcaaggcgcttttcaactctaacaccatcgagccgggtcaagcgcaaagaattctaagggtcttcgtcggctttatccagcagatcgccaaggcttcacccgagacgaggctatctgagatcatcagaacccagcagcttgacgtcgacacactgcatcgatggaacgcaacggttcctcactctatcgagaagtgcattcaccaggctgtccaattcaaagtgttgtccgataagcttgccatacggtcctgggatggagatgtcacctacgcagagctggatgcatggtccacaaagatcgcccttcatcttatctcattaggctgcaaaccagagacgatggttccgatgtgtttccgtcgctcactgtgggcaatggttgcaacctatggagtgtggaaggctggcggagctcccgtttttctcaatgcggacttcccaataagccggatcaatagcatgttagaattcctcgactcagatatgctgttaacgtcggagaacatgtttccggacgagaaaccagctctaaaacatatgatcgagatcaatcaaggtatggttagctctgttgtcgattcggctgccggccccatcacaaagacaagaaacgtccccttacccgagattcgtcctgacaatctgggattcgcttcatttacatctggcacaactggtgtacccaagtgcatccttctagaacatcgtcacatcctctcgtgtttctcacgccttgtggatgctggtgagttccgtccgagcgcaagatgcttatcctttgcggcctacacgttcgatgccatgatgaaggactttatcgcgacgccaatgtttggagggaccctgtacatgccttctgacgacgatcgaatgaaccatctcccagcatacatcaacaaacaccagatcacccaggctactgtaacaccaaccatcgctagccttttcgagcctacagatgtgcccagcttggaactactgatcttggcgggcgagaagatgacgacaggcaatatctctacttgggctccttccgtacacctgaacaatgcttacggaccctcagaggcagccgggcgagcgacagtcaacagtaggctcactgcagactcggatcctagcaatatcgggcgggctgtgggctgtgtctgctggattgtcgaccccgaagatcataacatcctcgtaccgattggtgcaactggcgagcttgtcattgaaggcccaaccgtatctcgcggttatttcaagaaccccgaaaagacggccaatgcattcatatctgcaccaagctgggtacctgccgaacgtcgacatgcctccaatcgtctgtacaagacgggtgacctcgcttcacagaatcctgacggcacattcaagatcatcggtcgcaaggatgctcaagtgaagctccatggtcagcgtattgaactggaagaggtcgaatctgcattcaaacagcatttgcctgccagtgtcgccatggttgtagagatggtcacgactcaaagtggcgccagcttgctagctgctttcttacacgacaagaaatccgagcagcccaaaaactcggccttacaattcctcaacccggacactaccatgttgtcagatatcgacctacgccagatctgccataatgttcgccagacgctacctccttatatgattccgagcgtgttcctggcagtctcccgtattccactctcaccctctgcgaagacagatcgaaaggttcttcgcgatctctattctaacaccactgcggatgtaatcacagcgcactcgttagcgtccggaactagtctccaagcaccagccaatgcacgccaagagcaactccgggctttggtctcgtctgtcctgcgattggaagaaagctcaatcggaatgaaccaaagcttctcacagctaggtggtgactcgatcactgcaatgcgtttggtagccgtggctcgatctaacaatattggcctcaccgtagctgacatcctcctcggcgcatccctcggagacctagatggcaattctgttgatcttggggatgccgcggcgacagagaaggtaaatccattcgagctggtccaggacgccaatttgaatgatctcatcgccgaggttgccgtccaatgcactgctcggaacgaccagattgaagacatctatccatgcacgccacttcaggaggcattgatggctttgtcgattcaacaggaaggcgattacattgcgcgacacgagattgagctggctgcacatgtgaactttgctgaactcaagtcggctttcgacacgcttacgcgaaactttccaattttgcgtacacgcattgtccaaacatccaggggcctactccaggtagtcatgaaagaaggaagtcaatggtctaagggtgctgtcagctctcaaacgcatgtgcagatgggactgggcgagcctctgaaccgccttgtgttccaagagtcgcctacaaagtcaatgctatggttctctcatcacgcaacatatgatggtgtctcgagtcctatgatcctcaacctgctagaacaagtatatcatggcgcaccactcgacccatccgccatcgctgattaccgcaacttcatcaaatatacgagtagcctctctacgaaagcctccgagaagttctggacatctcagctagccgatgccagtcccgagaggtttccgccagtcgtacctggtgagacgcaactcgacgtaagtggtcgaatcgagaaacacgtaaacacatggatcgcatcacctactcaagcagcaatccgggccgcatgggcgattgtcctagcagcatacacaagctcggatgaagtggtattcggtactatcctttccggacgcaatgctcccgttcataatatcgaccgtatggccggtcctaccatcgccaccgtccctattcgcgttggtatcgatcgcgatgaacaaccacaagcactccttgcccggttgcaaaggcaggcagtggacatgattcctcatgaacattttggtttgcagaacatccaacgaaccagcgagatcgcccgagatgcctgcgatttccgcaaccttctagtcgtccatcctccgccaaaggatgcgccgcgacagatcacaagttcggcatcaacgcctcctgtcatgacacctggcgagatctcgtcatcagcctctactacatcggagtctctgggttctttccagcttgtcccagcttcgccaagtacgcactcgtcagcgtcaactgctcctgatgagaaagagctcccagtcgtcttccaaccgttaatcttcctacaagggaaagagcacagttttgcctcatctctcgatatgaacacctatcctctcgtgcttgaagtacagacacaacacgatggctactcactcgaggtgtcttacgatgcatcaattgtcaacgatgcccaaactgaacgtatcgtgaaccagttcgaacacgttttggctcagctctcggctcaccagacccaatatggacatgaaaagtcggctacatcagcttcgaagattggggagctggaactggcatctcctgaagacatgcaacacctttggcgcttgaacgacagtatctcggatgctattgatgacggagttcatgaaatcgtccgacaaagagcgaaagactcaccaaatgcagaagccgttgtgtcatgggatggaaagatgacataccgcgaacttgacgaagcttcttctatcttggcgcatgatatcgttgccaagactcgtggccagacgggctcctatgttgctctctgcttcgaaaagtctatctgggccgttgtgtcgatgctggctgtactcaaagctggcaaagcattcgtccagctcgatccgacttatccgatggaccgactgagacatatcacctcagctctggaccctgtacttggcatatcttcacctaccaagtttgaattatgtcaaggactagtctccaatacaatggtatttgaatcgagcaagttcgatgagttgaagcagagtggaatcggcagagatgcagacaacaacgtcacgccccctgtcgttgtcatcagcccacgcgatcccatgtgtgttatcttctcctctggaacgacgggtacaccaaagggtggtattctttcccaccgttcttttgccacgtccaatctacggaatggcgagttacttggaatgacctctacgacgagatgccttcaattcgcatcatgcagctttgatgtccagcttttcgagaccttcaccacccttatgctcggtggctgcgtctgtgtacctcatgatgacaatcgcaacatggacatcgacaaggagatcagtcgcatgaacgtcaactttgcactattgaccccgtctttcgctgcgctgttctctcctgatgctttcccgtcgctcaagtcgctagtgctcgtcggcgaagctgtcaccgcgaccctagtgaacacctggagccccaaactcggcctttacattgcttacgggcctagcgaatgcagcgtctgctgtaccgtgacacccaggatgggtttgaattcgacacctgagaatctcggcgcccggtctagctgcgcactctggattgtcgatccggaaaaccacaaccgcctcgctcctcttggtgcacccggcgagctgctcgttgaaggtcacaatgttggcgaaggctatgtgaacaatccagagttgaccaaggccgtctacattgatgcgcccacgtggtggcatcctcgcgaccattcggtcaccgctgctccgcccagcagattctaccggtctggagatatcgtcaaatacgccgaagatggctctattctgttcctccgccgtaaagatacgcagacaaagatccgcggccagcgagtcgagatgggcgacgtagagaatcacttggccgaagtgcccgagctcggacacagcatggccttgataccgaagactggaccattgatgaaacgtcttgttgcagttttcagcaccgagagaactggagcattccaaaaggattcccgcaagacgcccagcacggcaatatcagtcttggatctgtctatgaaagataccgtgcaatcattcgttgattcggcagccaagacgctctcagctaaactaccaagccacatgattccaaatttttgggttcctgtcgagacactccccgttcttgtctcaggtaaacttgacagaaaacgcgtatctacctggatcgagagtctcgacggacaaacgtgggcacaactaacagccctgactgagagatcggatgaaaacgaacaggatgaagcggaggaactaacagacgtagagagcactgtacggactctctggcatcagctcctcaacgtggacttatccaagatcaacagccgcagtgcattccttcagcttggtggcgattctatcaccgcaatgcagctgatgtccaaggctcgccaggctggcatccagctgagtatgctcaacatcaccaagacaaagaatcttagggaactagcgcagaccgccgtgtacattggcggcttggcaagcagcaactcggctgaacagtatgtcaaggaggaaaccatcttcgacctgtcgccgatccaacaaatgtttttccgtctgactccggagggaagcaatacttttgagcagagtcttttgttgaaactccgacgggagatctcttcctctacgcttggtgccgccttacagaccattgttcagcatcatgcccaacttcgagctcgttatgttcagatcggcagctcgtggaagcaacgtatcgcgcgtcacgactcatcggagactttcttagacgtgcaccatgttccggctgccgatattccacgcgtagcccttgaggcgaaacaaaaactggacttgaagaatgggcctgtgtttgcagcggaactcgtcgagacaggggacggacagtatctctacttgatagcgcatcatttgtgcgtggacttggtgtcttggaggatcattctgcaggacctcgaagatatttgcttgcgacatgttacgagtctgccaaagtccttgtcattccagacctggtcttctcttcaagccaaccattgctcgcagctagacgcgactcgatatcagaaacagaccgatgctttcgacgctgcttactggggcatagatgacacgattcgcaacgtggcttcggaatgcatgcgacatgaatttgtgctagatcaatcggtttcatcatctattcttcagcagtctaatgtgcccttcacgagcaagcctatagacatcttcctcgctgcggctatcacttctttcggtcgcatcttctctgaccgtagtgtccctactgtccatctcgagaatcatggacgcgagccttggagctctgacattgacattctgcgcacagtaggatggttcactaccttgctaccagtgtcactggacaaatctgacgctggcgacatatgcacagccgtgcgttccgccaaagattgtcgcagtcaattccaagacaatgggcttgttgcgttcgctcatgagcagtccaggaaaccatccgcggctaaatcgggcatggtcgaaatcacactcaactacaccggtcaattccagcaactagaaaacaaagacgcgctcttcgaggacgcaaatgtcgacttgacggcgcaagacacttccgaacgactctcagtctttaatatcagtgttcaagtgcgcaatggctgtctttcatttggtgttgccttccctcgccaatgccagaagcaagatctcattgcgcgttgggtcgaggagtaccagacgacccttcacgaagcagcaaatgtcttgcctactttgacccatacctacactcctggcgacttccccctgatgcaaaattctcatgacgatttccaaatcctcttgaagaaggttaagtcggtaaagatcgacatgcaaatggtggaggacatctttccatgctcgcccacgcaagttgatatgttacaaactgaagaaaatgcagttggacaccagatgacccgcctcaatttcaacatcgcgtccacttcaggccaactgattgacgtggctcgtcttcgctcggcattcacaaagcttattcagcgtcaccaggttctccgtacagtcctgatgccatcgcaggacgacgacgacgagttcttccaagtcgttttgcgtcagttctcgcctgatatccaggtcaaggtcacagaccagctcgatggccagtccaaccttacagatgctgtctacaagaagctacacagtggtcatccgccttatcaaatcactctcagccacgcaccctcaggagatgccgtcttgatctccgtagacatgagccacgctctcatggatggcaattcgatggctattctcatgcgggactggaagcttgcatacgaaggcaagctagtcggtggtatggcccctggatatcaggctctcgtgcgatacaatcaaaatcgttcgttccaagctgcaacggcctactgggcgagccatctctcaaagttgcagccattcctgttcccgctagacggttcggttgtcaagtcgcaacgtgaacaacggatgattcacctacactttcctgccattcagatactgaagaaggtgtgtcgcgatgcttccgtgacgctatccaacttcttccatgccgtctggtcaattgttctgcatctcgcgactggttcgcaggatgtcaacttcgcctacctggtatcaggccgcgatacgtccatcgaaggaattgaagatgcctttggaccctacttcggcactatgctgtctacgtaccatctcgaccgaacacagacgacgcgatcgatattacaagccgtacagtcaaccatgacggagcgccttcctttccaggatctctcgtggcctgccatgcgatcgcgtctgcagatttcgaaagatgagcctatgtacaatacccaggtcaacatccaccagttcgcacccctcgaacgaagggaagatggcgacttgaagatcactaccaagcctggctttgaccctcttgcacatgacatggaattcaccggcaagatcgatagcgaagtgcatttggtcatcgcctactggagcagtagcttcactgatgagaccgcccaaagagtagcggactcggttgagcgtgtcgtggagactactgtgcaaggattggattccactgtcggggatcttgaatactggacagatgatcaggcggtgcaggcatag

SEQ ID NO: 40 - protein, 5059 aa, Muscodor strobelii
  misc_feature: SGI Peptide ID NO. 559569
  misc_feature (236)..(637): Pfam Id: PF00501 Pfam Desc: AMP-binding enzyme
  misc_feature (1322)..(1726): Pfam Id: PF00501 Pfam Desc: AMP-binding enzyme
  misc_feature (2408)..(2815): Pfam Id: PF00501 Pfam Desc: AMP-binding enzyme
  misc_feature (3551)..(3964): Pfam Id: PF00501 Pfam Desc: AMP-binding enzyme
  misc_feature (1954)..(2228): Pfam Id: PF00668 Pfam Desc: Condensation domain
  misc_feature (4175)..(4464): Pfam Id: PF00668 Pfam Desc: Condensation domain
  misc_feature (859)..(1133): Pfam Id: PF00668 Pfam Desc: Condensation domain
  misc_feature (4630)..(4919): Pfam Id: PF00668 Pfam Desc: Condensation domain
  misc_feature (3037)..(3298): Pfam Id: PF00668 Pfam Desc: Condensation domain
  misc_feature (749)..(814): Pfam Id: PF00550 Pfam Desc: Phosphopantetheine attachment site
  misc_feature (1840)..(1905): Pfam Id: PF00550 Pfam Desc: Phosphopantetheine attachment site
  misc_feature (4092)..(4157): Pfam Id: PF00550 Pfam Desc: Phosphopantetheine attachment site
  misc_feature (4175)..(4339): Pfam Id: PF00668 Pfam Desc: Condensation domain
  misc_feature (4630)..(4908): Pfam Id: PF00668 Pfam Desc: Condensation domain
  misc_feature (3249)..(3298): Pfam Id: PF00668 Pfam Desc: Condensation domain
  misc_feature (4406)..(4464): Pfam Id: PF00668 Pfam Desc: Condensation domain
  misc_feature (3037)..(3107): Pfam Id: PF00668 Pfam Desc: Condensation domain
  misc_feature (2931)..(2969): Pfam Id: PF00550 Pfam Desc: Phosphopantetheine attachment site
  misc_feature (118)..(3329): NCBI GI: 270269268 Blast Desc: APS1 [Fusarium incarnatum]
  misc_feature (857)..(4201): NCBI GI: 270269268 Blast Desc: APS1 [Fusarium incarnatum]
  misc_feature (4)..(2255): NCBI GI: 270269268 Blast Desc: APS1 [Fusarium incarnatum]
  misc_feature (166)..(3122): NCBI GI: 255954717 Blast Desc: Pc21g10790 [Penicillium chrysogenum Wisconsin 54-1255] gi|211589822|emb|CAP95976.1| Pc21g10790 [Penicillium chrysogenum Wisconsin 54-1255]
  misc_feature (142)..(3342): NCBI GI: 255954717 Blast Desc: Pc21g10790 [Penicillium chrysogenum Wisconsin 54-1255] gi|211589822|emb|CAP95976.1| Pc21g10790 [Penicillium chrysogenum Wisconsin 54-1255]
  misc_feature (854)..(4154): NCBI GI: 255954717 Blast Desc: Pc21g10790 [Penicillium chrysogenum Wisconsin 54-1255] gi|211589822|emb|CAP95976.1| Pc21g10790 [Penicillium chrysogenum Wisconsin 54-1255]
  misc_feature (109)..(1906): NCBI GI: 255954717 Blast Desc: Pc21g10790 [Penicillium chrysogenum Wisconsin 54-1255] gi|211589822|emb|CAP95976.1| Pc21g10790 [Penicillium chrysogenum Wisconsin 54-1255]
  misc_feature (1219)..(3369): NCBI GI: 255954717 Blast Desc: Pc21g10790 [Penicillium chrysogenum Wisconsin 54-1255] gi|211589822|emb|CAP95976.1| Pc21g10790 [Penicillium chrysogenum Wisconsin 54-1255]
  misc_feature (1954)..(5049): NCBI GI: 169623203 Blast Desc: SNOG_14834 [Phaeosphaeria nodorum SN15] gi|160704933|gb|EAT77686.2| SNOG_14834 [Phaeosphaeria nodorum SN15]
  misc_feature (124)..(1923): NCBI GI: 169623203 Blast Desc: SNOG_14834 [Phaeosphaeria nodorum SN15] gi|160704933|gb|EAT77686.2| SNOG_14834 [Phaeosphaeria nodorum SN15]
  misc_feature (105)..(2981): SWISSPROT Homolog: EC 5.1.1.11 Phenylalanine racemase (ATP-hydrolyzing)
MAVLQFTAKSLPSKGHVSKGALAATAWTVLSSKLSGSEEVVLNRNVLARKSDSPQCVVSVSREARLNAVVDCVSGASYANDGNRMWQFSLQLNSQSAASSTKMRLLVVETDSATGTPEKLAVDDNTRYMLLVVRPLADDTCDITLTVSSKAVTKTRSERLFQQFVHILDQLESVAEVDAAVIQDLGVVCSEDVSTIERWNATPVEPVLSCVHFAIESQARARPVAPAVCAWDGQLTYRELSYASNRLARQLVSYGVGPEVFVPVLFEKSVWAVVAMVAILKAGGAVVPLNPDHPKSRQQAILKDISASVILCSEMHSEVAQTLHGDVLVVSRTDIDALESHDASDLQDIRVGPNNPAFAVFTSGSTGQPKGIIIEHVAICTSMRDHGKTFRFGPDTRTIQFAAFTFDDSFSDIFTTLVFGGCICMPSDHGRLDDLAGCIREMNANYACLTVTVAAQLRPRDVPSLKTLIVGGESVTARVVQQWAEHVHLINSYGPAEASIFCSANAGMAYDDDPINIGIGVGCLLHITDVHDHNNLVPIGAIGELLIEGPILARSYIKNEAKTEASFITDPTWAVGTNLGPRRLYKTGDLARYNDDGTIQVLGRNDTQVKLYGQRIELGEIEHQIRREVGECREVAVEVLKHKKASGDEVPILAAFISMTEASNITGGSQGVEVMHDFLQASGKRLPKVLPSYMVPSVYIRVQDMPLMISGKLDRKKLHELASNLALVDGLSKGEDVDGLTAPETNSEKALQALWADVLGVDKKSIKKESNFFRLGGDSVAAMRLVTAARDAGSKISVRQIFQTPTLADQSLAVEFSHHVNAEIETVQKFSLLRNVEQTLDAALTAIQHHDPRIQKQALLDAYPCSPLQEGVAALSIRNAGSYVAQMAYKLSDDIDISRFKAAWDTVVKSEDILRTRIIQDHDDSALWQAVVDEQVPWLETYQGLQAYLDSDKKSTMALGSRLNRLAIVHSESGDDCWFVWTAHHALFDDDSLQMVLSAVERVYQGLDIEPHPQFNVFIKHIQEAGITATADFWRKELADPPPPSFPVLPSSVHLPSANRTIHRAVALDFLRGSETTASTLLRAAWAMLLAQYSESSEVVFGCTVNGRSVPLDRIDTIAGPTFATIPLRVMVNRDNGVQDFLRQIQDQYVAMMPHEQAGLQRIARWVPEARAACNFQSLLVVQAATDAPDGGSLLGAPELLGISSGFVTNALTAECRPSTDGHLNIQLHYDDRVILPAQAERLASQFDHILRQMHAAANVADGVTTIKQLDLVSEADMQDLAKWNNESPDERVDDMIHRGYYKHLGLQPSMPAAEDYDSSITFAELEALSNRLAQSLVAQFGTQNGQFVALCVEKSVFTVIAALAIVKMGGALAMLDPSLPVDRLHHMLNISKASFILYSTTSAAKLRSSISLHSFAADRSFLESLPPVETFQVAIDPSSPACIVFTSGSTGVPKGTIFSHTSWLSGTRQLARVGGMEEHRPLRVLQFAGMSFDICIFEIMSTISFGGCVCMVPDNERTSEGVVRAMNRLRVSWAFLIPTFASLIDRSALSTLRTLIIGGETFDPNLFTSFPPHVQLMEAYGPSECTPITFLNTNPHPNRPRNVGRAVVGSGWIVDPDDHHRLAPIGAVGELILSGPNIGGGYLGDSVRTAQSFVQLPQWTKHFPALQNGRHIYLTGDLFRYESDGSLIFVGRKDTQVKLRGQRIELGEIEHHLRQLVPQAKTVVVESIQPKDQNRKMLVAFLSVPSLSTATDPDTILLPPEVLDLIDLRTVVDRLGTALPRYMVPNAFLPVQRLPFMATSSKVDRKALRAICDQLETASFRPYTIQHRNKKAPSSPIEAKLRELFARVLQIEEQSVGVNDSFILLGGDSIDAMRLVSLARAASLPLTVAKIFEQPILEELAEYLAALKESDPTVGGEPDSSIANWELLGDSQSIEIVRREALKQCQLSSEDVIEDGYPCTALQQGLLALSIARPGTYFARHVFTASSSVTADNLKNAFDKLAASLAIFRTRIIQLPSSELVQVVTREPIEWTEMKNLDEYIQQDKMTPFELGSRLNRFALIQSDTSSSPMVVWTAHHSVYDGFSIPLVVEALELAIAAGLDDDFAHTADFRQYIKYITDANEETCRDYWTKQFSDGTFAEFPSATSQVGDSVERDLVVEKAPYSQTLTSVTVSSIVRAAWALTLSRYTGSTDTVFGATLSGRDAAVQNITDIIGPTISTVPVRIKVDDKMDVEAFVTAIHQQAVEMIDYQHFGLRNIGQCSAEASSAAQFQNLLVMDPSSFGKESDLISHRFADDDGSQTHTYPLVVNCSATSDDLEVKALFNSNTIEPGQAQRILRVFVGFIQQIAKASPETRLSEIIRTQQLDVDTLHRWNATVPHSIEKCIHQAVQFKVLSDKLAIRSWDGDVTYAELDAWSTKIALHLISLGCKPETMVPMCFRRSLWAMVATYGVWKAGGAPVFLNADFPISRINSMLEFLDSDMLLTSENMFPDEKPALKHMIEINQGMVSSVVDSAAGPITKTRNVPLPEIRPDNLGFASFTSGTTGVPKCILLEHRHILSCFSRLVDAGEFRPSARCLSFAAYTFDAMMKDFIATPMFGGTLYMPSDDDRMNHLPAYINKHQITQATVTPTIASLFEPTDVPSLELLILAGEKMTTGNISTWAPSVHLNNAYGPSEAAGRATVNSRLTADSDPSNIGRAVGCVCWIVDPEDHNILVPIGATGELVIEGPTVSRGYFKNPEKTANAFISAPSWVPAERRHASNRLYKTGDLASQNPDGTFKIIGRKDAQVKLHGQRIELEEVESAFKQHLPASVAMVVEMVTTQSGASLLAAFLHDKKSEQPKNSALQFLNPDTTMLSDIDLRQICHNVRQTLPPYMIPSVFLAVSRIPLSPSAKTDRKVLRDLYSNTTADVITAHSLASGTSLQAPANARQEQLRALVSSVLRLEESSIGMNQSFSQLGGDSITAMRLVAVARSNNIGLTVADILLGASLGDLDGNSVDLGDAAATEKVNPFELVQDANLNDLIAEVAVQCTARNDQIEDIYPCTPLQEALMALSIQQEGDYIARHEIELAAHVNFAELKSAFDTLTRNFPILRTRIVQTSRGLLQVVMKEGSQWSKGAVSSQTHVQMGLGEPLNRLVFQESPTKSMLWFSHHATYDGVSSPMILNLLEQVYHGAPLDPSAIADYRNFIKYTSSLSTKASEKFWTSQLADASPERFPPVVPGETQLDVSGRIEKHVNTWIASPTQAAIRAAWAIVLAAYTSSDEVVFGTILSGRNAPVHNIDRMAGPTIATVPIRVGIDRDEQPQALLARLQRQAVDMIPHEHFGLQNIQRTSEIARDACDFRNLLVVHPPPKDAPRQITSSASTPPVMTPGEISSSASTTSESLGSFQLVPASPSTHSSASTAPDEKELPVVFQPLIFLQGKEHSFASSLDMNTYPLVLEVQTQHDGYSLEVSYDASIVNDAQTERIVNQFEHVLAQLSAHQTQYGHEKSATSASKIGELELASPEDMQHLWRLNDSISDAIDDGVHEIVRQRAKDSPNAEAVVSWDGKMTYRELDEASSILAHDIVAKTRGQTGSYVALCFEKSIWAVVSMLAVLKAGKAFVQLDPTYPMDRLRHITSALDPVLGISSPTKFELCQGLVSNTMVFESSKFDELKQSGIGRDADNNVTPPVVVISPRDPMCVIFSSGTTGTPKGGILSHRSFATSNLRNGELLGMTSTTRCLQFASCSFDVQLFETFTTLMLGGCVCVPHDDNRNMDIDKEISRMNVNFALLTPSFAALFSPDAFPSLKSLVLVGEAVTATLVNTWSPKLGLYIAYGPSECSVCCTVTPRMGLNSTPENLGARSSCALWIVDPENHNRLAPLGAPGELLVEGHNVGEGYVNNPELTKAVYIDAPTWWHPRDHSVTAAPPSRFYRSGDIVKYAEDGSILFLRRKDTQTKIRGQRVEMGDVENHLAEVPELGHSMALIPKTGPLMKRLVAVFSTERTGAFQKDSRKTPSTAISVLDLSMKDTVQSFVDSAAKTLSAKLPSHMIPNFWVPVETLPVLVSGKLDRKRVSTWIESLDGQTWAQLTALTERSDENEQDEAEELTDVESTVRTLWHQLLNVDLSKINSRSAFLQLGGDSITAMQLMSKARQAGIQLSMLNITKTKNLRELAQTAVYIGGLASSNSAEQYVKEETIFDLSPIQQMFFRLTPEGSNTFEQSLLLKLRREISSSTLGAALQTIVQHHAQLRARYVQIGSSWKQRIARHDSSETFLDVHHVPAADIPRVALEAKQKLDLKNGPVFAAELVETGDGQYLYLIAHHLCVDLVSWRIILQDLEDICLRHVTSLPKSLSFQTWSSLQANHCSQLDATRYQKQTDAFDAAYWGIDDTIRNVASECMRHEFVLDQSVSSSILQQSNVPFTSKPIDIFLAAAITSFGRIFSDRSVPTVHLENHGREPWSSDIDILRTVGWFTTLLPVSLDKSDAGDICTAVRSAKDCRSQFQDNGLVAFAHEQSRKPSAAKSGMVEITLNYTGQFQQLENKDALFEDANVDLTAQDTSERLSVFNISVQVRNGCLSFGVAFPRQCQKQDLIARWVEEYQTTLHEAANVLPTLTHTYTPGDFPLMQNSHDDFQILLKKVKSVKIDMQMVEDIFPCSPTQVDMLQTEENAVGHQMTRLNFNIASTSGQLIDVARLRSAFTKLIQRHQVLRTVLMPSQDDDDEFFQVVLRQFSPDIQVKVTDQLDGQSNLTDAVYKKLHSGHPPYQITLSHAPSGDAVLISVDMSHALMDGNSMAILMRDWKLAYEGKLVGGMAPGYQALVRYNQNRSFQAATAYWASHLSKLQPFLFPLDGSVVKSQREQRMIHLHFPAIQILKKVCRDASVTLSNFFHAVWSIVLHLATGSQDVNFAYLVSGRDTSIEGIEDAFGPYFGTMLSTYHLDRTQTTRSILQAVQSTMTERLPFQDLSWPAMRSRLQISKDEPMYNTQVNIHQFAPLERREDGDLKITTKPGFDPLAHDMEFTGKIDSEVHLVIAYWSSSFTDETAQRVADSVERVVETTVQGLDSTVGDLEYWTDDQAVQA

SEQ ID NO: 41 - DNA, 5214 bp, Muscodor strobelii
  misc_feature: SGI EST ID NO. CUFF.433.0
  misc_feature: Variant of the nucleotide sequence at SEQ ID NO 39
cacgccccctgtcgttgtcatcagcccacgcgatcccatgtgtgttatcttctcctctggaacgacgggtacaccaaagggtggtattctttcccaccgttcttttgccacgtccaatctacggaatggcgagttacttggaatgacctctacgacgagatgccttcaattcgcatcatgcagctttgatgtccagcttttcgagaccttcaccacccttatgctcggtggctgcgtctgtgtacctcatgatgacaatcgcaacatggacatcgacaaggagatcagtcgcatgaacgtcaactttgcactattgaccccgtctttcgctgcgctgttctctcctgatgctttcccgtcgctcaagtcgctagtgctcgtcggcgaagctgtcaccgcgaccctagtgaacacctggagccccaaactcggcctttacattgcttacgggcctagcgaatgcagcgtctgctgtaccgtgacacccaggatgggtttgaattcgacacctgagaatctcggcgcccggtctagctgcgcactctggattgtcgatccggaaaaccacaaccgcctcgctcctcttggtgcacccggcgagctgctcgttgaaggtcacaatgttggcgaaggctatgtgaacaatccagagttgaccaaggccgtctacattgatgcgcccacgtggtggcatcctcgcgaccattcggtcaccgctgctccgcccagcagattctaccggtctggagatatcgtcaaatacgccgaagatggctctattctgttcctccgccgtaaagatacgcagacaaagatccgcggccagcgagtcgagatgggcgacgtagagaatcacttggccgaagtgcccgagctcggacacagcatggccttgataccgaagactggaccattgatgaaacgtcttgttgcagttttcagcaccgagagaactggagcattccaaaaggattcccgcaagacgcccagcacggcaatatcagtcttggatctgtctatgaaagataccgtgcaatcattcgttgattcggcagccaagacgctctcagctaaactaccaagccacatgattccaaatttttgggttcctgtcgagacactccccgttcttgtctcaggtaaacttgacagaaaacgcgtatctacctggatcgagagtctcgacggacaaacgtgggcacaactaacagccctgactgagagatcggatgaaaacgaacaggatgaagcggaggaactaacagacgtagagagcactgtacggactctctggcatcagctcctcaacgtggacttatccaagatcaacagccgcagtgcattccttcagcttggtggcgattctatcaccgcaatgcagctgatgtccaaggctcgccaggctggcatccagctgagtatgctcaacatcaccaagacaaagaatcttagggaactagcgcagaccgccgtgtacattggcggcttggcaagcagcaactcggctgaacagtatgtcaaggaggaaaccatcttcgacctgtcgccgatccaacaaatgtttttccgtctgactccggagggaagcaatacttttgagcagagtcttttgttgaaactccgacgggagatctcttcctctacgcttggtgccgccttacagaccattgttcagcatcatgcccaacttcgagctcgttatgttcagatcggcagctcgtggaagcaacgtatcgcgcgtcacgactcatcggagactttcttagacgtgcaccatgttccggctgccgatattccacgcgtagcccttgaggcgaaacaaaaactggacttgaagaatgggcctgtgtttgcagcggaactcgtcgagacaggggacggacagtatctctacttgatagcgcatcatttgtgcgtggacttggtgtcttggaggatcattctgcaggacctcgaagatatttgcttgcgacatgttacgagtctgccaaagtccttgtcattccagacctggtcttctcttcaagccaaccattgctcgcagctagacgcgactcgatatcagaaacagaccgatgctttcgacgctgcttactggggcatagatgacacgattcgcaacgtggcttcggaatgcatgcgacatgaatttgtgctagatcaatcggtttcatcatctattcttcagcagtctaatgtgcccttcacgagcaagcctatagacatcttcctcgctgcggctatcacttctttcggtcgcatcttctctgaccgtagtgtccctactgtccatctcgagaatcatggacgcgagccttggagctctgacattgacattctgcgcacagtaggatggttcactaccttgctaccagtgtcactggacaaatctgacgctggcgacatatgcacagccgtgcgttccgccaaagattgtcgcagtcaattccaagacaatgggcttgttgcgttcgctcatgagcagtccaggaaaccatccgcggctaaatcgggcatggtcgaaatcacactcaactacaccggtcaattccagcaactagaaaacaaagacgcgctcttcgaggacgcaaatgtcgacttgacggcgcaagacacttccgaacgactctcagtctttaatatcagtgttcaagtgcgcaatggctgtctttcatttggtgttgccttccctcgccaatgccagaagcaagatctcattgcgcgttgggtcgaggagtaccagacgacccttcacgaagcagcaaatgtcttgcctactttgacccatacctacactcctggcgacttccccctgatgcaaaattctcatgacgatttccaaatcctcttgaagaaggttaagtcggtaaagatcgacatgcaaatggtggaggacatctttccatgctcgcccacgcaagttgatatgttacaaactgaagaaaatgcagttggacaccagatgacccgcctcaatttcaacatcgcgtccacttcaggccaactgattgacgtggctcgtcttcgctcggcattcacaaagcttattcagcgtcaccaggttctccgtacagtcctgatgccatcgcaggacgacgacgacgagttcttccaagtcgttttgcgtcagttctcgcctgatatccaggtcaaggtcacagaccagctcgatggccagtccaaccttacagatgctgtctacaagaagctacacagtggtcatccgccttatcaaatcactctcagccacgcaccctcaggagatgccgtcttgatctccgtagacatgagccacgctctcatggatggcaattcgatggctattctcatgcgggactggaagcttgcatacgaaggcaagctagtcggtggtatggcccctggatatcaggctctcgtgcgatacaatcaaaatcgttcgttccaagctgcaacggcctactgggcgagccatctctcaaagttgcagccattcctgttcccgctagacggttcggttgtcaagtcgcaacgtgaacaacggatgattcacctacactttcctgccattcagatactgaagaaggtgtgtcgcgatgcttccgtgacgctatccaacttcttccatgccgtctggtcaattgttctgcatctcgcgactggttcgcaggatgtcaacttcgcctacctggtatcaggccgcgatacgtccatcgaaggaattgaagatgcctttggaccctacttcggcactatgctgtctacgtaccatctcgaccgaacacagacgacgcgatcgatattacaagccgtacagtcaaccatgacggagcgccttcctttccaggatctctcgtggcctgccatgcgatcgcgtctgcagatttcgaaagatgagcctatgtacaatacccaggtcaacatccaccagttcgcacccctcgaacgaagggaagatggcgacttgaagatcactaccaagcctggctttgaccctcttgcacatgacatggaattcaccggcaagatcgatagcgaagtgcatttggtcatcgcctactggagcagtagcttcactgatgagaccgcccaaagagtagcggactcggttgagcgtgtcgtggagactactgtgcaaggattggattccactgtcggggatcttgaatactggacagatgatcaggcggtgcaggcatagggacttattgggatacatcgttggatcttcgagagagttagacgagacattcggccaaaggtcggattgaatatggccattttctttgttttattttgtaccatttcgagtgtattttttatcgcatgtcacttgatacgtcaaaactgcagaaccgacgaatattgataacaataaataaccattatctaccaaaacgagtgtccaatggcattcttcctcgcatatgtcctatcgcctgctcttcttgctctcattctcaatcatccctaacatgtgcctaacatatgctaaatctactggaagaaccagttgataccaacaacgccctggtcaaggggagcaatgtcgtcaaagatggcaggcgaagcatcaacaccgccggcgccacagccagggcagagatcgacaaccatgccggcggtttgcttgccatttccttggatcgtgatccacctgtcatcatgtcagcttctgggagtgttgagatgaaggatgttacatactggccgcagtgggcgccattagcataatcggcagtgttcagcgcgaccacggcctgatcggcgttgttggtgaagccgcaagctccgaggcccttcctcgtgtcaataagggtgaacatgaacgtggagtgatgtgtagatggccgagaagttactcacaggctcgtaaaaggtcatctgaccagaggtggcagcggcagaggcagccaagactgcgacggcagcgatgatgctggtgatgggagacatggtgtcgttattggggggtaattggctaaagttgagagttttgaatgtagtgaaactggaatcgaagctgaagatgatgtttttgtgtcctggaaagcgggtgaagtcctgtctctttatactcgagacatcgcgcccacctctcgttgtttcctgtatacaatataggcctctttggagtccaagtgagatatcacacatcgaacgacccaacaccggtagttctggatcgaagtcatcacgaaacgtaacgcatattacctcagatgtcgactagga

SEQ ID NO: 42 - DNA, 342 bp, Muscodor strobelii
  misc_feature: SGI cDNA ID NO. 559570
  misc_feature: Elevated expression when VOC is produced
  misc_feature: Encodes the peptide sequence at SEQ ID NO 43
atgtctcccatcaccagcatcatcgctgccgtcgcagtcttggctgcctctgccgctgccacctctggtcagatgaccttttacgagcctggcctcggagcttgcggcttcaccaacaacgccgatcaggccgtggtcgcgctgaacactgccgattatgctaatggcgcccactgcggccagtggatcacgatccaaggaaatggcaagcaaaccgccggcatggttgtcgatctctgccctggctgtggcgccggcggtgttgatgcttcgcctgccatctttgacgacattgctccccttgaccagggcgttgttggtatcaactggttcttccagtag

SEQ ID NO: 43 - protein, 113 aa, Muscodor strobelii
  misc_feature: SGI Peptide ID NO. 559570
  misc_feature (45)..(110): Pfam Id: PF03330 Pfam Desc: Rare lipoprotein A (RlpA)-like double-psi beta-barrel
  misc_feature (6)..(112): NCBI GI: 55700561 Blast Desc: riboflavin-aldehyde forming enzyme [Agaricus bisporus]
  misc_feature (6)..(112): NCBI GI: 55651507 Blast Desc: riboflavin aldehyde-forming enzyme [Agaricus bisporus]
  misc_feature (1)..(110): NCBI GI: 169854491 Blast Desc: CC1G_01597 [Coprinopsis cinerea okayama7#130] gi|116505055|gb|EAU87950.1| CC1G_01597 [Coprinopsis cinerea okayama7#130]
  misc_feature (22)..(112): NCBI GI: 44885673 Blast Desc: riboflavin aldehyde-forming enzyme [Lentinula edodes]
  misc_feature (22)..(112): NCBI GI: 170115242 Blast Desc: expansin family protein [Laccaria bicolor S238N-H82] gi|164636292|gb|EDR00589.1| expansin family protein [Laccaria bicolor S238N-H82]
  misc_feature (4)..(110): NCBI GI: 170117527 Blast Desc: riboflavine-aldehyde-forming enzyme [Laccaria bicolor S238N-H82] gi|164635086|gb|EDQ99399.1| riboflavine-aldehyde-forming enzyme [Laccaria bicolor S238N-H82]
  misc_feature (14)..(112): NCBI GI: 58263466 Blast Desc: [Cryptococcus neoformans var. neoformans JEC21] gi|134108352|ref|XP_777127.1| CNBB3590 [Cryptococcus neoformans var. neoformans B-3501A] gi|50259812|gb|EAL22480.1| CNBB3590 var.
  misc_feature (22)..(112): NCBI GI: 242218011 Blast Desc: [Postia placenta Mad-698-R] gi|220726048|gb|EED80011.1| [Postia placenta Mad-698-R]
  misc_feature (21)..(112): NCBI GI: 169854141 Blast Desc: CC1G_10812 [Coprinopsis cinerea okayama7#130] gi|116505144|gb|EAU88039.1| CC1G_10812 [Coprinopsis cinerea okayama7#130]
  misc_feature (24)..(112): NCBI GI: 170094028 Blast Desc: expansin family protein [Laccaria bicolor S238N-H82] gi|164646689|gb|EDR10934.1| expansin family protein [Laccaria bicolor S238N-H82]
  misc_feature: Useful for introducing or modulating the production of volatile compounds
MSPITSIIAAVAVLAASAAATSGQMTFYEPGLGACGFTNNADQAVVALNTADYANGAHCGQWITIQGNGKQTAGMVVDLCPGCGAGGVDASPAIFDDIAPLDQGVVGINWFFQ

SEQ ID NO: 44 - DNA, 3001 bp, Muscodor strobelii
  misc_feature: SGI EST ID NO. CUFF.434.1
  misc_feature: Variant of the nucleotide sequence at SEQ ID NO 42
gcgcgatgtctcgagtataaagagacaggacttcacccgctttccaggacacaaaaacatcatcttcagcttcgattccagtttcactacattcaaaactctcaactttagccaattaccccccaataacgacaccatgtctcccatcaccagcatcatcgctgccgtcgcagtcttggctgcctctgccgctgccacctctggtcagatgaccttttacgagcctggcctcggagcttgcggcttcaccaacaacgccgatcaggccgtggtcgcgctgaacactgccgattatgctaatggcgcccactgcggccagtggatcacgatccaaggaaatggcaagcaaaccgccggcatggttgtcgatctctgccctggctgtggcgccggcggtgttgatgcttcgcctgccatctttgacgacattgctccccttgaccagggcgttgttggtatcaactggttcttccagtagatttagcatatgttaggcacatgttagggatgattgagaatgagagcaagaagagcaggcgataggacatatgcgaggaagaatgccattggacactcgttttggtagataatggttatttattgttatcaatattcgtcggttctgcagttttgacgtatcaagtgacatgcgataaaaaatacactcgaaatggtacaaaataaaacaaagaaaatggccatattcaatccgacctttggccgaatgtctcgtctaactctctcgaagatccaacgatgtatcccaataagtccctatgcctgcaccgcctgatcatctgtccagtattcaagatccccgacagtggaatccaatccttgcacagtagtctccacgacacgctcaaccgagtccgctactctttgggcggtctcatcagtgaagctactgctccagtaggcgatgaccaaatgcacttcgctatcgatcttgccggtgaattccatgtcatgctagagaagaacaggtcagtcaatcgattgtgtcaaatgtcgtcgtatcgggaggaactcactgcaagagggtcaaagccaggcttggtagtgatcttcaagtcgccatcttcccttcgttcgaggggtgcgaactggtggatgttgacctgggtattgtacataggctcatctttcgaaatctgcagacgcgatcgcatggcaggccacgagagatcctggaaaggaaggcgctccgtcatggttgactgtacggcttgtaatatcgatcgcgtcgtctgtgttcggtcgagatggtacgtagacagcatagtgccgaagtagggtccaaaggcatcttcaattccttcgatggacgtatcgcggcctgataccaggtaggcgaagttgacatcctgcgaaccagtcgcgagatgcagaacaattgaccagacggcatggaagaagttggatagcgtcacggaagcatcgcgacacaccttcttcagtatctgaatggcaggaaagtgtaggtgaatcatccgttgttcacgttgcgacttgacaaccgaaccgtctagcgggaacaggaatggctgcaactttgagagatggctcgcccagtaggccgttgcagcttggaacgaacgattttgattgtatcgcacgagagcctgatatccaggggccataccaccgactagcttgccttcgtatgcaagcttccagtcccgcatgagaatagccatcgaattgccatccatgagagcgtggctcatgtctacggagatcaagacggcatctcctgagggtgcgtggctgagagtgatttgataaggcggatgaccactgtgtagcttcttgtagacagcatctgtaaggttggactggccatcgagctggtctgtgaccttgacctggatatcaggcgagaactgacgcaaaacgacttggaagaactcgtcgtcgtcgtcctgcgatggcatcaggactgtacggagaacctggtgacgctgaataagctttgtgaatgccgagcgaagacgagccacgtcaatcagttggcctgaagtggacgcgatgttgaaattgaggcgggtcatctggtgtccaactgcattttcttcagtttgtaacatatcaacttgcgtgggcgagcatggaaagatgtcctccaccatttgcatgtcgatctttaccgacttaaccttcttcaagaggatttggaaatcgtcatgagaattttgcatcagggggaagtcgccaggagtgtaggtatgggtcaaagtaggcaagacatttgctgcttcgtgaagggtcgtctggtactcctcgacccaacgcgcaatgagatcttgcttctggcattggcgagggaaggcaacaccaaatgaaagacagccattgcgcacttgaacactgatattaaagactgagagtcgttcggaagtgtcttgcgccgtcaagtcgacatttgcgtcctcgaagagcgcgtctttgttttctagttgctggaattgaccggtgtagttgagtgtgatttcgaccatgcccgatttagccgcggatggtttcctggactgctcatgagcgaacgcaacaagcccattgtcttggaattgactgcgacaatctttggcggaacgcacggctgtgcatatgtcgccagcgtcagatttgtccagtgacactggtagcaaggtagtgaaccatcctactgtgcgcagaatgtcaatgtcagagctccaaggctcgcgtccatgattctcgagatggacagtagggacactacggtcagagaagatgcgaccgaaagaagtgatagccgcagcgaggaagatgtctataggcttgctcgtgaagggcacattagactgctgaagaatagatgatgaaaccgattgatctagcacaaattcatgtcgcatgcattccgaagccacgttgcgaatcgtgtcatctatgccccagtaagcagcgtcgaaagcatcggtctgtttctgatatcgagtcgcgtctagctgcgagcaatggttggcttgaagagaag

SEQ ID NO: 45 - DNA, 1230 bp, Muscodor strobelii
  misc_feature: SGI cDNA ID NO. 559571
  misc_feature: Reduced expression when VOC is produced
  misc_feature: Encodes the peptide sequence at SEQ ID NO 46
atggcggtgatcgacagcgtccccggcatctcagtgatcatcaagatcaacggcgcggcagtcaaagagcacgatgtccctccttacgatagaacacttattgctgaagagtggcccggcctccaccaacgcattccgagacacgggcgaagaaaaggatacgagaaagtagatcacggacatgtcgcaaaatacatcgcggtagagtccggcgcagaacctcaagtaatcgttaccaagtcccccgaatttaaacatcacggccaccatatcgctgctgccgttcactttgatcaggagcaattgtgcccgcagcacgagcttgccagtgaagtcgaccaggagtggacaagcgtaacagacagcgtcctgactcgtggcccatatggaaggctccagcaacgtcggttccaattcggagacttatccaaggtggccgccttgacacgcacagcactcgaatttgagcaagacgaggcaagagcagcagacctgggcaggatccgcgtgcttctataccacatgaaggagagccagcccaaggacaacagctggtaccaatacgacctcaaagaagccatcgacaccatcgccgaggaggccgtcaaggctaagtctacatcccattacatcaccgcagaaccgtcgcaagatgtgagtggtgaattagaaaccgaattagaagacgtgttccttcacacagcgggtcgtcctttcgctatctacgacttctactaccgctcagaagagactctcatcaaattgtggatcgtctcaaagaagcaactggaggaagagaagcggaaaaacatgacgaatgaacaattgctcgaagcactgcagaaacgagatgacgactacgatcgaagccgcgatgatttggaggaggcgcgtgcacggatcgtcaagctcgagaaggagcgtgagtatcgcatatcagagactcgaatcaagcgtgagccatctcttgagtccactagaccacttcccaggcctattagacgtgatgcccctcctaagatcaagccggaagccactgagcgtatccagattaagagggaaggactagaaatgatcatgaagcgcgagagatcacccgatgaagaggagagcgtttcgaagagacgtgtgtttatcaagcaagagaagatcgacgacgatatgaacgttaagcaagaggaagagacagagggtaagtggaagggaaacatcgtgattgatttgacttag

SEQ ID NO: 46 - protein, 409 aa, Muscodor strobelii
  misc_feature: SGI Peptide ID NO. 559571
  misc_feature (1)..(283): NCBI GI: 171694682 Blast Desc: protein product [Podospora anserina] gi|170947583|emb|CAP59744.1| protein product [Podospora anserina]
  misc_feature (1)..(255): NCBI GI: 116182828 Blast Desc: [Chaetomium globosum CBS 148.51] gi|88186339|gb|EAQ93807.1| [Chaetomium globosum CBS 148.51]
  misc_feature (1)..(260): NCBI GI: 156054812 Blast Desc: SS1G_06254 [Sclerotinia sclerotiorum 1980] gi|154704034|gb|EDO03773.1| SS1G_06254 [Sclerotinia sclerotiorum 1980]
  misc_feature (9)..(268): NCBI GI: 39972059 Blast Desc: [Magnaporthe grisea 70-15] gi|145019861|gb|EDK04089.1| [Magnaporthe grisea 70-15]
  misc_feature: Useful for introducing or modulating the production of volatile compounds
MAVIDSVPGISVIIKINGAAVKEHDVPPYDRTLIAEEWPGLHQRIPRHGRRKGYEKVDHGHVAKYIAVESGAEPQVIVTKSPEFKHHGHHIAAAVHFDQEQLCPQHELASEVDQEWTSVTDSVLTRGPYGRLQQRRFQFGDLSKVAALTRTALEFEQDEARAADLGRIRVLLYHMKESQPKDNSWYQYDLKEAIDTIAEEAVKAKSTSHYITAEPSQDVSGELETELEDVFLHTAGRPFAIYDFYYRSEETLIKLWIVSKKQLEEEKRKNMTNEQLLEALQKRDDDYDRSRDDLEEARARIVKLEKEREYRISETRIKREPSLESTRPLPRPIRRDAPPKIKPEATERIQIKREGLEMIMKRERSPDEEESVSKRRVFIKQEKIDDDMNVKQEEETEGKWKGNIVIDLT

SEQ ID NO: 47 - DNA, 4392 bp, Muscodor strobelii
  misc_feature: SGI EST ID NO. CUFF.763.1
  misc_feature: Variant of the nucleotide sequence at SEQ ID NO 45
gcaaaccaccaatttccacagcccactacaacctcgaccccacgtctcccgcgtcacaaccccgtccacatcgccccgacactcacgactgtatcagaaagtgacgaccgcgatcatgggggaagagaacgatccggtcaaggacgccgagtcgcactcggaatctgagagcggctccgagtcggagaacgagcagcccatcccctcgtccatcctcaagaagacctcagcgcccgcgccagcacaggaggagaggccgccgctgccgccgcagaccgaccccaaggacctcgacatcgccgccctcactcccaccaccctcgagatcatcgcgcgccaggccaccatcaacatcggcaccatcggccacgtcgcccacggcaagtccaccgtcgtcaaggccatctcgggcgtccagaccgtccgcttcaagaacgagctgatccgcaacatcaccatcaagctgggctatgccaacgccaagatctacaagtgcagcaacccagaatgccctcggcccacctgcttcagatcgtataggagcgatcagcgagtcgaccccccctgcgagcgcgagggatgtggagggacctatgagttgctgcggcacgtctctttcgtcgactgtcccggccacgatattctcatgagcaccatgttgtcaggtgccgctgtcatggacgcagcgctacttttggttgctggcaatgaaagctgtcctcagcctcagacgtccgagcatcttgcagccgtcgaaattatgaagctagagaacatcatcatcctccagaacaaggtcgatctcataaaaaatgaggtcgccttgaaacatcaagaatcaatccagcagtttatccgtggcactgtcgccagcaagtctcccatcatccccatctccgcccagctcaagatcaacatcgacgccatcaatgatgcccttgtcaacatccccgttcctccccgcgacttctccatggatccatacatgatggtcatccgatccttcgatgtcaacaagcccggtgccgacatcgatgagctaaaaggtggtgtcgcgggtggcagtatcttgcacggcatgttgaagctgggcgacgaagtcgagatccgacctggtattgtcactcgtgatgagaagggcaacctcaagtgtacccccatcttcagccgcattgtgtccctcaactccgaggccaacgacttgaagtatgctgttcctggtggtcttatcggtgtcggtacacgcatcgaccccaccctgtgcagagccgatcgtctggtcgggtttgtcttgggtctgaagggaagatcccccgatatctacagccagatcgaggtcaacttttaccttcttcgacgtctcctgggtgtggccgatggcaagcagcgcaaggtcgagaaactggccaagaacgaggttctcatggtgaacatcggctccacttcaacaggtgccaaggttgcggctatcaagcgagatgccgctaagcttcttctcacgagtccggcatgtacagatgttggagagaaaatcgcccttagtcgacgtatcgacaagcattggcgtctgattggatgggctaccatcacggccggcgatatcttggagccatccaaataagctacgagaatgacgggatatgaaatgaaaacggcgaaaaagtcctcatgtagatccaatagtcgggcttttggtcgctcaaaaatgaagcacatgtgaaacgatcttcctgtgttcagatattcatgagactgtgatcagactactgactactctcagacttgctccttgttaacaccatacagactctcattccaattgctattcggaagttgatgctgatactgaaccatagattatgcgacatactcggcgcgatggcatctcgccacgatacacttatcctccatagcctatctgcaccttcctcccagtaggattcaacactgatacgcagaaaaatccagagcgttcatccctaactatccccacccttattcagattgtgatacagatctcgattaactgatcgtacaccgcatttagcatattctaggttccctcatatccttcagttggccactccttctagtttcagccatgtatccccgacatcgtctcgtataagacattacagttttgagcatcacatcatggttgtttccttccaccgtgttccatggcagagatgctcaactagcagctacgcggcagttgcaacaacaatatctacacttctaccgcaaatctctcgttctgcagtctacatcttttgtctttcactcagccaccatcctcttggcggcctcgtccgagatctcatctacacacctcgatcattcctcgtccttgagagtacctttgatttggtgactattctgagacatatttcatacacttcgtttcactacatcaacatggcggtgatcgacagcgtccccggcatctcagtgatcatcaagatcaacggcgcggcagtcaaagagcacgatgtccctccttacgatagaacacttattgctgaagagtggcccggcctccaccaacgcattccgagacacgggcgaagaaaaggatacgagaaagtagatcacggacatgtcgcaaaatacatcgcggtagagtccggcgcagaacctcaagtaatcgttaccaagtcccccgaatttaaacatcacggccaccatatcgctgctgccgttcactttgatcaggagcaattgtgcccgcagcacgagcttgccagtgaagtcgaccaggagtggacaagcgtaacagacagcgtcctgactcgtggcccatatggaaggctccagcaacgtcggttccaattcggagacttatccaaggtggccgccttgacacgcacagcactcgaatttgagcaagacgaggcaagagcagcagacctgggcaggatccgcgtgcttctataccacatgaaggagagccagcccaaggacaacagctggtaccaatacgacctcaaagaagccatcgacaccatcgccgaggaggccgtcaaggctaagtctacatcccattacatcaccgcagaaccgtcgcaagatgtgagtggtgaattagaaaccgaattagaagacgtgttccttcacacagcgggtcgtcctttcgctatctacgacttctactaccgctcagaagagactctcatcaaattgtggatcgtctcaaagaagcaactggaggaagagaagcggaaaaacatgacgaatgaacaattgctcgaagcactgcagaaacgagatgacgactacgatcgaagccgcgatgatttggaggaggcgcgtgcacggatcgtcaagctcgagaaggagcgtgagtatcgcatatcagagactcgaatcaagcgtgagccatctcttgagtccactagaccacttcccaggcctattagacgtgatgcccctcctaagatcaagccggaagccactgagcgtatccagattaagagggaaggactagaaatgatcatgaagcgcgagagatcacccgatgaagaggagagcgtttcgaagagacgtgtgtttatcaagcaagagaagatcgacgacgatatgaacgttaagcaagaggaagagacagagggtaagtggaagggaaacatcgtgattgatttgacttagccgggcttgggcgactgttgggatgtcttgatgaggtttacgtgcgccatatacggcatatggactattcgcgatgcatttcaatcgagaactaagttcagggagcttttcctgcgacaaacaacacatttgaagcgaatatatatggaatcgttacgaggaacgttagtattctatcattcgcgctcgggatggacatatggataagctccggacggcgaatggcttgtttctggaccgaggatgacagatgccgtgaattaatggcgatagttaatgcgggattgagaaatggatcaccacggcaagcatttcacaattcggtgtaccaaaagccgaaatttcgcgcatagtctccaagaatatgattattcgacgtcacgtgtaacctcagcttcgtcgtctattagctctccgcctttcttcgtcagctcagcctcgctgcaacgtttatgcggggctatctgaccaatatattcgcaaagtcctgcaagccaccggctgacgaccgatcgtccggggccaatgtgttgttcgacttttcgggaattccaagaatcgcaatacccggatatagctgagctgagtaagatggcatgcaggtaccgtcatttgccgccgttgaagcaatggctgatgactgaagtctattgcgttctgctagtattccggagacgtgcatgatctatatgaaacactccatatagctaaggtgctacatttgcacgtggttgccaagtcgca

SEQ ID NO: 48 - DNA, 1506 bp, Muscodor strobelii
  misc_feature: SGI cDNA ID NO. 559572
  misc_feature: Encodes the peptide sequence at SEQ ID NO 49
atgggggaagagaacgatccggtcaaggacgccgagtcgcactcggaatctgagagcggctccgagtcggagaacgagcagcccatcccctcgtccatcctcaagaagacctcagcgcccgcgccagcacaggaggagaggccgccgctgccgccgcagaccgaccccaaggacctcgacatcgccgccctcactcccaccaccctcgagatcatcgcgcgccaggccaccatcaacatcggcaccatcggccacgtcgcccacggcaagtccaccgtcgtcaaggccatctcgggcgtccagaccgtccgcttcaagaacgagctgatccgcaacatcaccatcaagctgggctatgccaacgccaagatctacaagtgcagcaacccagaatgccctcggcccacctgcttcagatcgtataggagcgatcagcgagtcgaccccccctgcgagcgcgagggatgtggagggacctatgagttgctgcggcacgtctctttcgtcgactgtcccggccacgatattctcatgagcaccatgttgtcaggtgccgctgtcatggacgcagcgctacttttggttgctggcaatgaaagctgtcctcagcctcagacgtccgagcatcttgcagccgtcgaaattatgaagctagagaacatcatcatcctccagaacaaggtcgatctcataaaaaatgaggtcgccttgaaacatcaagaatcaatccagcagtttatccgtggcactgtcgccagcaagtctcccatcatccccatctccgcccagctcaagatcaacatcgacgccatcaatgatgcccttgtcaacatccccgttcctccccgcgacttctccatggatccatacatgatggtcatccgatccttcgatgtcaacaagcccggtgccgacatcgatgagctaaaaggtggtgtcgcgggtggcagtatcttgcacggcatgttgaagctgggcgacgaagtcgagatccgacctggtattgtcactcgtgatgagaagggcaacctcaagtgtacccccatcttcagccgcattgtgtccctcaactccgaggccaacgacttgaagtatgctgttcctggtggtcttatcggtgtcggtacacgcatcgaccccaccctgtgcagagccgatcgtctggtcgggtttgtcttgggtctgaagggaagatcccccgatatctacagccagatcgaggtcaacttttaccttcttcgacgtctcctgggtgtggccgatggcaagcagcgcaaggtcgagaaactggccaagaacgaggttctcatggtgaacatcggctccacttcaacaggtgccaaggttgcggctatcaagcgagatgccgctaagcttcttctcacgagtccggcatgtacagatgttggagagaaaatcgcccttagtcgacgtatcgacaagcattggcgtctgattggatgggctaccatcacggccggcgatatcttggagccatccaaataa

SEQ ID NO: 49 - protein, 501 aa, Muscodor strobelii
  misc_feature: SGI Peptide ID NO. 559572
  misc_feature (311)..(394): Pfam Id: PF03144 Pfam Desc: Elongation factor Tu domain 2
  misc_feature (403)..(491): Pfam Id: PF09173 Pfam Desc: Initiation factor eIF2 gamma, C terminal
  misc_feature (75)..(280): Pfam Id: PF00009 Pfam Desc: Elongation factor Tu GTP binding domain
  misc_feature (14)..(500): NCBI GI: 116181656 Blast Desc: CHGG_01456 [Chaetomium globosum CBS 148.51] gi|88185753|gb|EAQ93221.1| CHGG_01456 [Chaetomium globosum CBS 148.51]
  misc_feature (5)..(499): NCBI GI: 171696184 Blast Desc: protein product [Podospora anserina] gi|170948334|emb|CAP60498.1| protein product [Podospora anserina]
  misc_feature (4)..(493): NCBI GI: 164427695 Blast Desc: eukaryotic translation initiation factor 2 gamma subunit [Neurospora crassa OR74A] gi|157071847|gb|EAA35230.2| eukaryotic translation initiation factor 2 gamma subunit crassa
  misc_feature (1)..(500): NCBI GI: 46124931 Blast Desc: FG06843.1 [Gibberella zeae PH-1]
  misc_feature (1)..(500): NCBI GI: 256732660 Blast Desc: [Nectria haematococca mpVI 77-13-4]
  misc_feature (5)..(500): NCBI GI: 145613496 Blast Desc: MGG_01592 [Magnaporthe grisea 70-15] gi|145020563|gb|EDK04692.1| MGG_01592 [Magnaporthe grisea 70-15]
  misc_feature (1)..(500): NCBI GI: 261356377 Blast Desc: eukaryotic translation initiation factor 2 subunit gamma [Verticillium albo-atrum VaMs.102]
  misc_feature (10)..(500): NCBI GI: 154289603 Blast Desc: BC1G_16041 [Botryotinia fuckeliana B05.10] gi|150849004|gb|EDN24197.1| BC1G_16041 [Botryotinia fuckeliana B05.10]
  misc_feature (10)..(500): NCBI GI: 156036308 Blast Desc: SS1G_12843 [Sclerotinia sclerotiorum 1980] gi|154698248|gb|EDN97986.1| SS1G_12843 [Sclerotinia sclerotiorum 1980]
  misc_feature (14)..(499): NCBI GI: 189205573 Blast Desc: eukaryotic translation initiation factor 2 subunit 3 [Pyrenophora tritici-repentis Pt-1C-BFP] gi|187975214|gb|EDU41840.1| eukaryotic translation initiation 2 3
MGEENDPVKDAESHSESESGSESENEQPIPSSILKKTSAPAPAQEERPPLPPQTDPKDLDIAALTPTTLEIIARQATINIGTIGHVAHGKSTVVKAISGVQTVRFKNELIRNITIKLGYANAKIYKCSNPECPRPTCFRSYRSDQRVDPPCEREGCGGTYELLRHVSFVDCPGHDILMSTMLSGAAVMDAALLLVAGNESCPQPQTSEHLAAVEIMKLENIIILQNKVDLIKNEVALKHQESIQQFIRGTVASKSPIIPISAQLKINIDAINDALVNIPVPPRDFSMDPYMMVIRSFDVNKPGADIDELKGGVAGGSILHGMLKLGDEVEIRPGIVTRDEKGNLKCTPIFSRIVSLNSEANDLKYAVPGGLIGVGTRIDPTLCRADRLVGFVLGLKGRSPDIYSQIEVNFYLLRRLLGVADGKQRKVEKLAKNEVLMVNIGSTSTGAKVAAIKRDAAKLLLTSPACTDVGEKIALSRRIDKHWRLIGWATITAGDILEPSK

SEQ ID NO: 50 - DNA, 4392 bp, Muscodor strobelii; identical to SEQ ID NO: 47
  misc_feature: SGI EST ID NO. CUFF.763.1
  misc_feature: Variant of the nucleotide sequence at SEQ ID NO 48

SEQ ID NO: 51 - DNA, 1008 bp, Muscodor strobelii
  misc_feature: SGI cDNA ID NO. 559573
  misc_feature: Encodes the peptide sequence at SEQ ID NO 52
atggccgtactcaaggatctgcccggcttgaaagctacgatccgggtcgatggcaaagatcttcaagagtacgacgatccgtacattgagatcctcgacgatgacgacgaactcgaactgcttgttacggctacccgagagaccgaccctgttgtcttgaatgttcgacacattcctcatgtggtgaagtatattgaagcagttccggggaaagcgttcagtatcgagtgggcaaaagagaaacagttcgacagtcgctgtaaccatcttggagtccaagttgagagggacggcctcaagaatgccatgtttcatgagcctctaaataagcgtcgagttgaatgggcttatggaattgagggcatgcaatatggacctattggcaataagcgataccggccttttcaattcgctgactttaagccggtgtcctccgaagattgcgacgagaatgccgtggaccgaagtatgacccaaagcaaagatctggggacgattcgcgttctgtggttcaaaatgaagcactgtccccccatgccccaaaccactaacgtatttggcacgtcggacaacactgttcatgagaaggcattgaaaggtcgagcattgtatgccaaagtgggatacggggctgaaatggctgacagcaatgtggtccctcgctttgaggacaattaccaagatccccagaaacagccttgcgcggtgttcgagtttagatacagaacaagagagggcctcatcgaagagcgaatcatcccccgtcctactccaatcgatggcatgaatgaagaacaacttcatgcatatgctctgaaactccatcgagagcgcgaggactctatcaagaacgaagagaagcccatcaggatcaagactgaaggcgctgactcaagctctcaatcacttaagagagtagcacctgacaacgagctgctaatactccctaaaagatacaaggagacgaaacgagacgacggcaagacggagatcgacttaagtgactga

SEQ ID NO: 52 - protein, 335 aa, Muscodor strobelii
  misc_feature: SGI Peptide ID NO. 559573
  misc_feature (1)..(335): NCBI GI: 171694682 Blast Desc: protein product [Podospora anserina] gi|170947583|emb|CAP59744.1| protein product [Podospora anserina]
  misc_feature (1)..(258): NCBI GI: 156054812 Blast Desc: SS1G_06254 [Sclerotinia sclerotiorum 1980] gi|154704034|gb|EDO03773.1| SS1G_06254 [Sclerotinia sclerotiorum 1980]
  misc_feature (1)..(268): NCBI GI: 116182828 Blast Desc: [Chaetomium globosum CBS 148.51] gi|88186339|gb|EAQ93807.1| [Chaetomium globosum CBS 148.51]
  misc_feature (1)..(335): NCBI GI: 85115224 Blast Desc: NCU08630 [Neurospora crassa OR74A] gi|28926633|gb|EAA35602.1| [Neurospora crassa OR74A]
  misc_feature (1)..(259): NCBI GI: 189195836 Blast Desc: conserved [Pyrenophora tritici-repentis Pt-1C-BFP] gi|187980135|gb|EDU46761.1| conserved [Pyrenophora tritici-repentis Pt-1C-BFP]
  misc_feature (1)..(334): NCBI GI: 169604476 Blast Desc: SNOG_05251 [Phaeosphaeria nodorum SN15] gi|111066522|gb|EAT87642.1| SNOG_05251 [Phaeosphaeria nodorum SN15]
  misc_feature (1)..(255): NCBI GI: 154320474 Blast Desc: [Botryotinia fuckeliana B05.10] gi|150853398|gb|EDN28590.1| [Botryotinia fuckeliana B05.10]
  misc_feature (6)..(294): NCBI GI: 39972059 Blast Desc: [Magnaporthe grisea 70-15] gi|145019861|gb|EDK04089.1| [Magnaporthe grisea 70-15]
  misc_feature (1)..(335): NCBI GI: 261356758 Blast Desc: [Verticillium albo-atrum VaMs.102]
  misc_feature (1)..(255): NCBI GI: 154315838 Blast Desc: [Botryotinia fuckeliana B05.10] gi|150846887|gb|EDN22080.1| [Botryotinia fuckeliana B05.10]
MAVLKDLPGLKATIRVDGKDLQEYDDPYIEILDDDDELELLVTATRETDPVVLNVRHIPHVVKYIEAVPGKAFSIEWAKEKQFDSRCNHLGVQVERDGLKNAMFHEPLNKRRVEWAYGIEGMQYGPIGNKRYRPFQFADFKPVSSEDCDENAVDRSMTQSKDLGTIRVLWFKMKHCPPMPQTTNVFGTSDNTVHEKALKGRALYAKVGYGAEMADSNVVPRFEDNYQDPQKQPCAVFEFRYRTREGLIEERIIPRPTPIDGMNEEQLHAYALKLHREREDSIKNEEKPIRIKTEGADSSSQSLKRVAPDNELLILPKRYKETKRDDGKTEIDLSD

SEQ ID NO: 53 - DNA, 1824 bp, Muscodor strobelii
  misc_feature: SGI EST ID NO. CUFF.135.0
  misc_feature: Variant of the nucleotide sequence at SEQ ID NO 51
gctatgttgagcgttcctgccactttcaaacaacccgtagttgccattttgttgcggcgaggcgcagatcgagtagggaaggaacctctacttggctgaactcaactcacttccaacttcaccccctcttcacgttcaccgcagaccaccctcaaccttgtcagtcttcctgctggtgacactaccggctcccatgacacgttctccattctgaagatctcttcaggttgtgagtagttgcgtctacttgactgacgcttttcgttccgattctcggacgacaaccgctacttccacaaaagtcaggccgtttgtttacttcctcctacctcagactcccccattaagtggcgcacgtcggtatttgagtctcccttctcttcggttcccaaccttccactatctatctaacgactcttctttcgttgcagctctcgcctctgttgtgcccctatatcgtgcctgcgactttgagtgtctagggtccttttgcaaagtaccatcccgcaccgcgacttcggcaagcactgccctccgaattacctctgccgttcatcaaagcatacagtatggccgtactcaaggatctgcccggcttgaaagctacgatccgggtcgatggcaaagatcttcaagagtacgacgatccgtacattgagatcctcgacgatgacgacgaactcgaactgcttgttacggctacccgagagaccgaccctgttgtcttgaatgttcgacacattcctcatgtggtgaagtatattgaagcagttccggggaaagcgttcagtatcgagtgggcaaaagagaaacagttcgacagtcgctgtaaccatcttggagtccaagttgagagggacggcctcaagaatgccatgtttcatgagcctctaaataagcgtcgagttgaatgggcttatggaattgagggcatgcaatatggacctattggcaataagcgataccggccttttcaattcgctgactttaagccggtgtcctccgaagattgcgacgagaatgccgtggaccgaagtatgacccaaagcaaagatctggggacgattcgcgttctgtggttcaaaatgaagcactgtccccccatgccccaaaccactaacgtatttggcacgtcggacaacactgttcatgagaaggcattgaaaggtcgagcattgtatgccaaagtgggatacggggctgaaatggctgacagcaatgtggtccctcgctttgaggacaattaccaagatccccagaaacagccttgcgcggtgttcgagtttagatacagaacaagagagggcctcatcgaagagcgaatcatcccccgtcctactccaatcgatggcatgaatgaagaacaacttcatgcatatgctctgaaactccatcgagagcgcgaggactctatcaagaacgaagagaagcccatcaggatcaagactgaaggcgctgactcaagctctcaatcacttaagagagtagcacctgacaacgagctgctaatactccctaaaagatacaaggagacgaaacgagacgacggcaagacggagatcgacttaagtgactgaaggaccgcagttggattttctgcttatgtgtggagctccttggcatctgcttcttttgctagggtatctcggaaggtttgaaagactgtatttgtttggagtggacatgtcggagtgcttggtcaacggcgtctaaaatcaggagaggacattgtctgcagatatgcctgttgcgttatggcatgaaaaggtctgcctaggttatgcagtgagttaggggctcattacagaagagaacattctgccg

SEQ ID NO: 54 - DNA, 1476 bp, Muscodor strobelii
  misc_feature: SGI cDNA ID NO. 559574
  misc_feature: Encodes the peptide sequence at SEQ ID NO 55
atggatccaggccgccgcgcaatgatatctggtcgtaagtctccccatcgcgatatcacatctccgagacgcgatgccaataccaggatcacaaagccccagcgacccaaccagtccaaccccgccaacagcgcgagacacgcctacctcacccaagatgagcaatcccagcgcttcgtcgccgatgaggacaagttcgtgctcaagcagtccaagaaaaaggcagatatccgagtgagagagggacgtgccaagcccatcgatctgttggctttcaatctgcgatatgtcgatacagaccgcgatgtattcgatgacagcgacgccgatatcgagatcaccgttcctgcgcctacagcagtcatcgacgggctgaacgagtcagaggcaggcgagttggaaggcgagatcacctcctaccatacactggagttgaatgcgaggaacagagagtattggacgtctttgaaggtgatactggccgaccggagacagaagctgagacccatgggccccgaggcacgggctgtgagctctgtcgcttcagatcatgacagaattctgcgtcccaagaaccttgagcagctcgagaagattgaggatcagattcagagcaagctcaactccaacgaggtcatcgacacagattactgggagcagctcctcaagaccctgcaggtgtacaaagccaaggccaaactgcaagccatctacggcacaatcaaagccaacaggatcagctggttgaaagaaatcaacccggaaaaggccgccgctctcgccgatggtgacactatcgcacagaccgctgtcatagctccgaaggatcaacctgcagctccttattctgctgctgctgcccgtccgaaagccatgacaccctcctcatctgtcaccggatctgcgccaccggggacggcgagatttgcgaccagtggaaatgaagacttctcacaggccaccaaggctttgtacgaacgtgaagtggcccgtggtgttaatgaggatgaggaaatcttcacggccgaagagtcggttgccagctcggcgaaaccgcaatgggctgacaagtatcgccctcgcaaaccacgctatttcaatcgcgtgcagatgggctacgaatggaacaagtacaatcagactcactacgaccatgacaatccgcccccgaaggttgttcagggctacaagttcaacatattctacccggatctcatcgacaagaccaaagctcccaccttcaagatcatccgcgaacatggcagaaggaaaggcgagtctcttgcgcccgccggagaggaagacacatgtctcatccgcttcatcgcggggccaccatacgaggatatcgcattccgtatcgtggatcgcgaatgggattacagcgcaaaaaaagaccgtggcttcagaagcagctttgacaagggtattctgcaacttcatttccagttcaagaagatttattaccgaaagtag

SEQ ID NO: 55 - protein, 491 aa, Muscodor strobelii
  misc_feature: SGI Peptide ID NO. 559574
  misc_feature (1)..(491): NCBI GI: 261361436 Blast Desc: conserved [Verticillium albo-atrum VaMs.102]
  misc_feature (1)..(491): NCBI GI: 256734798 Blast Desc: [Nectria haematococca mpVI 77-13-4]
  misc_feature (1)..(491): NCBI GI: 164423343 Blast Desc: NCU08633 [Neurospora crassa OR74A] gi|157070053|gb|EAA35605.2| conserved [Neurospora crassa OR74A]
  misc_feature (1)..(491): NCBI GI: 116182836 Blast Desc: CHGG_02046 [Chaetomium globosum CBS 148.51] gi|88186343|gb|EAQ93811.1| CHGG_02046 [Chaetomium globosum CBS 148.51]
  misc_feature (1)..(491): NCBI GI: 154321491 Blast Desc: BC1G_01620 [Botryotinia fuckeliana B05.10] gi|150852158|gb|EDN27350.1| BC1G_01620 [Botryotinia fuckeliana B05.10]
  misc_feature (1)..(475): NCBI GI: 171694662 Blast Desc: protein product [Podospora anserina] gi|170947573|emb|CAP59734.1| protein product [Podospora anserina]
  misc_feature (1)..(491): NCBI GI: 39952662 Blast Desc: MGG_01852 [Magnaporthe grisea 70-15] gi|145020282|gb|EDK04411.1| MGG_01852 [Magnaporthe grisea 70-15]
  misc_feature (1)..(475): NCBI GI: 46107822 Blast Desc: FG00794.1 [Gibberella zeae PH-1]
  misc_feature (1)..(488): NCBI GI: 156053974 Blast Desc: SS1G_05835 [Sclerotinia sclerotiorum 1980] gi|154703615|gb|EDO03354.1| SS1G_05835 [Sclerotinia sclerotiorum 1980]
  misc_feature (26)..(491): NCBI GI: 154279810 Blast Desc: conserved [Ajellomyces capsulatus NAm1] gi|150412661|gb|EDN08048.1| conserved [Ajellomyces capsulatus NAm1]
MDPGRRAMISGRKSPHRDITSPRRDANTRITKPQRPNQSNPANSARHAYLTQDEQSQRFVADEDKFVLKQSKKKADIRVREGRAKPIDLLAFNLRYVDTDRDVFDDSDADIEITVPAPTAVIDGLNESEAGELEGEITSYHTLELNARNREYWTSLKVILADRRQKLRPMGPEARAVSSVASDHDRILRPKNLEQLEKIEDQIQSKLNSNEVIDTDYWEQLLKTLQVYKAKAKLQAIYGTIKANRISWLKEINPEKAAALADGDTIAQTAVIAPKDQPAAPYSAAAARPKAMTPSSSVTGSAPPGTARFATSGNEDFSQATKALYEREVARGVNEDEEIFTAEESVASSAKPQWADKYRPRKPRYFNRVQMGYEWNKYNQTHYDHDNPPPKVVQGYKFNIFYPDLIDKTKAPTFKIIREHGRRKGESLAPAGEEDTCLIRFIAGPPYEDIAFRIVDREWDYSAKKDRGFRSSFDKGILQLHFQFKKIYYRK

SEQ ID NO: 56 - DNA, 2269 bp, Muscodor strobelii
  misc_feature: SGI EST ID NO. CUFF.328.1
  misc_feature: Variant of the nucleotide sequence at SEQ ID NO 54
ctacatcaatattttggcattagcgacgacgtcactctctatcttctccactactacgtacactttgcatcaaaccagcttaaaatctagcatctatcctcaaagctgctgtcatcataaaggctgcgcaagatggatccaggccgccgcgcaatgatatctggtcgtaagtctccccatcgcgatatcacatctccgagacgcgatgccaataccaggatcacaaagccccagcgacccaaccagtccaaccccgccaacagcgcgagacacgcctacctcacccaagatgagcaatcccagcgcttcgtcgccgatgaggacaagttcgtgctcaagcagtccaagaaaaaggcagatatccgagtgagagagggacgtgccaagcccatcgatctgttggctttcaatctgcgatatgtcgatacagaccgcgatgtattcgatgacagcgacgccgatatcgagatcaccgttcctgcgcctacagcagtcatcgacgggctgaacgagtcagaggcaggcgagttggaaggcgagatcacctcctaccatacactggagttgaatgcgaggaacagagagtattggacgtctttgaaggtgatactggccgaccggagacagaagctgagacccatgggccccgaggcacgggctgtgagctctgtcgcttcagatcatgacagaattctgcgtcccaagaaccttgagcagctcgagaagattgaggatcagattcagagcaagctcaactccaacgaggtcatcgacacagattactgggagcagctcctcaagaccctgcaggtgtacaaagccaaggccaaactgcaagccatctacggcacaatcaaagccaacaggatcagctggttgaaagaaatcaacccggaaaaggccgccgctctcgccgatggtgacactatcgcacagaccgctgtcatagctccgaaggatcaacctgcagctccttattctgctgctgctgcccgtccgaaagccatgacaccctcctcatctgtcaccggatctgcgccaccggggacggcgagatttgcgaccagtggaaatgaagacttctcacaggccaccaaggctttgtacgaacgtgaagtggcccgtggtgttaatgaggatgaggaaatcttcacggccgaagagtcggttgccagctcggcgaaaccgcaatgggctgacaagtatcgccctcgcaaaccacgctatttcaatcgcgtgcagatgggctacgaatggaacaagtacaatcagactcactacgaccatgacaatccgcccccgaaggttgttcagggctacaagttcaacatattctacccggatctcatcgacaagaccaaagctcccaccttcaagatcatccgcgaacatggcagaaggaaaggcgagtctcttgcgcccgccggagaggaagacacatgtctcatccgcttcatcgcggggccaccatacgaggatatcgcattccgtatcgtggatcgcgaatgggattacagcgcaaaaaaagaccgtggcttcagaagcagctttgacaagggtattctgcaacttcatttccagttcaagaagatttattaccgaaagtaggccgagcattttcgtcagagactgcgttacctaatggtccgggcattggaggacacaaacatatcccgcgcaacagtatggcctgcacacagtactagaacatctctctgcacatggctacggccacaccaacggctacattgtactgtatgggaaaaggggggtctgtgaccagcagtaacgtgcagatgtcttagtctattgatcctgtcactcggtgttatgtcaccttgtcctgattcgccttgggggttccgtgacacaccgccccacagacccgcatgactttttgctagtataccgccttgctctcgcccgagtaaggtactgttgacggtcatctgccgccggagggagtctgcaggtgttggagagatacatcgatacattgattgataaattataccaggatacaggacaggtgcggtgaatactattacaagtcgtcgatcagtgtcaaaaatgtcgctctagtaatgacgtctcttgcaacgtgagtgagattatagctatgaaacacaacagcacgacagcacgcgactgtgattactcttcgctatcgttttcttctcaggtctcatcactattactacgaaacggaaacgagacggaagcgatctgaactagtcctgaccatacttgacttccaaccgacctgatc

SEQ ID NO: 57 - DNA, 1476 bp, Muscodor strobelii
  misc_feature: SGI cDNA ID NO. 559575
  misc_feature: Encodes the peptide sequence at SEQ ID NO 58
atggatccaggccgccgcgcaatgatatctggtcgtaagtctccccatcgcgatatcacatctccgagacgcgatgccaataccaggatcacaaagccccagcgacccaaccagtccaaccccgccaacagcgcgagacacgcctacctcacccaagatgagcaatcccagcgcttcgtcgccgatgaggacaagttcgtgctcaagcagtccaagaaaaaggcagatatccgagtgagagagggacgtgccaagcccatcgatctgttggctttcaatctgcgatatgtcgatacagaccgcgatgtattcgatgacagcgacgccgatatcgagatcaccgttcctgcgcctacagcagtcatcgacgggctgaacgagtcagaggcaggcgagttggaaggcgagatcacctcctaccatacactggagttgaatgcgaggaacagagagtattggacgtctttgaaggtgatactggccgaccggagacagaagctgagacccatgggccccgaggcacgggctgtgagctctgtcgcttcagatcatgacagaattctgcgtcccaagaaccttgagcagctcgagaagattgaggatcagattcagagcaagctcaactccaacgaggtcatcgacacagattactgggagcagctcctcaagaccctgcaggtgtacaaagccaaggccaaactgcaagccatctacggcacaatcaaagccaacaggatcagctggttgaaagaaatcaacccggaaaaggccgccgctctcgccgatggtgacactatcgcacagaccgctgtcatagctccgaaggatcaacctgcagctccttattctgctgctgctgcccgtccgaaagccatgacaccctcctcatctgtcaccggatctgcgccaccggggacggcgagatttgcgaccagtggaaatgaagacttctcacaggccaccaaggctttgtacgaacgtgaagtggcccgtggtgttaatgaggatgaggaaatcttcacggccgaagagtcggttgccagctcggcgaaaccgcaatgggctgacaagtatcgccctcgcaaaccacgctatttcaatcgcgtgcagatgggctacgaatggaacaagtacaatcagactcactacgaccatgacaatccgcccccgaaggttgttcagggctacaagttcaacatattctacccggatctcatcgacaagaccaaagctcccaccttcaagatcatccgcgaacatggcagaaggaaaggcgagtctcttgcgcccgccggagaggaagacacatgtctcatccgcttcatcgcggggccaccatacgaggatatcgcattccgtatcgtggatcgcgaatgggattacagcgcaaaaaaagaccgtggcttcagaagcagctttgacaagggtattctgcaacttcatttccagttcaagaaggtatgcattcccgtgtag

SEQ ID NO: 58 - protein, 491 aa, Muscodor strobelii
  misc_feature: SGI Peptide ID NO. 559575
  misc_feature (1)..(487): NCBI GI: 261361436 Blast Desc: conserved [Verticillium albo-atrum VaMs.102]
  misc_feature (1)..(487): NCBI GI: 256734798 Blast Desc: [Nectria haematococca mpVI 77-13-4]
  misc_feature (1)..(475): NCBI GI: 171694662 Blast Desc: protein product [Podospora anserina] gi|170947573|emb|CAP59734.1| protein product [Podospora anserina]
  misc_feature (1)..(487): NCBI GI: 116182836 Blast Desc: CHGG_02046 [Chaetomium globosum CBS 148.51] gi|88186343|gb|EAQ93811.1| CHGG_02046 [Chaetomium globosum CBS 148.51]
  misc_feature (1)..(487): NCBI GI: 164423343 Blast Desc: NCU08633 [Neurospora crassa OR74A] gi|157070053|gb|EAA35605.2| conserved [Neurospora crassa OR74A]
  misc_feature (1)..(487): NCBI GI: 154321491 Blast Desc: BC1G_01620 [Botryotinia fuckeliana B05.10] gi|150852158|gb|EDN27350.1| BC1G_01620 [Botryotinia fuckeliana B05.10]
  misc_feature (1)..(487): NCBI GI: 39952662 Blast Desc: MGG_01852 [Magnaporthe grisea 70-15] gi|145020282|gb|EDK04411.1| MGG_01852 [Magnaporthe grisea 70-15]
  misc_feature (1)..(475): NCBI GI: 46107822 Blast Desc: FG00794.1 [Gibberella zeae PH-1]
  misc_feature (1)..(487): NCBI GI: 156053974 Blast Desc: SS1G_05835 [Sclerotinia sclerotiorum 1980] gi|154703615|gb|EDO03354.1| SS1G_05835 [Sclerotinia sclerotiorum 1980]
  misc_feature (25)..(487): NCBI GI: 119498225 Blast Desc: cactin, [Neosartorya fischeri NRRL 181] gi|119414034|gb|EAW23973.1| cactin, [Neosartorya fischeri NRRL 181]
MDPGRRAMISGRKSPHRDITSPRRDANTRITKPQRPNQSNPANSARHAYLTQDEQSQRFVADEDKFVLKQSKKKADIRVREGRAKPIDLLAFNLRYVDTDRDVFDDSDADIEITVPAPTAVIDGLNESEAGELEGEITSYHTLELNARNREYWTSLKVILADRRQKLRPMGPEARAVSSVASDHDRILRPKNLEQLEKIEDQIQSKLNSNEVIDTDYWEQLLKTLQVYKAKAKLQAIYGTIKANRISWLKEINPEKAAALADGDTIAQTAVIAPKDQPAAPYSAAAARPKAMTPSSSVTGSAPPGTARFATSGNEDFSQATKALYEREVARGVNEDEEIFTAEESVASSAKPQWADKYRPRKPRYFNRVQMGYEWNKYNQTHYDHDNPPPKVVQGYKFNIFYPDLIDKTKAPTFKIIREHGRRKGESLAPAGEEDTCLIRFIAGPPYEDIAFRIVDREWDYSAKKDRGFRSSFDKGILQLHFQFKKVCIPV

SEQ ID NO: 59 - DNA, 2269 bp, Muscodor strobelii; identical to SEQ ID NO: 56
  misc_feature: SGI EST ID NO. CUFF.328.1
  misc_feature: Variant of the nucleotide sequence at SEQ ID NO 57

SEQ ID NO: 60 - DNA, 1842 bp, Muscodor strobelii
  misc_feature: SGI cDNA ID NO. 559576
  misc_feature: Encodes the peptide sequence at SEQ ID NO 61
atgttccaggcttcttttcaacagccgcccgccggctattccactacagcacttagagagtattgcaccacacaatcagccaacggctcgattgatctgaacgacccagcttcgccatactactcctcgccggaatctcggtcttctgatactttggaggggaacctgactccagctttgaccccagcttcagacgtggctccgtcttatcatcgcacatttgaacttcctgttcaaaacgtgggtcattctactccgtcatctcagggaatgttgcccagtcctcccgcctctacaacttacgacggcgaagatactgagcgcttgcgacttcggcttcagtcgtcaagcacttcatacccccttcagtccagtggtagccgtcctccagtccacacaaacgccacgagctggtccacttcgacatcgcatcaaccggctgccaactttccggacaatatctggagtgtcccgaatccagcattctcccaagtatcgcaggtctctcagctttcccaaagtggcagttctgtccagtttgactcttctctggaacaccaagggctggaatcaccattaactttgtcaacaaactacaacttcacggagtacaatcagcacgacctggaaccacaaactcccgcccaccagagcgagatggccatgcattcggagatgggagagactcccgggctctcatcgcacgaagtctctccagccatgaccaacgacttgatggaacagtatcagctcgaggaggagataatagatatccatgatcagccctctccagctgatagtatgaggagccatggaagccaggcaggcaagggaggcaaggacacaaccccctatgccaagttgatcttcgagtgtctcatggccgcaaagaacaagaccatgagcctccaagacatctaccgttggttcgagcagcataccgacaaaggccaagacggttccaaaggttggcagaatagtattcgacacaacctgagcatgaacaaggctttcaagaaaaccaaccgagaacgcagcggcgatattggatccggtgacgctgccaagaagtcaaccgattggactttggaggagtgggctatcaatcaaggtgtccagagcacgactcgataccgcaagggatctggcagccgtcgcactcgcaagagcgtcactgggggagtcaacaagtcgacgacacacggtactgtgggcccaagaagatgcgctgccccttcacgaactcctgagtctgctttagcacgacctggaaggggtcagattgtacccgtgaggaacatggacggcaatggctattcgcagccctatcgcactcctcagctgccagttgatgtttatcaccagcatgcgactcaacagactccattctactctcccggacacatgaacttgagctcataccatgccagtgacgatactagtggtagcgcatcatcacagaaccagatgatgatgtctggttcaataaatgcgaccaccatgccgactacgaacaatttgacggccggcactctgggtggtaacaacagtttgcaaagctttaactacggtacacagaacacggcaccagtgcagggaatagccaactatcatcacgcccaatacaccaactccgatattggactgaacaggatcgccggcgtgtattcgcaacccacagacaccacatcggaccacatgggcgagtctcgacaaggtccatcgacccttaacaatatggcgtctctcaatcggccattctaccagtctccgcaccaacccgactggaacagtgtcatctcagacggtggactgtcggacaggatctcttatcaccactag

SEQ ID NO: 61 - protein, 613 aa, Muscodor strobelii
  misc_feature: SGI Peptide ID NO. 559576
  misc_feature (285)..(389): Pfam Id: PF00250 Pfam Desc: Fork head domain
  misc_feature (275)..(466): NCBI GI: 156053972 Blast Desc: SS1G_05834 [Sclerotinia sclerotiorum 1980] gi|154703614|gb|EDO03353.1| SS1G_05834 [Sclerotinia sclerotiorum 1980]
  misc_feature (279)..(392): NCBI GI: 154321489 Blast Desc: BC1G_01619 [Botryotinia fuckeliana B05.10] gi|150852157|gb|EDN27349.1| BC1G_01619 [Botryotinia fuckeliana B05.10]
  misc_feature (274)..(393): NCBI GI: 116182840 Blast Desc: CHGG_02048 [Chaetomium globosum CBS 148.51] gi|88186345|gb|EAQ93813.1| CHGG_02048 [Chaetomium globosum CBS 148.51]
  misc_feature (280)..(381): NCBI GI: 85115241 Blast Desc: NCU08634 [Neurospora crassa OR74A] gi|28926637|gb|EAA35606.1| [Neurospora crassa OR74A]
  misc_feature (284)..(387): NCBI GI: 171694660 Blast Desc: protein product [Podospora anserina] gi|170947572|emb|CAP59733.1| protein product [Podospora anserina]
  misc_feature (273)..(386): NCBI GI: 256734799 Blast Desc: NECHADRAFT_75425 [Nectria haematococca mpVI 77-13-4]
  misc_feature (273)..(390): NCBI GI: 261361437 Blast Desc: forkhead domain-containing protein [Verticillium albo-atrum VaMs.102]
  misc_feature (284)..(390): NCBI GI: 240111385 Blast Desc: Fork head domain containing protein [Coccidioides posadasii C735 delta SOWgp]
  misc_feature (260)..(386): NCBI GI: 189209325 Blast Desc: forkhead domain containing protein [Pyrenophora tritici-repentis Pt-1C-BFP] gi|187977088|gb|EDU43714.1| forkhead domain containing protein [Pyrenophora tritici-repentis
  misc_feature (284)..(387): NCBI GI: 121710582 Blast Desc: forkhead domain protein [Aspergillus clavatus NRRL 1] gi|119401057|gb|EAW11481.1| forkhead domain protein [Aspergillus clavatus NRRL 1]
MFQASFQQPPAGYSTTALREYCTTQSANGSIDLNDPASPYYSSPESRSSDTLEGNLTPALTPASDVAPSYHRTFELPVQNVGHSTPSSQGMLPSPPASTTYDGEDTERLRLRLQSSSTSYPLQSSGSRPPVHTNATSWSTSTSHQPAANFPDNIWSVPNPAFSQVSQVSQLSQSGSSVQFDSSLEHQGLESPLTLSTNYNFTEYNQHDLEPQTPAHQSEMAMHSEMGETPGLSSHEVSPAMTNDLMEQYQLEEEIIDIHDQPSPADSMRSHGSQAGKGGKDTTPYAKLIFECLMAAKNKTMSLQDIYRWFEQHTDKGQDGSKGWQNSIRHNLSMNKAFKKTNRERSGDIGSGDAAKKSTDWTLEEWAINQGVQSTTRYRKGSGSRRTRKSVTGGVNKSTTHGTVGPRRCAAPSRTPESALARPGRGQIVPVRNMDGNGYSQPYRTPQLPVDVYHQHATQQTPFYSPGHMNLSSYHASDDTSGSASSQNQMMMSGSINATTMPTTNNLTAGTLGGNNSLQSFNYGTQNTAPVQGIANYHHAQYTNSDIGLNRIAGVYSQPTDTTSDHMGESRQGPSTLNNMASLNRPFYQSPHQPDWNSVISDGGLSDRISYHH

SEQ ID NO: 62 - DNA, 1671 bp, Muscodor strobelii
  misc_feature: SGI cDNA ID NO. 559577
  misc_feature: Encodes the peptide sequence at SEQ ID NO 63
atggcccagccgtcgaaatggtatactctacccgcactccctgacctgccgcctctgctggtctcattcgctttcacgaaatcgtcatacgcgctccatgtcacagatcttgccaacatatgggtggagaagctcgatcggagaggtatcctactacgtagtctgcaagaaaacacgagtatcgacttgagcgatgctgatcccgaacaatggactgtgtttctgtccaaactcaatgccgctttcgaccccacctcaccagatcaccatctcaccagccttactttggcccccaacagcaatgattcgttgtctctatgtatcacctgcgagcttccaagaccactagaaccactcagatggccggcacaattgaccaaatgtccctcaaccacgctagcttcagaacttgtggtacctctcatacaggcgcatcatcagcgacatcaggaagcccaggatctgatggatctgctgaaagaaaaagatgtagtcatcaacaagttcattgacaagctcgcagcgacgaggactgggctggagcacattttcacgtcactctctgcgaaacagaaagtcagcagggaagccgccaataagaagatcaaaggccttgccccgtttgacgaatcacaatggagggaagaacgcgaactcgaaaaatcacaggattctcaagacctactgcaggatgttttcggcaccttaggggtggcatatgaacgagaaacggatctgggcatgtctgacaaactggacgattggtggaaatcgttcaagaaagcacagtcaacggcagctcaatcaaagcacgatactcctcgaaaagaacgccaaaggactactgatgtgcctcaaggtccttcgattgaagaagatgaggacttccaggtacaagcaacaccaccacacctccagtcaaggcttgccagtcggggcacaagacggcaagagccgaagggtgacgaaacagaaagcgaagattcagatgaagcaattccggacagccacccgatccaacctcagcctatgactcgtacgaatatcggaacactcgggaaaaagaaggcaaccacgcagactcaatcggcaagccaatcatctcataccataccttctcatgacgacaatgcgacagcatcggattcagaggacgaagaaaagtcttcgccaccgcagccgactggcaggactggccatcggatgggtgtgattggaaaagcagggcgatccccagcgcctaattcgagtagtgcgaatgtcacatcaccagcacgaccaccagtgaatgctggcgatgacactgcttctggcaccgattctgatagcgtcagtgacagagacagcgcatccaaactgcctattatcccatcatcgccgccaagaaaaggaggcctcagacggattggcgggaagtctaggtcttcgccggatccccctcgagacgagacagctatgtctgacaagaagggcggcgaagtcgaagctcccaaacggacggaaacgcgaaagattggtgcaattggtaccaaaagatcaaatgctgcaagttcgaatgagcccaaagagcccgagactgaggaggaaaaggcggaacggaaacgagccgagctggcgaacgagctagaacaaaagagcaaagcgccagcaaagaagaagaggaagttttaa

SEQ ID NO: 63 - protein, 556 aa, Muscodor strobelii
  misc_feature: SGI Peptide ID NO. 559577
  misc_feature (1)..(188): Pfam Id: PF09302 Pfam Desc: XLF (XRCC4-like factor)
  misc_feature (1)..(556): NCBI GI: 171694658 Blast Desc: protein product [Podospora anserina] gi|170947571|emb|CAP59732.1| protein product [Podospora anserina]
  misc_feature (1)..(556): NCBI GI: 116182842 Blast Desc: CHGG_02049 [Chaetomium globosum CBS 148.51] gi|88186346|gb|EAQ93814.1| CHGG_02049 [Chaetomium globosum CBS 148.51]
  misc_feature (1)..(556): NCBI GI: 46107826 Blast Desc: FG00796.1 [Gibberella zeae PH-1]
  misc_feature (1)..(388): NCBI GI: 85115253 Blast Desc: NCU08637 [Neurospora crassa OR74A] gi|28926640|gb|EAA35609.1| NCU08637 [Neurospora crassa OR74A]
  misc_feature (1)..(556): NCBI GI: 261361438 Blast Desc: conserved [Verticillium albo-atrum VaMs.102]
  misc_feature (37)..(386): NCBI GI: 256735510 Blast Desc: NECHADRAFT_75426 [Nectria haematococca mpVI 77-13-4]
  misc_feature (7)..(556): NCBI GI: 39952724 Blast Desc: MGG_01857 [Magnaporthe grisea 70-15] gi|145020276|gb|EDK04405.1| MGG_01857 [Magnaporthe grisea 70-15]
  misc_feature (16)..(520): NCBI GI: 169775221 Blast Desc: [Aspergillus oryzae RIB40] gi|83769941|dbj|BAE60076.1| protein product [Aspergillus oryzae]
  misc_feature (5)..(556): NCBI GI: 159128853 Blast Desc: conserved [Aspergillus fumigatus A1163]
  misc_feature (5)..(556): NCBI GI: 70989185 Blast Desc: conserved [Aspergillus fumigatus Af293] gi|66847073|gb|EAL87404.1| conserved [Aspergillus fumigatus Af293]
MAQPSKWYTLPALPDLPPLLVSFAFTKSSYALHVTDLANIWVEKLDRRGILLRSLQENTSIDLSDADPEQWTVFLSKLNAAFDPTSPDHHLTSLTLAPNSNDSLSLCITCELPRPLEPLRWPAQLTKCPSTTLASELVVPLIQAHHQRHQEAQDLMDLLKEKDVVINKFIDKLAATRTGLEHIFTSLSAKQKVSREAANKKIKGLAPFDESQWREERELEKSQDSQDLLQDVFGTLGVAYERETDLGMSDKLDDWWKSFKKAQSTAAQSKHDTPRKERQRTTDVPQGPSIEEDEDFQVQATPPHLQSRLASRGTRRQEPKGDETESEDSDEAIPDSHPIQPQPMTRTNIGTLGKKKATTQTQSASQSSHTIPSHDDNATASDSEDEEKSSPPQPTGRTGHRMGVIGKAGRSPAPNSSSANVTSPARPPVNAGDDTASGTDSDSVSDRDSASKLPIIPSSPPRKGGLRRIGGKSRSSPDPPRDETAMSDKKGGEVEAPKRTETRKIGAIGTKRSNAASSNEPKEPETEEEKAERKRAELANELEQKSKAPAKKKRKF

SEQ ID NO: 64 - DNA, 1968 bp, Muscodor strobelii
  misc_feature: SGI EST ID NO. CUFF.201.0
  misc_feature: Variant of the nucleotide sequence at SEQ ID NO 62
caccatctcatcactttctgtacttttgtgatcgctattcatctcaactaactcgcctatgagactgtcatcgatgagatatatgactgcgtcataattatggcccagccgtcgaaatggtatactctacccgcactccctgacctgccgcctctgctggtctcattcgctttcacgaaatcgtcatacgcgctccatgtcacagatcttgccaacatatgggtggagaagctcgatcggagaggtatcctactacgtagtctgcaagaaaacacgagtatcgacttgagcgatgctgatcccgaacaatggactgtgtttctgtccaaactcaatgccgctttcgaccccacctcaccagatcaccatctcaccagccttactttggcccccaacagcaatgattcgttgtctctatgtatcacctgcgagcttccaagaccactagaaccactcagatggccggcacaattgaccaaatgtccctcaaccacgctagcttcagaacttgtggtacctctcatacaggcgcatcatcagcgacatcaggaagcccaggatctgatggatctgctgaaagaaaaagatgtagtcatcaacaagttcattgacaagctcgcagcgacgaggactgggctggagcacattttcacgtcactctctgcgaaacagaaagtcagcagggaagccgccaataagaagatcaaaggccttgccccgtttgacgaatcacaatggagggaagaacgcgaactcgaaaaatcacaggattctcaagacctactgcaggatgttttcggcaccttaggggtggcatatgaacgagaaacggatctgggcatgtctgacaaactggacgattggtggaaatcgttcaagaaagcacagtcaacggcagctcaatcaaagcacgatactcctcgaaaagaacgccaaaggactactgatgtgcctcaaggtccttcgattgaagaagatgaggacttccaggtacaagcaacaccaccacacctccagtcaaggcttgccagtcggggcacaagacggcaagagccgaagggtgacgaaacagaaagcgaagattcagatgaagcaattccggacagccacccgatccaacctcagcctatgactcgtacgaatatcggaacactcgggaaaaagaaggcaaccacgcagactcaatcggcaagccaatcatctcataccataccttctcatgacgacaatgcgacagcatcggattcagaggacgaagaaaagtcttcgccaccgcagccgactggcaggactggccatcggatgggtgtgattggaaaagcagggcgatccccagcgcctaattcgagtagtgcgaatgtcacatcaccagcacgaccaccagtgaatgctggcgatgacactgcttctggcaccgattctgatagcgtcagtgacagagacagcgcatccaaactgcctattatcccatcatcgccgccaagaaaaggaggcctcagacggattggcgggaagtctaggtcttcgccggatccccctcgagacgagacagctatgtctgacaagaagggcggcgaagtcgaagctcccaaacggacggaaacgcgaaagattggtgcaattggtaccaaaagatcaaatgctgcaagttcgaatgagcccaaagagcccgagactgaggaggaaaaggcggaacggaaacgagccgagctggcgaacgagctagaacaaaagagcaaagcgccagcaaagaagaagaggaagttttaacatacagtcatgaatgaatacgtaggtacgaatcgcttcttacgctcatccggctcgttccagctgtaaatcaacagcccgaaagcaatctacaagcataccacgcattctcgatagctttctttctagatacccaattgttaaatactgcttgaaaggtcgttcggatctgccaatattcatcacttgagagcgatc

SEQ ID NO: 65 - DNA, 1506 bp, Muscodor strobelii
  misc_feature: SGI cDNA ID NO. 559578
  misc_feature: Encodes the peptide sequence at SEQ ID NO 66
atgggatacactgacaagattctggcagtatttgctgcttttattgctcataggatcatctggcggctatacgaagcatactacaatgtctggcttggtggcaagtacatttacaagatcaatgagcttcatcagcaatatggaccaattattcgaatctcgccaaccgaactgcatgtcgcggatccggacttttacgaatcgatctatgctagttccgtgagcaaaagacgagtggagaaggaggacagcctaaccaagttctttgccctcgacgatgcactgtttgccactatagaccacgatgtccatcagatgcgacgagctgctttagctccatttttctccacggcctttgtcagaaagctgcagccaatgttccaggccaaattggatatcctcttacgacgaatgcgcgaatttaaagacacggatgaatcagtcaacgcagcttgcatgttcgcagcattcagtggcgacataatgcacatgctggcatttggagactgtgccgataagctagagcacccaaccttcgatgctgccgatcgcctttttgccttgtcggttatacagtcatttcatgtggctaagcgactcccttggcttcccaacttgatgaaaaaactaccagacgccatctcacagcgaatcagtcctcccattgctggctacttgcgtcaagcccgaacgagcgaagaggagactgcacagctggctaccatgtcagaagaaaacttcttgggagcagagatcatccccatctttcgcacactcatgaaatcagacaagctgccggccgaggagaaaacagtgaagcgaatcgggcaagaagcccagatgatgctcatggctgggactcttaccatgtcctcaagtctagagcatcttctgtactggatgattactaacccctatgtactccgtcgattgaaggaggagctcgtaacagtgatgccctcggttactgacgtcggcaccgtcccacttgcaacattggaagccctcccttacctgtcggctatcatcaaggaaggtgttcgattaatctacggaaactcgacaccattgttccgtgtcgatcctgattcgccgctggtttacacaaacaagacaaccggcgaagaatgggtcattccacccaagacgcctgtcgctatgactgcggtactacttcatcataacgagcagcatttccccgatagtcacaagttcattcctgagcgatggctaggagaggaggggaagaaactcgacaaatacaatgtcggattcggaaaggggagccgggcttgcttagggcagaaccaggcgcagggaatgatacgattggtgctggcgggaatttggaggcaatgggctactcgtgatgtaatgattggcgatgaaattgggattttggagttacacaacacgactgctcatgatgttggacttaagggcgatatgtttgtgggcgcatacaacaagactgaaggcgtcgagttcaaagtgtcaagcatgtag

SEQ ID NO: 66 - protein, 501 aa, Muscodor strobelii
  misc_feature: SGI Peptide ID NO. 559578
  misc_feature (21)..(483): Pfam Id: PF00067 Pfam Desc: Cytochrome P450
  misc_feature (282)..(447): Pfam Id: PF00067 Pfam Desc: Cytochrome P450
  misc_feature (8)..(501): NCBI GI: 116208594 Blast Desc: CHGG_03590 [Chaetomium globosum CBS 148.51] gi|88184187|gb|EAQ91655.1| CHGG_03590 [Chaetomium globosum CBS 148.51]
  misc_feature (8)..(501): NCBI GI: 145234316 Blast Desc: An02g13980 [Aspergillus niger] gi|134057475|emb|CAK48829.1| protein product [Aspergillus niger]
  misc_feature (13)..(499): NCBI GI: 171688250 Blast Desc: protein product [Podospora anserina] gi|170944087|emb|CAP70197.1| protein product [Podospora anserina]
  misc_feature (15)..(485): NCBI GI: 169765436 Blast Desc: [Aspergillus oryzae RIB40] gi|83765044|dbj|BAE55187.1| protein product [Aspergillus oryzae]
  misc_feature (15)..(494): NCBI GI: 259487140 Blast Desc: TPA: cytochrome P450, (Eurofung) [Aspergillus nidulans FGSC A4]
  misc_feature (15)..(485): NCBI GI: 119178512 Blast Desc: CIMG_08088 [Coccidioides immitis RS]
  misc_feature (23)..(485): NCBI GI: 119499275 Blast Desc: cytochrome P450, [Neosartorya fischeri NRRL 181] gi|119414559|gb|EAW24498.1| cytochrome P450, [Neosartorya fischeri NRRL 181]
  misc_feature (24)..(494): NCBI GI: 255938474 Blast Desc: Pc14g00120 [Penicillium chrysogenum Wisconsin 54-1255] gi|211584628|emb|CAP74153.1| Pc14g00120 [Penicillium chrysogenum Wisconsin 54-1255]
  misc_feature (15)..(494): NCBI GI: 67522675 Blast Desc: AN1794.2 [Aspergillus nidulans FGSC A4] gi|40744814|gb|EAA63970.1| AN1794.2 [Aspergillus nidulans FGSC A4]
  misc_feature (10)..(485): NCBI GI: 240111650 Blast Desc: Cytochrome P450 family protein [Coccidioides posadasii C735 delta SOWgp]
  misc_feature (26)..(451): SWISSPROT Homolog: EC 1.14.13.12 Benzoate 4-monooxygenase
MGYTDKILAVFAAFIAHRIIWRLYEAYYNVWLGGKYIYKINELHQQYGPIIRISPTELHVADPDFYESIYASSVSKRRVEKEDSLTKFFALDDALFATIDHDVHQMRRAALAPFFSTAFVRKLQPMFQAKLDILLRRMREFKDTDESVNAACMFAAFSGDIMHMLAFGDCADKLEHPTFDAADRLFALSVIQSFHVAKRLPWLPNLMKKLPDAISQRISPPIAGYLRQARTSEEETAQLATMSEENFLGAEIIPIFRTLMKSDKLPAEEKTVKRIGQEAQMMLMAGTLTMSSSLEHLLYWMITNPYVLRRLKEELVTVMPSVTDVGTVPLATLEALPYLSAIIKEGVRLIYGNSTPLFRVDPDSPLVYTNKTTGEEWVIPPKTPVAMTAVLLHHNEQHFPDSHKFIPERWLGEEGKKLDKYNVGFGKGSRACLGQNQAQGMIRLVLAGIWRQWATRDVMIGDEIGILELHNTTAHDVGLKGDMFVGAYNKTEGVEFKVSSM

SEQ ID NO: 67 - DNA, 2108 bp, Muscodor strobelii
  misc_feature: SGI EST ID NO. CUFF.207.0
  misc_feature: Variant of the nucleotide sequence at SEQ ID NO 65
catggaggctgtatctgcgcgtggctcctggctaatctagcgactggtcggaccgcaatgctggaccataatactgattgtacacaaaatgattatgcggaaaagataggtgatgcgtagtggacaagaatatgaccaccgcaacgacaatatgacacataatgaccaatgtttgcttttatttaaaggtcagatgcgcatcgtggaggagaagcttagaacataatggtctccataacaagtcgctcgttattcgattacgtgcattactcgccgcgatatagtacagaatgggatacactgacaagattctggcagtatttgctgcttttattgctcataggatcatctggcggctgtatttgagcccgatcgctcacttccccgggccacgactagcagcaataacgagcttatacgaagcatactacaatgtctggcttggtggcaagtacatttacaagatcaatgagcttcatcagcaatatggaccaattattcgaatctcgccaaccgaactgcatgtcgcggatccggacttttacgaatcgatctatgctagttccgtgagcaaaagacgagtggagaaggaggacagcctaaccaagttctttgccctcgacgatgcactgtttgccactatagaccacgatgtccatcagatgcgacgagctgctttagctccatttttctccacggcctttgtcagaaagctgcagccaatgttccaggccaaattggatatcctcttacgacgaatgcgcgaatttaaagacacggatgaatcagtcaacgcagcttgcatgttcgcagcattcagtggcgacataatgcacatgctggcatttggagactgtgccgataagctagagcacccaaccttcgatgctgccgatcgcctttttgccttgtcggttatacagtcatttcatgtggctaagcgactcccttggcttcccaacttgatgaaaaaactaccagacgccatctcacagcgaatcagtcctcccattgctggctacttgcgtcaagcccgaacgagcgaagaggagactgcacagctggctaccatgtcagaagaaaacttcttgggagcagagatcatccccatctttcgcacactcatgaaatcagacaagctgccggccgaggagaaaacagtgaagcgaatcgggcaagaagcccagatgatgctcatggctgggactcttaccatgtcctcaagtctagagcatcttctgtactggatgattactaacccctatgtactccgtcgattgaaggaggagctcgtaacagtgatgccctcggttactgacgtcggcaccgtcccacttgcaacattggaagccctcccttacctgtcggctatcatcaaggaaggtgttcgattaatctacggaaactcgacaccattgttccgtgtcgatcctgattcgccgctggtttacacaaacaagacaaccggcgaagaatgggtcattccacccaagacgcctgtcgctatgactgcggtactacttcatcataacgagcagcatttccccgatagtcacaagttcattcctgagcgatggctaggagaggaggggaagaaactcgacaaatacaatgtcggattcggaaaggggagccgggcttgcttagggcagaaccaggcgcagggaatgatacgattggtgctggcgggaatttggaggcaatgggctactcgtgatgtaatgattggcgatgaaattgggattttggagttacacaacacgactgctcatgatgttggacttaagggcgatatgtttgtgggcgcatacaacaagactgaaggcgtcgagttcaaagtgtcaagcatgtagatagggtcagcgatgccgttcaaggtgctgatctggatgtccgcacgtaggaacattgattattcgactgagcatctgtctaaaactcgaatatgcacccgacaagctctccatcaaagacttgaatggctaagcaaaagaagaaaagagagtccagatgcgaattgaatcgatgaataatttgagactgacgtttcggggagctgaacccctgtgggttgaattgttagcgcatccccagcctccccaccgaac

SEQ ID NO: 68 - DNA, 1089 bp, Muscodor strobelii
  misc_feature: SGI cDNA ID NO. 559579
  misc_feature: Encodes the peptide sequence at SEQ ID NO 69
atgtcaacgactataagatattcgagctctgaagcttcaggggtgaaaacagagaaatcattggcggatccccggccgagctcaagcatcattcttctctcgccaacaaatcaggttctcttacttcacagagtaaagacctcctccacatttgcatctgcgcatgtatttccaggcggaaacctctcagaatttcatgacgggactgttgcggcatctggagaccccaaacgacatgaggactctctggcttacagattaggtgcaatacgtgaaacgtttgaagagagtgggatattacttgcgcgaaaaggtaaggatagtggggctttattgagcttggctacggaacatcgcgaaaaggcgcgaaaagagatatatgagaataaagtcagctttccgacatggttagagagcctgggtgggatcgctgacactgaagatctactaccctttacacggtggataacgccggctcagaaccccaagcgcttcacaacacagatgtatgtgtacatgctccctctttcagctggcaatgatccggtacttgcagcagcgcagaacgaggccttgattcccacgccagatggtggggccgaaatcaccactgcgcactttgacgacgtggctacgtggctcgagaagcagcgccgcggagagatcattttatttcctcctcaatgttttttgctccagatgattgcaccattcctaaccgggccgccatcgccaagtctggggccacaagcggcacaaaatcattatcagacgcagcgtgagaagttgcaagtattcctcaatacggtaccgaccgcgacagatcctaaggctttgaatcaccctacttcgcagatatcctgggccaacaaggtgataagccctgtaacgcttggtgtgaggcagagtgataagaggatcattcttggactagataaagcgggattggagttgaaggattcggggagaggcggcgattgggaaagagttgtgctggtcaatttcgggaaacgcggaccatcgaatgtcgaagtcaggggaagggaggaggtactatcagaagaaagggaggcaaagggaaaactatag

SEQ ID NO: 69 - protein, 362 aa, Muscodor strobelii
  misc_feature: SGI Peptide ID NO. 559579
  misc_feature (24)..(99): Pfam Id: PF00293 Pfam Desc: NUDIX domain
  misc_feature (1)..(348): NCBI GI: 261361412 Blast Desc: conserved [Verticillium albo-atrum VaMs.102]
  misc_feature (3)..(360): NCBI GI: 256735513 Blast Desc: NECHADRAFT_75434 [Nectria haematococca mpVI 77-13-4]
  misc_feature (31)..(361): NCBI GI: 46107836 Blast Desc: FG00801.1 [Gibberella zeae PH-1]
  misc_feature (8)..(359): NCBI GI: 156039872 Blast Desc: SS1G_12072 [Sclerotinia sclerotiorum 1980] gi|154696129|gb|EDN95867.1| SS1G_12072 [Sclerotinia sclerotiorum 1980]
  misc_feature (18)..(358): NCBI GI: 212543495 Blast Desc: NUDIX family hydrolase, [Penicillium marneffei ATCC 18224] gi|210066809|gb|EEA20902.1| NUDIX family hydrolase, [Penicillium marneffei ATCC 18224]
  misc_feature (13)..(356): NCBI GI: 121710414 Blast Desc: NUDIX family hydrolase, [Aspergillus clavatus NRRL 1] gi|119400973|gb|EAW11397.1| NUDIX family hydrolase, [Aspergillus clavatus NRRL 1]
  misc_feature (12)..(351): NCBI GI: 226287251 Blast Desc: conserved [Paracoccidioides brasiliensis Pb18]
  misc_feature (16)..(352): NCBI GI: 242786821 Blast Desc: NUDIX family hydrolase, [Talaromyces stipitatus ATCC 10500] gi|218721028|gb|EED20447.1| NUDIX family hydrolase, [Talaromyces stipitatus ATCC 10500]
  misc_feature (12)..(351): NCBI GI: 225677998 Blast Desc: conserved [Paracoccidioides brasiliensis Pb03]
  misc_feature (12)..(351): NCBI GI: 226279191 Blast Desc: conserved [Paracoccidioides brasiliensis Pb01]
MSTTIRYSSSEASGVKTEKSLADPRPSSSIILLSPTNQVLLLHRVKTSSTFASAHVFPGGNLSEFHDGTVAASGDPKRHEDSLAYRLGAIRETFEESGILLARKGKDSGALLSLATEHREKARKEIYENKVSFPTWLESLGGIADTEDLLPFTRWITPAQNPKRFTTQMYVYMLPLSAGNDPVLAAAQNEALIPTPDGGAEITTAHFDDVATWLEKQRRGEIILFPPQCFLLQMIAPFLTGPPSPSLGPQAAQNHYQTQREKLQVFLNTVPTATDPKALNHPTSQISWANKVISPVTLGVRQSDKRIILGLDKAGLELKDSGRGGDWERVVLVNFGKRGPSNVEVRGREEVLSEEREAKGKL

SEQ ID NO: 70 - DNA, 1476 bp, Muscodor strobelii
  misc_feature: SGI EST ID NO. CUFF.210.0
  misc_feature: Variant of the nucleotide sequence at SEQ ID NO 68
cacctcacaaccccggcctctccgattcatttaattcacggacgacatgccgccgattcttccgctaagctcgacactctccgtgactgtaaacttatcgataaagactgtatatcgcgttgagaagaggcatcatcaccgggtattgctcccgaacatccctgtccgtcttactacctcccaagtgagataccaacaacccgcgacaagtctgagaggaatcattcatccgatatcgactttaaaaccaaaagccacgtctatcatgtcaacgactataagatattcgagctctgaagcttcaggggtgaaaacagagaaatcattggcggatccccggccgagctcaagcatcattcttctctcgccaacaaatcaggttctcttacttcacagagtaaagacctcctccacatttgcatctgcgcatgtatttccaggcggaaacctctcagaatttcatgacgggactgttgcggcatctggagaccccaaacgacatgaggactctctggcttacagattaggtgcaatacgtgaaacgtttgaagagagtgggatattacttgcgcgaaaaggtaaggatagtggggctttattgagcttggctacggaacatcgcgaaaaggcgcgaaaagagatatatgagaataaagtcagctttccgacatggttagagagcctgggtgggatcgctgacactgaagatctactaccctttacacggtggataacgccggctcagaaccccaagcgcttcacaacacagatgtatgtgtacatgctccctctttcagctggcaatgatccggtacttgcagcagcgcagaacgaggccttgattcccacgccagatggtggggccgaaatcaccactgcgcactttgacgacgtggctacgtggctcgagaagcagcgccgcggagagatcattttatttcctcctcaatgttttttgctccagatgattgcaccattcctaaccgggccgccatcgccaagtctggggccacaagcggcacaaaatcattatcagacgcagcgtgagaagttgcaagtattcctcaatacggtaccgaccgcgacagatcctaaggctttgaatcaccctacttcgcagatatcctgggccaacaaggtgataagccctgtaacgcttggtgtgaggcagagtgataagaggatcattcttggactagataaagcgggattggagttgaaggattcggggagaggcggcgattgggaaagagttgtgctggtcaatttcgggaaacgcggaccatcgaatgtcgaagtcaggggaagggaggaggtactatcagaagaaagggaggcaaagggaaaactatagacatacaatcgtcacgatgaagtatcatgatcaagctcatacatgtagatgtcgatatcacctcctagaaatcatagcagagtctactgcggcaatatgtggaaacaaaggcgcttgccccg

SEQ ID NO: 71 - DNA, 879 bp, Muscodor strobelii
  misc_feature: SGI cDNA ID NO. 559580
  misc_feature: Encodes the peptide sequence at SEQ ID NO 72
atgaccccaaaaccccttcgcctagacgtttacgtcagcccacctgtccccatcgtgaccgggtcatccaacccgttgaagcggtggtggcaaccgactgcagtcacagtgatctcaaccaatgaccatgctgtgatcgttgatacgccatctacaatgccagagacagaaaaattcttggcatggcttgagaagacactgcctgggcggatggtactgtattcttttagcactcatgcacacggggatcatctttttggattaccagctgtcaaagctaaataccctgatataaaactcttagcaacaccacgagtgcgagagggcattgcgaaatcgtatgcaaacacggaaatgcgggaaagcttctggatacctctttttcctgatgaccaattgcctgcgagggataccttgttggtgccagatgcactaccagacgatctcagctttgatttcgacggattcgacttccaagcctatgacgtcccacacggcgactgtgcttacaactcgtttctctatatcccgagtctccgcgccgtcgtggctagcgacatcgtctacggcgattgccatcaatactacgccgagtctacgacggcagagtcacgggcgggatggcttgcggcactagataagatcgattcgttggaccctcatgttgtgatccctggtcacccacgagagagccaggttctgggacgacacctcgttgaagctacgagacggtacgcgaaggtgttcgaagaggagctcggaaaggcttcaagtgctgaggagatggagagccgaatgattgcactgtatcccgagcgatggaatttgtacattctggaaatcagctgccaggcggcatttgctgggaaagggacttag

SEQ ID NO: 72 - protein, 292 aa, Muscodor strobelii
  misc_feature: SGI Peptide ID NO. 559580
  misc_feature (32)..(227): Pfam Id: PF00753 Pfam Desc: Metallo-beta-lactamase superfamily
  misc_feature (3)..(289): NCBI GI: 121720070 Blast Desc: metallo-beta-lactamase superfamily protein [Aspergillus clavatus NRRL 1] gi|119404945|gb|EAW15307.1| metallo-beta-lactamase superfamily protein [Aspergillus clavatus
  misc_feature (6)..(289): NCBI GI: 212546835 Blast Desc: conserved [Penicillium marneffei ATCC 18224] gi|210065091|gb|EEA19186.1| conserved [Penicillium marneffei ATCC 18224]
  misc_feature (3)..(288): NCBI GI: 115401980 Blast Desc: [Aspergillus terreus NIH2624] gi|114190519|gb|EAU32219.1| [Aspergillus terreus NIH2624]
  misc_feature (6)..(288): NCBI GI: 242822274 Blast Desc: conserved [Talaromyces stipitatus ATCC 10500] gi|218712774|gb|EED12199.1| conserved [Talaromyces stipitatus ATCC 10500]
  misc_feature (6)..(290): NCBI GI: 256722600 Blast Desc: NECHADRAFT_85303 [Nectria haematococca mpVI 77-13-4]
  misc_feature (6)..(287): NCBI GI: 145248233 Blast Desc: An13g02270 [Aspergillus niger] gi|134081115|emb|CAK41626.1| protein product [Aspergillus niger]
  misc_feature (5)..(292): NCBI GI: 154304497 Blast Desc: BC1G_09124 [Botryotinia fuckeliana B05.10] gi|150854104|gb|EDN29296.1| BC1G_09124 [Botryotinia fuckeliana B05.10]
  misc_feature (6)..(287): NCBI GI: 238490330 Blast Desc: metallo-beta-lactamase domain protein, [Aspergillus flavus NRRL3357] gi|220696815|gb|EED53156.1| metallo-beta-lactamase domain protein, [Aspergillus flavus
  misc_feature (6)..(287): NCBI GI: 169772425 Blast Desc: [Aspergillus oryzae RIB40] gi|83768542|dbj|BAE58679.1| protein product [Aspergillus oryzae]
  misc_feature (6)..(287): NCBI GI: 256723464 Blast Desc: NECHADRAFT_94038 [Nectria haematococca mpVI 77-13-4]
MTPKPLRLDVYVSPPVPIVTGSSNPLKRWWQPTAVTVISTNDHAVIVDTPSTMPETEKFLAWLEKTLPGRMVLYSFSTHAHGDHLFGLPAVKAKYPDIKLLATPRVREGIAKSYANTEMRESFWIPLFPDDQLPARDTLLVPDALPDDLSFDFDGFDFQAYDVPHGDCAYNSFLYIPSLRAVVASDIVYGDCHQYYAESTTAESRAGWLAALDKIDSLDPHVVIPGHPRESQVLGRHLVEATRRYAKVFEEELGKASSAEEMESRMIALYPERWNLYILEISCQAAFAGKGT

SEQ ID NO: 73 - DNA, 483 bp, Muscodor strobelii
  misc_feature: SGI EST ID NO. CUFF.219.0
  misc_feature: Variant of the nucleotide sequence at SEQ ID NO 71
ggcgggatggcttgcggcactagataagatcgattcgttggaccctcatgttgtgatccctggtcacccacgagagagccaggttctgggacgacacctcgttgaagctacgagacggtacgcgaaggtgttcgaagaggagctcggaaaggcttcaagtgctgaggagatggagagccgaatgattgcactgtatcccgagcgatggaatttgtacattctggaaatcagctgccaggcggcatttgctgggaaagggacttaggaaacgtatggttcagtacgcgcatacagatgcattacatcgatgtcgcctcgtttttccccgaattgaaccgtagtgggaaattatccaatctcacagaggtgagagactcgtgatcatggaagcgtgcagaaatgctacagatgatcatttggaaaggaataacaattagcataactgtatctaactgctgaattgattttcgaatcatcaccgta

SEQ ID NO: 74 - DNA, 567 bp, Muscodor strobelii
  misc_feature: SGI cDNA ID NO. 559581
  misc_feature: Encodes the peptide sequence at SEQ ID NO 75
atgaaatatattgcctccaagcagaacgcgtctatcactgttatcataggggagcattccgtcactataggcaagaagaatgcagaaagcgagaatgacagaaactgcgaaggtgtcgcctgtattggctttaggcaatgcgcgtatcacaggggtatgtctcgtctcaagagcttgtggtgcaaggcctccaaggcaaaagcttctttgacggtgaaatattccacaaatggcgtcacggttgctattggcccaaagaaatctgacacatcagaaaacttgaacggctacatccagtctagaggagaagcagggctgtgcgtttaccaaaattgtctccaaaatgacacagcacagactgttctagcctcagagtgcacagaagcccaaaagacgcaagacacccaaggcgtgagcgatgttgctatgactaattacgacagcgaaatacaggaactggtcgatgcctatgggctcacgcaacaggaagaagaagatcaaaaagatacgagtgaggaagagaaagctgagtatatggacttgttcgatgcgagtgacgaggagtga

SEQ ID NO: 75 - protein, 188 aa, Muscodor strobelii
  misc_feature: SGI Peptide ID NO. 559581
MKYIASKQNASITVIIGEHSVTIGKKNAESENDRNCEGVACIGFRQCAYHRGMSRLKSLWCKASKAKASLTVKYSTNGVTVAIGPKKSDTSENLNGYIQSRGEAGLCVYQNCLQNDTAQTVLASECTEAQKTQDTQGVSDVAMTNYDSEIQELVDAYGLTQQEEEDQKDTSEEEKAEYMDLFDASDEE

SEQ ID NO: 76 - DNA, 2424 bp, Muscodor strobelii
  misc_feature: SGI cDNA ID NO. 559582
  misc_feature: Encodes the peptide sequence at SEQ ID NO 77
atgtggaaagaaggtcgacaccgacggatcgacctgcgaagggcacgaaagtcgcagggtcggaacaagcctgtacagtccgaaggtgataatgaaagtgacaacgacaacgatagtgacagtgacgatgacagggacatacagcaagacggtatggagtcccatatcgttcttaatgcgagtaagaatgcggattcagagccagataaagaacctgacagcgttagcctctgtgctcaaaggggactcacgagaagtcagactcgtaaagcatgtcctcgtactcaacgctgcctggtgccgaacgtagggagaaagacagcccctccaactctgaagactcgtggacgacctaagaagcaacaaaagccaagtgaagatactgtctctcaacccggaaaaccaagccgcgccgcagaacgtgctccagcgagcgatcaacgacgaaaagtgagcgctcgtgctgaacgaaccattgcccgggatcaaaagcgaaatggcttatgtctattcgatgcacccaaggctgcgaaaatcaccgcccgagctcgacgtgcaatcgctcgcaatgagcaccggaaagagacagccatagtcaccgtgccaaaggagctcgccgccgatgcgccgcaggaaacaccgtctagctcgcgagcccagcgagctcaggcccgtgaccaacagcgagagaatgcgggtgacacaagacaatgtggtcgtgttggatgtcgcgacaacgccatgcctaaacgcaaactctgcgaatatcatacgagccagctacggcacaaatatgaccgggcaagagacagacaaaaggagaggcaagcattatctgcgtcacaactctgtaccgtcggccaatgtgcccaaatagccttaccaaatcggaagaagtgcgcagaacacgcagcacgaaaagcacagcttgatgcagcaacctacgaagctagaacgcaggccggactctgtgttaggtgcggcgggcaacgagatggcgagcaaacggaatgccaaagctgtcgcaaaaagcaatcagcgtcgaaggccaagcgcgaggtaaaaccgtcagacatgaacaagtcagaatatgacaagcaagtcctcaacgctagaaaagaagccggactttgcacgcgttgtggtggagaaagggatggcaagcaatccgagtgtaagaaatgtcgtactaggcgcgccgataacaaggccaagcgtgatccacaaggcactatcagttgtcgtgcgaaggttgcccagatgagaaaggaaaagagggtagaccataaagctagacgggaagcagaagatgatggcgacccagagtgctatgcacgatcaggcacagatttgaatacaccatctcgcctggattcgaatcaagagtcggatacagagcgagatgcagagtggcgagcagaaccggaaacagagacggattcagaatatgttgcagagtcgggtgcagagtcagatacggaacctgagaaggattccgacgacatccacccccgttctcaacatgccaatgctaacaagagaataaagacaacctctccagccaaacacactcgctcacgagctaagaagcaacaaggcacagcccaagctcatgcggatgcgtctagaaactcaagtacccgtgctgaacgcgagatagctgcggtcactgtaccgaatacaccagctgcagaggtgccagaggacgatccgtcaaagccccggccccgacgggtttacacacgcactcaaaagcgagcagagacaagcgagccacgccaatgtaccagacatgccgaggacggtactcgatgttccgagcaggcaatccccactggcaaactctgcaaacatcacacaaatgagaaccgcactgcatacaataccgtgtcacgtgaagacgccaagattcaagccgggctctgcacagagtgtggtgggaagaatgacaatgcattaaagcggtgtaataattgccgtaggagagccgcagaggcgagagcgcggcgaaaggcagggtgggaggtgcaatatcgtaagacaacgtggggggcgcaaaatgaggacgaagaagcatcctctgacgacgacgacggcggcgacttgccagaagataacaccaccgaagtcgaactgatccgagatccgcctcaagaaagcgaacgactcccgatcatccactcgaaaggtacagacaatctcgttcgacccgctgatgatgataccagactacaagcacttgccttcgctgccagcggcatgctagatagtctcatgcaaccgcaacctgacccagccgaagcccaacgaactgagcccagggacgtggacgaggcattgcgctcaaacaaacgatgctggaatgccatttccgaagcaccacaacatggggttcaagctaaatctttctgggatgtgatttga

SEQ ID NO: 77 - protein, 807 aa, Muscodor strobelii
  misc_feature: SGI Peptide ID NO. 559582
MWKEGRHRRIDLRRARKSQGRNKPVQSEGDNESDNDNDSDSDDDRDIQQDGMESHIVLNASKNADSEPDKEPDSVSLCAQRGLTRSQTRKACPRTQRCLVPNVGRKTAPPTLKTRGRPKKQQKPSEDTVSQPGKPSRAAERAPASDQRRKVSARAERTIARDQKRNGLCLFDAPKAAKITARARRAIARNEHRKETAIVTVPKELAADAPQETPSSSRAQRAQARDQQRENAGDTRQCGRVGCRDNAMPKRKLCEYHTSQLRHKYDRARDRQKERQALSASQLCTVGQCAQIALPNRKKCAEHAARKAQLDAATYEARTQAGLCVRCGGQRDGEQTECQSCRKKQSASKAKREVKPSDMNKSEYDKQVLNARKEAGLCTRCGGERDGKQSECKKCRTRRADNKAKRDPQGTISCRAKVAQMRKEKRVDHKARREAEDDGDPECYARSGTDLNTPSRLDSNQESDTERDAEWRAEPETETDSEYVAESGAESDTEPEKDSDDIHPRSQHANANKRIKTTSPAKHTRSRAKKQQGTAQAHADASRNSSTRAEREIAAVTVPNTPAAEVPEDDPSKPRPRRVYTRTQKRAETSEPRQCTRHAEDGTRCSEQAIPTGKLCKHHTNENRTAYNTVSREDAKIQAGLCTECGGKNDNALKRCNNCRRRAAEARARRKAGWEVQYRKTTWGAQNEDEEASSDDDDGGDLPEDNTTEVELIRDPPQESERLPIIHSKGTDNLVRPADDDTRLQALAFAASGMLDSLMQPQPDPAEAQRTEPRDVDEALRSNKRCWNAISEAPQHGVQAKSFWDVI

SEQ ID NO: 78 - DNA, 2592 bp, Muscodor strobelii
  misc_feature: SGI cDNA ID NO. 559583
  misc_feature: Encodes the peptide sequence at SEQ ID NO 79
atgtctgctctcgactctttcccatcgtctcctccgatgccgagcacatacgactctcgccagatatcttcttcctcgccctatctgccatcgatagaagaaatcatcgtgaagaccaagaggcccgccctacgacccgggtccaatgctgtgcccatacctgccaatgctcgagccaccttcaccacagctgcagatatcctacgagaggctcccgagatagacatagacaccgagaggatcactcattccccgccacgacgacccaaagccgccaagtctcgcaagaagaatgtctcgacagcaactcccctgttgaatgatcaggatccaaaccgcgcaatcgcaagtgcagagtcatcgtcaaaggataagccatggcagaaattcaagaacacgtcacctatcagttcaaagacgcgagaagaacccgtcctgcccaaggaggcgaagaaggtcacgacgcggaagccaccaaagaagaaggcagaggcagtatccaagcatttcacggtcaagggaaaagagacagatatagaggagaccggcgtgaaaggagcaactgaagcttcgccaagtggaatgggtggaccaacgcaagagccaaacttagaacctgcaatggcccgacgaggcgaatggacacctccacgagaccaagcagctattgtcctcgactcagattccgatgctagggaactcttctcgtcggttgacagaccggtggtgtcaaaggatgtttttcaaaatctacttgatgaatacggtagacaggatacagctacacaaccaccagcacgaccacagccggagatcctgaggaaaaggaagcaaatcgagctgatatctactgggaaagatgagaaagaggtgaacatcagcaaatccggctcagaatcacccacaaaggaacaacaggagaagccgggaaagaaaaagaagaaacagagcgaacccaaggtactggcaccgaagaaaaaggccaggactatcactgagctagctactgcccccttcatgccggtagaacccgaggtagaaatggcaggcccatctacgaaggagtcaatgttgaactatttcgataccgatggtgctatgtcggctcttgtggaacatcaatctgccgtcatgtctcaaagaaaaccaaaaggaaaggaatctaaggcgccacccaagacaaagcgcaaaaaaaagaccggtaccgtggccaatccgatcctcttatcacctagctctgcattgaagcagtcctcgaaccaagattttgtctttggtacatcgagtcagctcatgcaggaggattcgcctactatgttgagagatctgcaagctgcgattcgggcatctaacacgatcgactcggatccatttgaagacaatgttcgacaacgtttgtggaatgctggggcgcgtgatgaggagggtgaattaatggacattgaaacggtagatttgagacaggaatcatccatgagaccaataccagaggaatctgcattatcagagggccagacctttgtcgatatcaacgacctcttggactcgccagccactacggagccagcgccgaaaggggctacgcaggcggcgaaatctcactttttccaaactcaggccgcctctgatcatacttccagctcaaatacccccacttcacagacatcaactattacgaccgccacgaccgccacgaccgccacaaccactacaatcaccagctccgccagctccactccccgccccaactttgatttgttcaccgacgctcaattagccaagcaaattgcatcttacggattcaaggccgtgaagaagcgaccaacgatgatcgcgcttcttaatcagtgctggataagtcaacactccggtgcgacagcacccgcccagacacagccattgtcaaggaaatctcgcagtccaagcccggctcagaaaaagccgtccagtgctcctgccgtgaaagcagctgccaaaactacaaagccacgtgctcgggcgcgagccaagaaggacgacacaatgacagatgcgaatgctacgacgcaacctactatatcagaattacctagtcctagtcgggcgcgcggacgtccaaagaagactcagacggcccctgcccctatccaacctgcaactaccgcaccgagcccaaagagacggcccggccggccaagaaagaacagcgctggctctatcgagattgctgattctgaaggcgagagtgcgctatccatatctgaggatgaaatcacatcaccaatggacgtcacgaatgtggacgaagccgacatgtcattggcattatcccctacagagcatcaagccgaactgttcagacatatcacaaaagcagtaacgtctgcgccacgatcgacaaacccagaaaatccgtcttggcaggagaagatgctactctatgaccctgttgtccttgaagatcttgcctcgtggctgaacggcggtgagctgacacgagttggtcacgatggggaggtgtctgcttcggacgtcaagaagtggtgcgaaagtaatagcgtgaactgcatgtcgcggcagaatttacacggaaaggaacggaagcgatactga

SEQ ID NO: 79 - protein, 863 aa, Muscodor strobelii
  misc_feature: SGI Peptide ID NO. 559583
  misc_feature (7)..(837): NCBI GI: 145605822 Blast Desc: MGG_06838 [Magnaporthe grisea 70-15] gi|145013605|gb|EDJ98246.1| MGG_06838 [Magnaporthe grisea 70-15]
  misc_feature (1)..(863): NCBI GI: 256734804 Blast Desc: NECHADRAFT_98986 [Nectria haematococca mpVI 77-13-4]
  misc_feature (17)..(846): NCBI GI: 116182800 Blast Desc: CHGG_02028 [Chaetomium globosum CBS 148.51] gi|88186325|gb|EAQ93793.1| CHGG_02028 [Chaetomium globosum CBS 148.51]
  misc_feature (119)..(863): NCBI GI: 261361413 Blast Desc: conserved [Verticillium albo-atrum VaMs.102]
  misc_feature (130)..(863): NCBI GI: 46107832 Blast Desc: FG00799.1 [Gibberella zeae PH-1]
  misc_feature (203)..(863): NCBI GI: 156039884 Blast Desc: SS1G_12078 [Sclerotinia sclerotiorum 1980] gi|263508721|sp|A7F2D1.1|SLX4_SCLS1 RecName: Full=Structure-specific endonuclease subunit slx4 SS1G_12078
  misc_feature (162)..(863): NCBI GI: 154296012 Blast Desc: BC1G_13159 [Botryotinia fuckeliana B05.10] gi|263505999|sp|A6SK19.1|SLX4_BOTFB RecName: Full=Structure-specific endonuclease subunit slx4 BC1G_13159
  misc_feature (204)..(854): NCBI GI: 121710490 Blast Desc: conserved [Aspergillus clavatus NRRL 1] gi|263505661|sp|A1CEY6.1|SLX4_ASPCL RecName: Full=Structure-specific endonuclease subunit slx4 conserved NRRL
  misc_feature (535)..(862): NCBI GI: 171694690 Blast Desc: protein product [Podospora anserina] gi|170947587|emb|CAP59748.1| protein product [Podospora anserina]
  misc_feature (204)..(852): NCBI GI: 263506177 Blast Desc: protein product [Podospora anserina] gi|170947587|emb|CAP59748.1| protein product [Podospora anserina]
MSALDSFPSSPPMPSTYDSRQISSSSPYLPSIEEIIVKTKRPALRPGSNAVPIPANARATFTTAADILREAPEIDIDTERITHSPPRRPKAAKSRKKNVSTATPLLNDQDPNRAIASAESSSKDKPWQKFKNTSPISSKTREEPVLPKEAKKVTTRKPPKKKAEAVSKHFTVKGKETDIEETGVKGATEASPSGMGGPTQEPNLEPAMARRGEWTPPRDQAAIVLDSDSDARELFSSVDRPVVSKDVFQNLLDEYGRQDTATQPPARPQPEILRKRKQIELISTGKDEKEVNISKSGSESPTKEQQEKPGKKKKKQSEPKVLAPKKKARTITELATAPFMPVEPEVEMAGPSTKESMLNYFDTDGAMSALVEHQSAVMSQRKPKGKESKAPPKTKRKKKTGTVANPILLSPSSALKQSSNQDFVFGTSSQLMQEDSPTMLRDLQAAIRASNTIDSDPFEDNVRQRLWNAGARDEEGELMDIETVDLRQESSMRPIPEESALSEGQTFVDINDLLDSPATTEPAPKGATQAAKSHFFQTQAASDHTSSSNTPTSQTSTITTATTATTATTTTITSSASSTPRPNFDLFTDAQLAKQIASYGFKAVKKRPTMIALLNQCWISQHSGATAPAQTQPLSRKSRSPSPAQKKPSSAPAVKAAAKTTKPRARARAKKDDTMTDANATTQPTISELPSPSRARGRPKKTQTAPAPIQPATTAPSPKRRPGRPRKNSAGSIEIADSEGESALSISEDEITSPMDVTNVDEADMSLALSPTEHQAELFRHITKAVTSAPRSTNPENPSWQEKMLLYDPVVLEDLASWLNGGELTRVGHDGEVSASDVKKWCESNSVNCMSRQNLHGKERKRY

SEQ ID NO: 80 - DNA, 3062 bp, Muscodor strobelii
  misc_feature: SGI EST ID NO. CUFF.285.0
  misc_feature: Variant of the nucleotide sequence at SEQ ID NO 78
acgcaacccgcgactccacacgtccatgcatctatctctttgttcactggcgacatcgttcatccgacaacagatggtgccaccttgaagagtttggattgacgtgcttgcttttgtccccttgtatataatgcaattgttactggcgtagtcttttttgttcctcgatacttcatcctgtcgacccatcgcgttctcgggtgcgcctggcgcataccttcaccatcgtcttctttgtgcgctgcatgcgtttcacggcgccgaccacatccagccatgtctgctctcgactctttcccatcgtctcctccgatgccgagcacatacgactctcgccagatatcttcttcctcgccctatctgccatcgatagaagaaatcatcgtgaagaccaagaggcccgccctacgacccgggtccaatgctgtgcccatacctgccaatgctcgagccaccttcaccacagctgcagatatcctacgagaggctcccgagatagacatagacaccgagaggatcactcattccccgccacgacgacccaaagccgccaagtctcgcaagaagaatgtctcgacagcaactcccctgttgaatgatcaggatccaaaccgcgcaatcgcaagtgcagagtcatcgtcaaaggataagccatggcagaaattcaagaacacgtcacctatcagttcaaagacgcgagaagaacccgtcctgcccaaggaggcgaagaaggtcacgacgcggaagccaccaaagaagaaggcagaggcagtatccaagcatttcacggtcaagggaaaagagacagatatagaggagaccggcgtgaaaggagcaactgaagcttcgccaagtggaatgggtggaccaacgcaagagccaaacttagaacctgcaatggcccgacgaggcgaatggacacctccacgagaccaagcagctattgtcctcgactcagattccgatgctagggaactcttctcgtcggttgacagaccggtggtgtcaaaggatgtttttcaaaatctacttgatgaatacggtagacaggatacagctacacaaccaccagcacgaccacagccggagatcctgaggaaaaggaagcaaatcgagctgatatctactgggaaagatgagaaagaggtgaacatcagcaaatccggctcagaatcacccacaaaggaacaacaggagaagccgggaaagaaaaagaagaaacagagcgaacccaaggtactggcaccgaagaaaaaggccaggactatcactgagctagctactgcccccttcatgccggtagaacccgaggtagaaatggcaggcccatctacgaaggagtcaatgttgaactatttcgataccgatggtgctatgtcggctcttgtggaacatcaatctgccgtcatgtctcaaagaaaaccaaaaggaaaggaatctaaggcgccacccaagacaaagcgcaaaaaaaagaccggtaccgtggccaatccgatcctcttatcacctagctctgcattgaagcagtcctcgaaccaagattttgtctttggtacatcgagtcagctcatgcaggaggattcgcctactatgttgagagatctgcaagctgcgattcgggcatctaacacgatcgactcggatccatttgaagacaatgttcgacaacgtttgtggaatgctggggcgcgtgatgaggagggtgaattaatggacattgaaacggtagatttgagacaggaatcatccatgagaccaataccagaggaatctgcattatcagagggccagacctttgtcgatatcaacgacctcttggactcgccagccactacggagccagcgccgaaaggggctacgcaggcggcgaaatctcactttttccaaactcaggccgcctctgatcatacttccagctcaaatacccccacttcacagacatcaactattacgaccgccacgaccgccacgaccgccacaaccactacaatcaccagctccgccagctccactccccgccccaactttgatttgttcaccgacgctcaattagccaagcaaattgcatcttacggattcaaggccgtgaagaagcgaccaacgatgatcgcgcttcttaatcagtgctggataagtcaacactccggtgcgacagcacccgcccagacacagccattgtcaaggaaatctcgcagtccaagcccggctcagaaaaagccgtccagtgctcctgccgtgaaagcagctgccaaaactacaaagccacgtgctcgggcgcgagccaagaaggacgacacaatgacagatgcgaatgctacgacgcaacctactatatcagaattacctagtcctagtcgggcgcgcggacgtccaaagaagactcagacggcccctgcccctatccaacctgcaactaccgcaccgagcccaaagagacggcccggccggccaagaaagaacagcgctggctctatcgagattgctgattctgaaggcgagagtgcgctatccatatctgaggatgaaatcacatcaccaatggacgtcacgaatgtggacgaagccgacatgtcattggcattatcccctacagagcatcaagccgaactgttcagacatatcacaaaagcagtaacgtctgcgccacgatcgacaaacccagaaaatccgtcttggcaggagaagatgctactctatgaccctgttgtccttgaagatcttgcctcgtggctgaacggcggtgagctgacacgagttggtcacgatggggaggtgtctgcttcggacgtcaagaagtggtgcgaaagtaatagcgtgaactgcatgtcgcggcagaatttacacggaaaggaacggaagcgatactgaataatgaaacgactattgtgtttgaatatggcatgagcatggatattatacgctcacctgataccctgttgactacttctagcgcagaattgactcactggaatgacatcacacattggacacttacgttacattgggaatgaacaaacacttgcctttacagtgatgatgaaatatatggatttaacctttcc

SEQ ID NO: 81 - DNA, 264 bp, Muscodor strobelii
  misc_feature: SGI cDNA ID NO. 559584
  misc_feature: Encodes the peptide sequence at SEQ ID NO 82
atggagaacgacaagggagatatcgtcgacctctacgtcccgcgcaagtgcagcgccacgaaccgcttgatcaaggctaccgatcaccagtccgtccagatcagcgtcgccaagctcgatgagagcggtcgccagatccccggcgagaaccacgtctacgccctctgcggcttcgtccgtgccatgggcgagagcgacgatgccttcaaccgcatcacccagaaggacggcctgctcaagaatgtctggagcgccagccgataa

SEQ ID NO: 82 - protein, 87 aa, Muscodor strobelii
  misc_feature: SGI Peptide ID NO. 559584
  misc_feature (1)..(82): Pfam Id: PF01249 Pfam Desc: Ribosomal protein S21e
  misc_feature (1)..(87): NCBI GI: 39977905 Blast Desc: MGG_06837 [Magnaporthe grisea 70-15] gi|59802922|gb|AAX07666.1| 40S ribosomal protein S21-like protein [Magnaporthe grisea] gi|145013606|gb|EDJ98247.1| MGG_06837 grisea
  misc_feature (1)..(87): NCBI GI: 256735512 Blast Desc: [Nectria haematococca mpVI 77-13-4]
  misc_feature (1)..(87): NCBI GI: 46107830 Blast Desc: RS21_NEUCR 40S ribosomal protein S21 (CRP7) [Gibberella zeae PH-1]
  misc_feature (1)..(87): NCBI GI: 261361414 Blast Desc: 40S ribosomal protein S21 [Verticillium albo-atrum VaMs.102]
  misc_feature (1)..(87): NCBI GI: 171694688 Blast Desc: protein product [Podospora anserina] gi|170947586|emb|CAP59747.1| protein product [Podospora anserina]
  misc_feature (1)..(86): NCBI GI: 225677999 Blast Desc: 40S ribosomal protein S21 [Paracoccidioides brasiliensis Pb03] gi|226287250|gb|EEH42763.1| ribosomal protein S21E [Paracoccidioides brasiliensis Pb18]
  misc_feature (1)..(85): NCBI GI: 154296014 Blast Desc: 40S ribosomal protein S21 [Botryotinia fuckeliana B05.10] gi|156039882|ref|XP_001587048.1| 40S ribosomal protein S21 [Sclerotinia sclerotiorum 1980] gi|150843812|gb|EDN19005.1|
  misc_feature (1)..(86): NCBI GI: 255943183 Blast Desc: Pc18g05330 [Penicillium chrysogenum Wisconsin 54-1255] gi|211587093|emb|CAP94757.1| Pc18g05330 [Penicillium chrysogenum Wisconsin 54-1255]
  misc_feature (1)..(87): NCBI GI: 238843180 Blast Desc: 40S ribosomal protein S21 [Microsporum canis CBS 113480]
  misc_feature (1)..(86): NCBI GI: 261196982 Blast Desc: 30S ribosomal protein S21e [Ajellomyces dermatitidis SLH14081] gi|239596139|gb|EEQ78720.1| 30S ribosomal protein S21e [Ajellomyces dermatitidis SLH14081] gi|239609725|gb|EEQ86712.1|
MENDKGDIVDLYVPRKCSATNRLIKATDHQSVQISVAKLDESGRQIPGENHVYALCGFVRAMGESDDAFNRITQKDGLLKNVWSASR

SEQ ID NO: 83 - DNA, 3196 bp, Muscodor strobelii
  misc_feature: SGI EST ID NO. CUFF.288.0
  misc_feature: Variant of the nucleotide sequence at SEQ ID NO 81
gcgaaagagtctcgaagtcaggtgatgagacagccgaagcaaaaagtgacatcggtacctgataacagccccacgcaccgcccaccaactgcgcagaggggccaaaattgatagcccgagccggatgagcccactgtccaccacttttgttgccatctcacgaacttcgtctccctgtcaccagcgccaacttcaccgtaccgacaccaccacgccctcaccacctctcccacctcacagtccgccaagatggagaacgacaagggagatatcgtcgacctctacgtcccgcgcaagtgcagcgccacgaaccgcttgatcaaggctaccgatcaccagtccgtccagatcagcgtcgccaagctcgatgagagcggtcgccagatccccggcgagaaccacgtctacgccctctgcggcttcgtccgtgccatgggcgagagcgacgatgccttcaaccgcatcacccagaaggacggcctgctcaagaatgtctggagcgccagccgataaacactttgcacatggtctcggcgttctggggatatcattcgtggttgggtcgatcatggcaggacgaatcgattgtttgcagctagtccgatagacacttggccaaggtcatagcacagcttcgggtccggaaaaaggcacaatcacaataccaacaagttaaactgcccaaacctgcccattgctccggccgacctctcatgtatcgttcgtggtggtgatatgatcatgtactttatcccggctggtaaagtcttctcgcatctgcctcgcggtaattctgtgggcgaggagtctggggctactccgatagtctccatgccggagagtaaaacaacggcctttgaaaaagctgtggtgttcgagctgttcatcatggcacagatacgggtctgacatctatagcaagagcacactgtttcctctcattgcgcacatgtttagggctctaatgtgactgccgtgcttaactgaattatgttggtattagaaatatcagttagttttgtaggtaacactgatcactctagtcctccggaatcgtgcccctcttaagcgcccgaatgacacccatttttggatccagtatgcacgtgaaatggctacattcattgagcgtcgggtaatgcgacagccatctgcgcagcgtcgtctcgctgatacttcgtggcaaagtggacgtagacgtgcttgcataatctcgctcgaccgagtcagtattagtcgacgtcggtccagttcgtctctggagtttcccaacgtgtcgatcccatctcctctgaatgcattccagtctctccgtcgactcttcaacccaaccctcgactccaaaagaagacttgatgactgcgcgcctgtccgtacttgacgtctcgtcgctgtctgcttcatcacccgggtcatggttcgtctgcgcgatgaattccttggatgtcttcactgagcctgttatgtaatcctttacaatcaccgcagcttcatcaccgttgcagaggatgagatagcaaggcgcagtcggtattcgagtcagagctcttgcttgccttgtcagatcagaggtctcatcgatactgaacttcctctttcctttgacagaaatctcttcgtccagatagactcgaacaggtttcaagatatatctgcgcacaaccgagccaattgaccttcgcttgccgagtaataccatcaattgatgccaccgaagccgccggccggagcaatcgtggcatggacggtgattgagtgatattgatagatctttcctgtaatttgattaatctcgatattcatgcgtatgagagtgtgcaatatcacatcatctggcagacacacttacctcacagcagtcaaggagccaacgaaaccagcatacgtgattgaccgagcaatgaccagccccggattcgcagacgaagaattgacgaactccagcacaacgagtatatctcgtaactcatccataccccaatccagcgtccggaaatgcatcaacctcgtcgactgcgcatccagccctccactgctccttctcgaaccttgtggaggggccataggtaccgcaccagacgtacaacccaacaagcaatccaagagattattcaacgccaccaacaggtatagaggcacacctgagccagccgatatccccttgatttcttcgttttcctcttcgtcatagacccggcgtaggatgtgctttgacgcagtcctaataatcgagcgcaaccatgcggccccgataatgtcacgtaggaggtcgtcgtacaaggtagtcaaggaccgcatacgtgcccccatgctctgcacaacttcattgtaccgctcgcgtgggtgtcgtgcgaggtcgatggtgaagctagggattggctcttggcaaaattccggagtcgacatggtgatactggaggtcgagaaggctagagatcaagtgtacggtgaattttcatgcaaatatgcgaaattcttgccttggccagcatcgagcgactctgcatactctgttgtactgccgcaatcaggcagcatcgaatcacgtgacgctggtggtttgggggcgacgagaatgagtgaatgatagagccattgatgaggatatcttataagatctgactcatatgtttcggagaggaaaaagactatgtagacaacccgatgcgaaagccagtgatatgtagtgtatccgtagagcgtgaagtgatgcgatgtgtagctccaaatcaagcagtatcagaaacgctgttggatgaggtcatcgccgaacgtcgggtttgcggtcgatgggtggaggttttaaatgagtgaaggaccgatttcatggcattgggccttcgtcgcgagacatgatcattgtctacgagcgaccccgacgcctagataacggtccaaagatatctggcatggtgttgagatcgtggaggtagtcggagataagtgaaacctggagaacccgcgaatcgacactaaataagccactaattcaggggagttgcgatcagctagcggcagtgagcgatctcaagaatgcgatgacgcacaagacatcgggaaactccagtgcagctttgacaagctgaatgagcagctatgaaaggccaatatgcaaaaggtaatctcgtttggtaagatgaggtaaggtcaattctctgttttggattactggtcctcgatgcgtacctctctttcc

SEQ ID NO: 84 - DNA, 1293 bp, Muscodor strobelii
  misc_feature: SGI cDNA ID NO. 559585
  misc_feature: Elevated expression when VOC is produced
  misc_feature: Encodes the peptide sequence at SEQ ID NO 85
atgtcgactccggaattttgccaagagccaatccctagcttcaccatcgacctcgcacgacacccacgcgagcggtacaatgaagttgtgcagagcatgggggcacgtatgcggtccttgactaccttgtacgacgacctcctacgtgacattatcggggccgcatggttgcgctcgattattaggactgcgtcaaagcacatcctacgccgggtctatgacgaagaggaaaacgaagaaatcaaggggatatcggctggctcaggtgtgcctctatacctgttggtggcgttgaataatctcttggattgcttgttgggttgtacgtctggtgcggtacctatggcccctccacaaggttcgagaaggagcagtggagggctggatgcgcagtcgacgaggttgatgcatttccggacgctggattggggtatggatgagttacgagatatactcgttgtgctggagttcgtcaattcttcgtctgcgaatccggggctggtcattgctcggtcaatcacgtatgctggtttcgttggctccttgactgctgtgaggaaagatctatcaatatcactcaatcaccgtccatgccacgattgctccggccggcggcttcggtggcatcaattgatggtattactcggcaagcgaaggtcaattggctcggttgtgcgcagatatatcttgaaacctgttcgagtctatctggacgaagagatttctgtcaaaggaaagaggaagttcagtatcgatgagacctctgatctgacaaggcaagcaagagctctgactcgaataccgactgcgccttgctatctcatcctctgcaacggtgatgaagctgcggtgattgtaaaggattacataacaggctcagtgaagacatccaaggaattcatcgcgcagacgaaccatgacccgggtgatgaagcagacagcgacgagacgtcaagtacggacaggcgcgcagtcatcaagtcttcttttggagtcgagggttgggttgaagagtcgacggagagactggaatgcattcagaggagatgggatcgacacgttgggaaactccagagacgaactggaccgacgtcgactaatactgactcggtcgagcgagattatgcaagcacgtctacgtccactttgccacgaagtatcagcgagacgacgctgcgcagatggctgtcgcattacccgacgctcaatgaatgtagccatttcacgtgcatactggatccaaaaatgggtgtcattcgggcgcttaagaggggcacgattccggaggactag

SEQ ID NO: 85 - protein, 430 aa, Muscodor strobelii
  misc_feature: SGI Peptide ID NO. 559585
  misc_feature (10)..(430): NCBI GI: 261359357 Blast Desc: conserved [Verticillium albo-atrum VaMs.102]
  misc_feature (8)..(429): NCBI GI: 256725884 Blast Desc: NECHADRAFT_82043 [Nectria haematococca mpVI 77-13-4]
  misc_feature (12)..(430): NCBI GI: 159128438 Blast Desc: conserved [Aspergillus fumigatus A1163]
  misc_feature (12)..(430): NCBI GI: 70985841 Blast Desc: conserved [Aspergillus fumigatus Af293] gi|66846055|gb|EAL86388.1| conserved [Aspergillus fumigatus Af293]
  misc_feature (11)..(419): NCBI GI: 212536212 Blast Desc: conserved [Penicillium marneffei ATCC 18224] gi|210070661|gb|EEA24751.1| conserved [Penicillium marneffei ATCC 18224]
  misc_feature (12)..(428): NCBI GI: 226284456 Blast Desc: conserved [Paracoccidioides brasiliensis Pb01]
  misc_feature (12)..(428): NCBI GI: 226294220 Blast Desc: conserved [Paracoccidioides brasiliensis Pb18]
  misc_feature (11)..(428): NCBI GI: 121712415 Blast Desc: conserved [Aspergillus clavatus NRRL 1] gi|119401971|gb|EAW12393.1| conserved [Aspergillus clavatus NRRL 1]
  misc_feature (12)..(430): NCBI GI: 119473725 Blast Desc: NFIA_001900 [Neosartorya fischeri NRRL 181] gi|119406891|gb|EAW16841.1| conserved [Neosartorya fischeri NRRL 181]
  misc_feature (12)..(426): NCBI GI: 238839403 Blast Desc: conserved [Microsporum canis CBS 113480]
  misc_feature (10)..(307): SWISSPROT Homolog: EC 3.5.1.23 Ceramidase
  misc_feature: Useful for introducing or modulating the production of volatile compounds
MSTPEFCQEPIPSFTIDLARHPRERYNEVVQSMGARMRSLTTLYDDLLRDIIGAAWLRSIIRTASKHILRRVYDEEENEEIKGISAGSGVPLYLLVALNNLLDCLLGCTSGAVPMAPPQGSRRSSGGLDAQSTRLMHFRTLDWGMDELRDILVVLEFVNSSSANPGLVIARSITYAGFVGSLTAVRKDLSISLNHRPCHDCSGRRLRWHQLMVLLGKRRSIGSVVRRYILKPVRVYLDEEISVKGKRKFSIDETSDLTRQARALTRIPTAPCYLILCNGDEAAVIVKDYITGSVKTSKEFIAQTNHDPGDEADSDETSSTDRRAVIKSSFGVEGWVEESTERLECIQRRWDRHVGKLQRRTGPTSTNTDSVERDYASTSTSTLPRSISETTLRRWLSHYPTLNECSHFTCILDPKMGVIRALKRGTIPED

SEQ ID NO: 86 - DNA, 1782 bp, Muscodor strobelii
  misc_feature: SGI cDNA ID NO. 559586
  misc_feature: Encodes the peptide sequence at SEQ ID NO 87
atgcctcccaagaaagctaccaagcgaaaagctatcacagacgatgagtcgtcgtcctcatccaccaagaaaacaaagctcgagaatagagcatccaatcctctacgtgaaccccatcccttctcagccgaagccgaagaaaatggcattgtactgcgcaaatactatcctcacgagatgagcaatgcccgggctctcgcctacaacgacaacaagctccctcgccccatcgaagtgctcaccgctgcattggaagagacgagggatgctagacagaagataaaagtcaaagatgcggtggttcattggttcaagatggatctgagaacaaatgataaccgcgcattgtgggaggcaagtgagaaggcgaaagaagctggtgtaccacttatttgtatttatatggtgagtccggaggatttcgaagctcatcttactgcgccgatccgcgtggactttacgatacggactttggaagttctgaagcgagatctggctgcgttggatattccgttatatgtcgagactgtgtggaaacgaaaagagatacccgaccgcatcatcgacttcatggaagagtggggtgccagtcatctcttcacgaatatggagtatgaggtcgatgagcttcggagagaggccaagatggtgaggaaatgtgctgagagaggaatcgcgatggaggtatttcacgatacttgtgttgtgccgcccggagcattgatgacgggggccgggaggcagtatgcggtctatactccatggtttcgagcgtgggttgctcatgtccatgctaatcctgacttgctcgccatgtttgatcggccagcaaagaattcgccgagctcgaaggagaaggtcgcagcattgttcgattgcgagattcctgaagtgccggagaacaagagactctctgatgaagacgccaagcgatatggcgcaatctggcctgcaggggaacgcgaagcagttgatcggctagataagttttgcgaggagaaaatcgggcagtattccaaacggaggaacttcccctctgaaatgggcacgtcttcgatatcagtacatctcgctgcggggacgttgagtgccaggacagcgatacggacagcaagagacagaaacaagacgaagaaactagatgcaggcattgaaggaattcagacatggatcagtgaagtcgcgtggagggacttctataagcatgtcttggttcattggccatacatctgcatgaacaaacccttcaaacctgagtactcaaatatcgaatggtcctacaacacggcacacttcaaagcatggagcgaaggacgaacaggcttccccatagtcgacgccgccatgcgacaagtgcagggtatgggctggatgcataaccggtgtcgcatgattgtcgcttcattcctggccaaagatttgcttcttgattggcgtatgggtgagcgtttcttcatgcagaatctcatcgatggagatttcgcctccaataatggcggttggggcttcagtgcttccgtaggcgttgatccccagccgtatttccgaatcttcaatccgttgctccagagtgagaaatttgatcctgaaggggagtatattaagaagtgggttcctgagctacgcgacgtgaaaggcaaggcggttcatgatccgtatggacgaggcgctgggccacagatgaagaagaaaggatatcctgagcccattgttgatcataaggatagtcgaaatcgtgcgctgagcgcttacaaggctgggcttgggagggataagccttga

SEQ ID NO: 87 - protein, 593 aa, Muscodor strobelii
  misc_feature: SGI Peptide ID NO. 559586
  misc_feature (98)..(280): Pfam Id: PF00875 Pfam Desc: DNA photolyase
  misc_feature (317)..(588): Pfam Id: PF03441 Pfam Desc: FAD binding domain of DNA photolyase
  misc_feature (1)..(591): NCBI GI: 261361435 Blast Desc: deoxyribodipyrimidine photo-lyase [Verticillium albo-atrum VaMs.102]
  misc_feature (1)..(589): NCBI GI: 30315019 Blast Desc: AF500083_1 photolyase [Fusarium oxysporum]
  misc_feature (2)..(588): NCBI GI: 171694686 Blast Desc: protein product [Podospora anserina] gi|170947585|emb|CAP59746.1| protein product [Podospora anserina]
  misc_feature (3)..(592): NCBI GI: 46107828 Blast Desc: FG00797.1 [Gibberella zeae PH-1]
  misc_feature (1)..(590): NCBI GI: 3947746 Blast Desc: DNA photolyase [Hypocrea lixii]
  misc_feature (1)..(588): NCBI GI: 256734800 Blast Desc: [Nectria haematococca mpVI 77-13-4]
  misc_feature (1)..(591): NCBI GI: 145605824 Blast Desc: MGG_06836 [Magnaporthe grisea 70-15] gi|145013607|gb|EDJ98248.1| MGG_06836 [Magnaporthe grisea 70-15]
  misc_feature (3)..(591): NCBI GI: 85115208 Blast Desc: NCU08626 [Neurospora crassa OR74A] gi|130155|sp|P27526.1|PHR_NEUCR RecName: Full=Deoxyribodipyrimidine photo-lyase; AltName: Full=DNA enzyme
  misc_feature (18)..(574): NCBI GI: 156039880 Blast Desc: SS1G_12076 [Sclerotinia sclerotiorum 1980] gi|154696133|gb|EDN95871.1| SS1G_12076 [Sclerotinia sclerotiorum 1980]
  misc_feature (19)..(590): NCBI GI: 154296018 Blast Desc: BC1G_13162 [Botryotinia fuckeliana B05.10] gi|150843814|gb|EDN19007.1| BC1G_13162 [Botryotinia fuckeliana B05.10]
  misc_feature (3)..(591): SWISSPROT Homolog: EC 4.1.99.3 Deoxyribodipyrimidine photo-lyase
MPPKKATKRKAITDDESSSSSTKKTKLENRASNPLREPHPFSAEAEENGIVLRKYYPHEMSNARALAYNDNKLPRPIEVLTAALEETRDARQKIKVKDAVVHWFKMDLRTNDNRALWEASEKAKEAGVPLICIYMVSPEDFEAHLTAPIRVDFTIRTLEVLKRDLAALDIPLYVETVWKRKEIPDRIIDFMEEWGASHLFTNMEYEVDELRREAKMVRKCAERGIAMEVFHDTCVVPPGALMTGAGRQYAVYTPWFRAWVAHVHANPDLLAMFDRPAKNSPSSKEKVAALFDCEIPEVPENKRLSDEDAKRYGAIWPAGEREAVDRLDKFCEEKIGQYSKRRNFPSEMGTSSISVHLAAGTLSARTAIRTARDRNKTKKLDAGIEGIQTWISEVAWRDFYKHVLVHWPYICMNKPFKPEYSNIEWSYNTAHFKAWSEGRTGFPIVDAAMRQVQGMGWMHNRCRMIVASFLAKDLLLDWRMGERFFMQNLIDGDFASNNGGWGFSASVGVDPQPYFRIFNPLLQSEKFDPEGEYIKKWVPELRDVKGKAVHDPYGRGAGPQMKKKGYPEPIVDHKDSRNRALSAYKAGLGRDKP

SEQ ID NO: 88 - DNA, 600 bp, Muscodor strobelii
  misc_feature: SGI cDNA ID NO. 559587
  misc_feature: Encodes the peptide sequence at SEQ ID NO 89
atggcgatcgacagcgcccatgaagcgcaaaagagtaacaacggcgacaccactgtgaaaaacacaatcagcaaagtctcctctgacaactcgcgagcgctcgttctctcattccagcgtcgccgtttctcatcaccaccctacatcaccattgacccagttcaatccctctcacctctgggagattggcacatgatgtccaccctcgcacgaagccctgtatcagacaacatctgggtaatcaagatctcgccgcgcttcatcctacagcgcctctggcgtctcatgtttagccatgtcgacgtatgctacaactccaagctccacgctccccaaactgcttcagacttcctcctgattctcggctcaagaggcttcgacaatagacaagcattcgccttgattgcccgatgctggggcatataccacaaacgcgttacatcacgcaggattgaaggcaagagggctgatctcaacaagtacgccgactggctggagggtaggggcaagcgacagaggcgcggcaaccctatccatatcgcgttgaagagtgtcgccaagaagaaaaagaagaattccaaacgagtgaagaagccttaa

SEQ ID NO: 89 - protein, 199 aa, Muscodor strobelii
  misc_feature: SGI Peptide ID NO. 559587
MAIDSAHEAQKSNNGDTTVKNTISKVSSDNSRALVLSFQRRRFSSPPYITIDPVQSLSPLGDWHMMSTLARSPVSDNIWVIKISPRFILQRLWRLMFSHVDVCYNSKLHAPQTASDFLLILGSRGFDNRQAFALIARCWGIYHKRVTSRRIEGKRADLNKYADWLEGRGKRQRRGNPIHIALKSVAKKKKKNSKRVKKP

SEQ ID NO: 90 - DNA, 441 bp, Muscodor strobelii
  misc_feature: SGI EST ID NO. CUFF.258.0
  misc_feature: Variant of the nucleotide sequence at SEQ ID NO 88
cacaatcagcaaagtctcctctgacaactcgcgagcgctcgttctctcattccagcgtcgccgtttctcatcaccaccctacatcaccattgacccagttcaatccctctcacctctgggagattggcacatgatgtccaccctcgcacgaagccctgtatcagacaacatctgggtaatcaagatctcgccgcgcttcatcctacagcgcctctggcgtctcatgtttagccatgtcgacgtatgctacaactccaagctccacgctccccaaactgcttcagacttcctcctgattctcggctcaagaggcttcgacaatagacaagcattcgccttgattgcccgatgctggggcatataccacaaacgcgttacatcacgcaggattgaaggcaagagggctgatctcaacaagtacgccgactggctggagggtag

SEQ ID NO: 91 - DNA, 669 bp, Muscodor strobelii
  misc_feature: SGI cDNA ID NO. 559588
  misc_feature: Encodes the peptide sequence at SEQ ID NO 92
atggccaccatgattaaagagacggaaagtgcaactgagacccaagttggcaacggagtcatggtaatttcctcccacgacggagaggtcccctctcgcgacaaggacaagcgtgtgcagctactacccccagtcctcagaaactggcgtctagaggcgacgttgatgcgaagtccagccgtggacaatatctgggcgatccagattcagcccgtcaagattcggcgaagactttacgagctcataaagaagatgacccaacattcctactggagcgcaacacacgcgccccagacggcatcagattttctccgaattctcgcagctgcccgattccacgttgaggaagcgctcgatctgatcgatgacacctggggcctcgggccattcccccttactatcgcctatcttgacgagtggctccgcagaaccgacgctctccgcgactattggtgggagctgcggaatgaatatcgtatcctgcaagggctcagtcctctaccgaggccgaacagccgagataagcatgacaacgaggatttcttctcacggaagagggttatgcaaagaaagctactttttctaagatacaagttcagaagatcagttaagaactccctgaaggcagtcaagcgatcagcgagttaccttggttgctttacgcagtga

SEQ ID NO: 92 - protein, 222 aa, Muscodor strobelii
  misc_feature: SGI Peptide ID NO. 559588
MATMIKETESATETQVGNGVMVISSHDGEVPSRDKDKRVQLLPPVLRNWRLEATLMRSPAVDNIWAIQIQPVKIRRRLYELIKKMTQHSYWSATHAPQTASDFLRILAAARFHVEEALDLIDDTWGLGPFPLTIAYLDEWLRRTDALRDYWWELRNEYRILQGLSPLPRPNSRDKHDNEDFFSRKRVMQRKLLFLRYKFRRSVKNSLKAVKRSASYLGCFTQ

SEQ ID NO: 93 - DNA, 465 bp, Muscodor strobelii
  misc_feature: SGI cDNA ID NO. 559589
  misc_feature: Encodes the peptide sequence at SEQ ID NO 94
atggttttcaaaggtcccggcgtctaccaaatcgtgtcctaccagggccctaacttcaacgccaactcttggggtggcggttcccagattggccagcaggtcaagctttacccaaggaatcctctcaccgacaacgcgaaatggcaggttgcgcttgccagtgggagcggcgatgacgcccagtacttcatcatcaatcttgccaacggaggctacctgacagcaactagcaaggatcaaatcacttcatgccaatccaagttgccaactgatcctactgtgcgctggcaattcaagtactacaagaagcaggacaaatatgatgtttggaccgtgacttcggtctcgggcaatgggcagctcaattgcgctgggagcgggcactccgagggtactgacattctctcgtggaggatcgagaatggcgacaacactatgtggtactttgatcccgttggttggtag

SEQ ID NO: 94 - protein, 154 aa, Muscodor strobelii
  misc_feature: SGI Peptide ID NO. 559589
MVFKGPGVYQIVSYQGPNFNANSWGGGSQIGQQVKLYPRNPLTDNAKWQVALASGSGDDAQYFIINLANGGYLTATSKDQITSCQSKLPTDPTVRWQFKYYKKQDKYDVWTVTSVSGNGQLNCAGSGHSEGTDILSWRIENGDNTMWYFDPVGW

SEQ ID NO: 95 - DNA, 1137 bp, Muscodor strobelii
  misc_feature: SGI cDNA ID NO. 559590
  misc_feature: Elevated expression when VOC is produced
  misc_feature: Encodes the peptide sequence at SEQ ID NO 96
atgaaatcaacctcgctcttctccatcgcttctatgcgtggcatatttcgaccactacgcatcagctattctcgcatgaagaacaagaacgaaacagcggaacttggcatatacaatgtgactcccgaagatcacaccatgggccaatccttatggcagtatgtgacacagaaaatacatcgcgaccttcagaatgaatcaatcattgccattcatgtgaccggtgtccgtcagcgtcttgcgccagagagcgatgcgaccatcgactccttgaggcctaccgtgacctggatcaatgctacgacagtacaattgaactgcttcccgagcagcaacctcgtagttcactatgctagcctagtcactacctatcttgaactttgtaatcggcaacacgtttctgtacacttcgatttgcccagtgtcgatgaaacggtccgaatcatacgggaatccaatcttagagccatcggtcaagcagatgtcgtaattatcggaaacgtcaatcatctggaaggattcatggggactcggggcgattggcaaggattcagcagttccgcacatggtatctttcgctggcagagattcgtgtcgccggatggtcagagaggtgcacttattgggtgtgtagagcgaatatggggcgcaacaggtcatcatttccttgttgctctacgttcctatctcaaagtgaagactgtcatttacgtagcgaaatgtggcagcttgtcctcaaaatacgaaccaaacgaggggatagcaacaggacagcgagcctacatacaagacgagaccctaatagagtggtcaaatcccctcgagcatgctgtgagcgacgcagcgatggtcgcccgcggtcctgtcgtcaccgttcctacccctctatgtgagtctcgtgagtggttatcgcaatgggctcctaaagcaacctgggtggattgtgaggtcgcgtacatggcaaaagctgctgttgaattgggaatcgagttcggcttcttactcgttgtttccgataaccttcatcagacaagcgcaaggaacctgtcaaacgaagaatcagccaatgtcattgcaaaacgcaaaatattatacaaggaaatagctagaattctgaatagattcatacaagcttag

SEQ ID NO: 96 - protein, 378 aa, Muscodor strobelii
  misc_feature: SGI Peptide ID NO. 559590
  misc_feature (45)..(377): NCBI GI: 156062518 Blast Desc: SS1G_01375 [Sclerotinia sclerotiorum 1980] gi|154696711|gb|EDN96449.1| SS1G_01375 [Sclerotinia sclerotiorum 1980]
  misc_feature (40)..(373): NCBI GI: 282872242 Blast Desc: conserved [Streptomyces sp. ACT-1] gi|282574309|gb|EFB79744.1| conserved [Streptomyces sp. ACT-1]
  misc_feature (270)..(376): NCBI GI: 67541719 Blast Desc: AN7023.2 [Aspergillus nidulans FGSC A4] gi|40742479|gb|EAA61669.1| [Aspergillus nidulans FGSC A4] gi|259483665|tpe|CBF79240.1| TPA: conserved [Aspergillus nidulans
  misc_feature: Useful for introducing or modulating the production of volatile compounds
MKSTSLFSIASMRGIFRPLRISYSRMKNKNETAELGIYNVTPEDHTMGQSLWQYVTQKIHRDLQNESIIAIHVTGVRQRLAPESDATIDSLRPTVTWINATTVQLNCFPSSNLVVHYASLVTTYLELCNRQHVSVHFDLPSVDETVRIIRESNLRAIGQADVVIIGNVNHLEGFMGTRGDWQGFSSSAHGIFRWQRFVSPDGQRGALIGCVERIWGATGHHFLVALRSYLKVKTVIYVAKCGSLSSKYEPNEGIATGQRAYIQDETLIEWSNPLEHAVSDAAMVARGPVVTVPTPLCESREWLSQWAPKATWVDCEVAYMAKAAVELGIEFGFLLVVSDNLHQTSARNLSNEESANVIAKRKILYKEIARILNRFIQA

SEQ ID NO: 97 - DNA, 522 bp, Muscodor strobelii
  misc_feature: SGI cDNA ID NO. 559591
  misc_feature: Elevated expression when VOC is produced
  misc_feature: Encodes the peptide sequence at SEQ ID NO 98
atgtctacacatcagtctgctgcacctcggtctgccacaactccgacggatcgcccccgcgttccacgtgtcggagtggcgtctgtcgtatgcagacgcaatgccgataacgccgttgagctcttgctcggagagcggaagggcagtcacggcgcaggcacatgggcattcccgggcggccatctcgagatgggcgagtcatttcatgagtgtgccaagcgggaattggaggaagagaccggattacgcgccaaggacacaaaagagcccaacaacttcatggcggtaacgaacgatgtgtttgatgacgacaaacattatatcaccgtcttcatgaagtgcgacctggaagatatcgatgccatgcctcaaaacatggagccagagaaatgcgagggatggaagtgggttacgtgggaggaggtgaagacgtggtgtacgtcgggtaaatctgagaaagaatgtttcctaccgctgatcaacttggcaaagactcacccggacttgaatttcgggatctga

SEQ ID NO: 98 - protein, 173 aa, Muscodor strobelii
  misc_feature: SGI Peptide ID NO. 559591
  misc_feature (22)..(159): Pfam Id: PF00293 Pfam Desc: NUDIX domain
  misc_feature (22)..(170): NCBI GI: 261361404 Blast Desc: nudix domain containing protein [Verticillium albo-atrum VaMs.102]
  misc_feature (22)..(170): NCBI GI: 121714110 Blast Desc: NUDIX domain, [Aspergillus clavatus NRRL 1] gi|119402819|gb|EAW13240.1| NUDIX domain, [Aspergillus clavatus NRRL 1]
  misc_feature (22)..(169): NCBI GI: 46134079 Blast Desc: FG09179.1 [Gibberella zeae PH-1]
  misc_feature (22)..(162): NCBI GI: 256720816 Blast Desc: NECHADRAFT_9346 [Nectria haematococca mpVI 77-13-4]
  misc_feature (22)..(170): NCBI GI: 39959881 Blast Desc: MGG_09400 [Magnaporthe grisea 70-15] gi|145014364|gb|EDJ98932.1| MGG_09400 [Magnaporthe grisea 70-15]
  misc_feature (9)..(169): NCBI GI: 169771317 Blast Desc: [Aspergillus oryzae RIB40] gi|238486140|ref|XP_002374308.1| NUDIX domain, [Aspergillus flavus NRRL3357] gi|83767987|dbj|BAE58126.1| protein product
  misc_feature (21)..(162): NCBI GI: 85119149 Blast Desc: NCU02895 [Neurospora crassa OR74A] gi|28927388|gb|EAA36341.1| NCU02895 [Neurospora crassa OR74A]
  misc_feature (17)..(170): NCBI GI: 169618912 Blast Desc: SNOG_12648 [Phaeosphaeria nodorum SN15] gi|160703706|gb|EAT79946.2| SNOG_12648 [Phaeosphaeria nodorum SN15]
  misc_feature (36)..(170): NCBI GI: 119477759 Blast Desc: NUDIX domain, [Neosartorya fischeri NRRL 181] gi|119407445|gb|EAW17394.1| NUDIX domain, [Neosartorya fischeri NRRL 181]
  misc_feature (21)..(169): NCBI GI: 116182786 Blast Desc: CHGG_02021 [Chaetomium globosum CBS 148.51] gi|88186318|gb|EAQ93786.1| CHGG_02021 [Chaetomium globosum CBS 148.51]
  misc_feature (21)..(142): SWISSPROT Homolog: EC 3.6.1.22 NAD(+) diphosphatase
  misc_feature: Useful for introducing or modulating the production of volatile compounds
MSTHQSAAPRSATTPTDRPRVPRVGVASVVCRRNADNAVELLLGERKGSHGAGTWAFPGGHLEMGESFHECAKRELEEETGLRAKDTKEPNNFMAVTNDVFDDDKHYITVFMKCDLEDIDAMPQNMEPEKCEGWKWVTWEEVKTWCTSGKSEKECFLPLINLAKTHPDLNFGI

SEQ ID NO: 99 - DNA, 2386 bp, Muscodor strobelii
  misc_feature: SGI EST ID NO. CUFF.459.0
  misc_feature: Variant of the nucleotide sequence at SEQ ID NO 97
tgaatctattcagaattctagctatttccttgtataatattttgcgttttgcaatgacattggctgattcttcgtttgacaggttccttgcgcttgtctgatgaaggttatcggaaacaacgagtaagaagccgaactcgattcccaattcaacagcagcttttgccatgtacgcgacctcacaatccacccaggttgctttaggagcccattgcgataaccactcacgagactcacatagaggggtaggaacggtgacgacaggaccgcgggcgaccatcgctgcgtcgctcacagcatgctcgaggggatttgaccactctattagggtctcgtcttgtatgtaggctcgctgtcctgttgctatcccctcgtttggttcgtattttgaggacaagctgccacatttcgctacgtaaatgacagtcttcactttgagataggaacgtagagcaacaaggaaatgatgacctgttgcgccccatattcgctctacacacccaataagtgcacctctctgaccatccggcgacacgaatctctgccagcgaaagataccatgtgcggaactgctgaatccttgccaatcgccccgagtccccatgaatccttccagatgattgacgtttccgataattacgacatctgcttgaccgatggctctaagattggattcccgtatgattcggaccgtttcatcgacactgggcaaatcgaagtgtacagaaacgtgttgccgattacaaagttcaagataggtagtgactaggctagcatagtgaactacgaggttgctgctcgggaagcagttcaattgtactgtcgtagcattgatccaggtcacggtaggcctcaaggagtcgatggtcgcatcgctctctggcgcaagacgctgacggacaccggtcacatgaatggcaatgattgattcattctgaaggtcgcgatgtattttctgtgtcacatactgccataaggattggcccatggtgtgatcttcgggagtcacattgtatatgccaagttccgctgtttcgttcttgttcttcatgcgagaatagctgatgcgtagtggtcgaaatatgccacgcatagaagcgatggagaagagcgaggttgatttcatgtttctgccttgagggagatccagctgcagggtggagcgacatcatatcgaagctttagtgagggacccatctataatgaatgtaggcggctcgtgttcatcgatttgcgggatgaatgcgtcaaactcactgcgccaacagcgtggaatgtgacaataattgtcattgtggtgattctatctttaggtgtaccggattggaatgcggcgattaccccaacatgctctttgttctttcgaaatcacgtcgtatagatatgggaaaggtgccatgtcgagtcataggctatcatgtgtattaacaagcggactttgtccttgtgatacagaatatctcatgtttgtcgctgacaggattaacttacttcgcccaaggcacactacaaggcaagccaatcaaggacccgctccgaacccgctcacctacggtcaggaacgatcgatccgagataaaaacgatgctgaatccaatcgaaaatggtttctttcgcaaaataaagagtcgcatctttaaactatcgtcgatgtctacacatcagtctgctgcacctcggtctgccacaactccgacggatcgcccccgcgttccacgtgtcggagtggcgtctgtcgtatgcagacgcaatgccgataacgccgttgagctcttgctcggagagcggaagggcagtcacggcgcaggcacatgggcattcccgggcggccatctcgagatgggcgagtcatttcatgagtgtgccaagcgggaattggaggaagagaccggattacgcgccaaggacacaaaagagcccaacaacttcatggcggtaacgaacgatgtgtttgatgacgacaaacattatatcaccgtcttcatgaagtgcgacctggaagatatcgatgccatgcctcaaaacatggagccagagaaatgcgagggatggaagtgggttacgtgggaggaggtgaagacgtggtgtacgtcgggtaaatctgagaaagaatgtttcctaccgctgatcaacttggcaaagactcacccggacttgaatttcgggatctgatgcacgcatagccatcgttcaatagacaaatagaagcatagaatcgtcccaagagatagggagacccacagcctagttgtcaattcagcatctcgcgataacgatttcgattgtcgtcgcagatattcagctgttccatttaacaacatgcatctgcctaggctaataactgacctctgcaaacgcgtacaaagtgaagactactcgatttgga

SEQ ID NO: 100 - DNA, 1065 bp, Muscodor strobelii
  misc_feature: SGI cDNA ID NO. 559592
  misc_feature: Encodes the peptide sequence at SEQ ID NO 101
atgacggtcgtcaatgagaaaccaccgcctccgacatggcgatctcgcctcgctttcctcaagacgaagcgcgccattgcagccttgactctgttggtggttgttgctgttattttgattgcactcggcgcaacacatgtcatcggtccccacgatcgtaaaaaggacaagattggcgatgcagtcgcgccaggaatatcgactggggacgggtcttggaagccagacaactctagcacaatagctgaaggcacaccactacggatcatgtgtctaggcggctcaatagtccgcggcgaactttccgacgatctaaatggcttccgcgacacgatgcggtcggacttagtagcgtacaatgcgaccgtcaacatggtggggtcgcagcgattcggcgatatgctcgataacgacgaagaagcatacggcggcaaacggatcgagcagattcacgaatatgcgatcaaagtcgtcccattgttccagccgaatttatttgtgatcaatctgggaacgaacaacgtgttgcagagacgagatgtgaatgtctcgggctcgcagatggaagcgttcatcgactacctacttaaagcatctccacgatcgacggtggtgttgagtacgctactgaccaatactgtccccggtcgtgaaccccttgtgctggaagtcaatcaacaataccgagatatctttacgaaatatgtgaatcaatctgtcgtactagcagaaatgcatcccggcgaaggtagcaacaacgtcccgcaagtcggagatattctacccgatggttcacatcccacgaaacgtggctatgagataatgggtcacatcttcgccgatgccatcaaaggggcagatcagaaaggatatcttcgctggcccgtcgagaacggtctcgcacacgatggagacgctgggcgtgccggtcaaacaggcaaagctacagagactgaagaggtaccgccaaagactgcacatacctctacaaaaacagcaagcacgacgcgtacaacacccacgactcacacgactatagcccgtaccacatcatccgcggcatag

SEQ ID NO: 101 - protein, 354 aa, Muscodor strobelii
  misc_feature: SGI Peptide ID NO. 559592
  misc_feature (89)..(279): Pfam Id: PF00657 Pfam Desc: GDSL-like Lipase/Acylhydrolase
  misc_feature (81)..(304): NCBI GI: 171691426 Blast Desc: protein product [Podospora anserina] gi|170945661|emb|CAP71774.1| protein product [Podospora anserina]
  misc_feature (79)..(295): NCBI GI: 85082538 Blast Desc: NCU04526 [Neurospora crassa OR74A] gi|28918018|gb|EAA27701.1| [Neurospora crassa OR74A]
  misc_feature (86)..(295): NCBI GI: 255945471 Blast Desc: Pc20g10090 [Penicillium chrysogenum Wisconsin 54-1255] gi|211588238|emb|CAP86338.1| Pc20g10090 [Penicillium chrysogenum Wisconsin 54-1255]
  misc_feature (58)..(301): NCBI GI: 212530590 Blast Desc: esterase, [Penicillium marneffei ATCC 18224] gi|210074850|gb|EEA28937.1| esterase, [Penicillium marneffei ATCC 18224]
  misc_feature (74)..(295): NCBI GI: 261357824 Blast Desc: conserved [Verticillium albo-atrum VaMs.102]
  misc_feature (81)..(295): NCBI GI: 116195422 Blast Desc: CHGG_04309 [Chaetomium globosum CBS 148.51] gi|88180222|gb|EAQ87690.1| CHGG_04309 [Chaetomium globosum CBS 148.51]
  misc_feature (78)..(295): NCBI GI: 169778429 Blast Desc: [Aspergillus oryzae RIB40] gi|83772417|dbj|BAE62547.1| protein product [Aspergillus oryzae]
  misc_feature (78)..(292): NCBI GI: 255931095 Blast Desc: Pc12g02110 [Penicillium chrysogenum Wisconsin 54-1255] gi|211581723|emb|CAP79838.1| Pc12g02110 [Penicillium chrysogenum Wisconsin 54-1255]
  misc_feature (78)..(299): NCBI GI: 238495752 Blast Desc: esterase, [Aspergillus flavus NRRL3357] gi|220695762|gb|EED52105.1| esterase, [Aspergillus flavus NRRL3357]
  misc_feature (87)..(307): NCBI GI: 116203151 Blast Desc: CHGG_09460 [Chaetomium globosum CBS 148.51] gi|88177978|gb|EAQ85446.1| CHGG_09460 [Chaetomium globosum CBS 148.51]
MTVVNEKPPPPTWRSRLAFLKTKRAIAALTLLVVVAVILIALGATHVIGPHDRKKDKIGDAVAPGISTGDGSWKPDNSSTIAEGTPLRIMCLGGSIVRGELSDDLNGFRDTMRSDLVAYNATVNMVGSQRFGDMLDNDEEAYGGKRIEQIHEYAIKVVPLFQPNLFVINLGTNNVLQRRDVNVSGSQMEAFIDYLLKASPRSTVVLSTLLTNTVPGREPLVLEVNQQYRDIFTKYVNQSVVLAEMHPGEGSNNVPQVGDILPDGSHPTKRGYEIMGHIFADAIKGADQKGYLRWPVENGLAHDGDAGRAGQTGKATETEEVPPKTAHTSTKTASTTRTTPTTHTTIARTTSSAA

SEQ ID NO: 102 - DNA, 2982 bp, Muscodor strobelii
  misc_feature: SGI EST ID NO. CUFF.462.0
  misc_feature: Variant of the nucleotide sequence at SEQ ID NO 100
tcgacatcgatctcaaagccatagctctatacaatgttttctcatgccaaacacataactcaaagcagtaaaatatgaaacgaagaagcaattgccatctgtgcgaccacttcatcaaaccagcgtcccaatcagagcgccaacaagccttacaaggattcccccttcacgcgggaacttggcacgcatccttggcgccaggggctgagcattgagcaaatgttccgaaaccaacaaaccgagaagattaacgtcatcactattcaattcctgcggcgcgcacctgcataggcgggatccacgacaaggagaggcacgccaaatcatgtcgaaaaaattgggggctaacacaacaaaccttatcaagatgaatcccgacaagatctatcacagttttcctttgttcattcgagtattgggtgttttggaatgctgcgatgacggtcgtcaatgagaaaccaccgcctccgacatggcgatctcgcctcgctttcctcaagacgaagcgcgccattgcagccttgactctgttggtggttgttgctgttattttgattgcactcggcgcaacacatgtcatcggtccccacgatcgtaaaaaggacaagattggcgatgcagtcgcgccaggaatatcgactggggacgggtcttggaagccagacaactctagcacaatagctgaaggcacaccactacggatcatgtgtctaggcggctcaatagtccgcggcgaactttccgacgatctaaatggcttccgcgacacgatgcggtcggacttagtagcgtacaatgcgaccgtcaacatggtggggtcgcagcgattcggcgatatgctcgataacgacgaagaagcatacggcggcaaacggatcgagcagattcacgaatatgcgatcaaagtcgtcccattgttccagccgaatttatttgtgatcaatctgggaacgaacaacgtgttgcagagacgagatgtgaatgtctcgggctcgcagatggaagcgttcatcgactacctacttaaagcatctccacgatcgacggtggtgttgagtacgctactgaccaatactgtccccggtcgtgaaccccttgtgctggaagtcaatcaacaataccgagatatctttacgaaatatgtgaatcaatctgtcgtactagcagaaatgcatcccggcgaaggtagcaacaacgtcccgcaagtcggagatattctacccgatggttcacatcccacgaaacgtggctatgagataatgggtcacatcttcgccgatgccatcaaaggggcagatcagaaaggatatcttcgctggcccgtcgagaacggtctcgcacacgatggagacgctgggcgtgccggtcaaacaggcaaagctacagagactgaagaggtaccgccaaagactgcacatacctctacaaaaacagcaagcacgacgcgtacaacacccacgactcacacgactatagcccgtaccacatcatccgcggcatagatgagacatgaatgatacgcggaatgaatacatcagcgggggaatacgggaaactagaatgggcacggattgtcctacgttggacggaatagataaaaatccgtaatagatcatttgcaccgcgtcgtcgtccttgccctgcccctttttataaatttcactcctgccgtttatctcaaactctcctcaatctttgccaattccgccatttgcgcaacgacattctgcttcgccgcctcggttggctcagtatacggtctcctcggtctcaatttctccaccgcgccctcgatacctgccgccttcgccgtgttgatggcagcagcgtacttggttgccgcgatgccggacttacacggctgctcagctaaagcggctttctgatgcaagtcgagggcttccttgtatttgccctccttgtacaggttgtagatcttgacaatactcctcggaaacacattggcgaacgcagcgatacaacccgcggatccaacactcagtccaccaatgagaaagtcggactgtcctccgaacgtggcaaagcgatcagccggtagctcggcagcgagacgtgtgatcttggcgacggagccacaggtcagcttgacgccgacaatgttgtcgtacttcttggcgaggcgggcgatagtctcagagtcgagatctataccattgcacacgccggggaagttgtacagcacgatggggatagcgctcttggttgcaacatcaccgaagaaattgtcgatgacggcaggtgttgtggccttgccgaagtaggctggtggcagcaccaaagcgtagttggctccggcatcagcagcgtcgtcgatgtactctaagacttgacgggttgagtgaccaccgacgccggccatgatggggaagtcggggcccgttgcctcacgggcaatcttcacgagctccttacgctcctcgcgcgtcagtaggaaagtctcagcatttgtaccgagtatgacgagacctgctagtcccgactttgaaaggtaggagtagtatttgctttgggactccgggatcagaacatctgtctcggggtcgaagaaggtgatggcgggggcccagatgccactgggagggacctttggagacatggtgcaagacagatgctgataatgaacatgtaaatgaatgtcgcagcccaagattgtgtttatccgcttccaaccatgcaatattaccgttgcttgcgtgtctattctaagcgatgctgtgaccaagttgtataagtgaatggtatcgtgtggtgagtcggggtttgtcccggtggatagcatcggtacggcggatgttggccgatctcgctgactcgagggccgttgaggagtgtgcctgacatcggcaacggtatgttgtcgcccgacgtctttggccgagttgagcttctcattacgactattggtgtgactattctcgtatcaagcaatgttggtctagagcaaacttatcgaactcgtgt

SEQ ID NO: 103 - DNA, 945 bp, Muscodor strobelii
  misc_feature: SGI cDNA ID NO. 559593
  misc_feature: Encodes the peptide sequence at SEQ ID NO 104
atgtctccaaaggtccctcccagtggcatctgggcccccgccatcaccttcttcgaccccgagacagatgttctgatcccggagtcccaaagcaaatactactcctacctttcaaagtcgggactagcaggtctcgtcatactcggtacaaatgctgagactttcctactgacgcgcgaggagcgtaaggagctcgtgaagattgcccgtgaggcaacgggccccgacttccccatcatggccggcgtcggtggtcactcaacccgtcaagtcttagagtacatcgacgacgctgctgatgccggagccaactacgctttggtgctgccaccagcctacttcggcaaggccacaacacctgccgtcatcgacaatttcttcggtgatgttgcaaccaagagcgctatccccatcgtgctgtacaacttccccggcgtgtgcaatggtatagatctcgactctgagactatcgcccgcctcgccaagaagtacgacaacattgtcggcgtcaagctgacctgtggctccgtcgccaagatcacacgtctcgctgccgagctaccggctgatcgctttgccacgttcggaggacagtccgactttctcattggtggactgagtgttggatccgcgggttgtatcgctgcgttcgccaatgtgtttccgaggagtattgtcaagatctacaacctgtacaaggagggcaaatacaaggaagccctcgacttgcatcagaaagccgctttagctgagcagccgtgtaagtccggcatcgcggcaaccaagtacgctgctgccatcaacacggcgaaggcggcaggtatcgagggcgcggtggagaaattgagaccgaggagaccgtatactgagccaaccgaggcggcgaagcagaatgtcgttgcgcaaatggcggaattggcaaagattgaggagagtttgagataa

SEQ ID NO: 104 - protein, 314 aa, Muscodor strobelii
  misc_feature: SGI Peptide ID NO. 559593
  misc_feature (6)..(307): Pfam Id: PF00701 Pfam Desc: Dihydrodipicolinate synthetase family
  misc_feature (36)..(246): Pfam Id: PF00701 Pfam Desc: Dihydrodipicolinate synthetase family
  misc_feature (2)..(314): NCBI GI: 46115610 Blast Desc: FG03647.1 [Gibberella zeae PH-1]
  misc_feature (1)..(310): NCBI GI: 154273891 Blast Desc: conserved [Ajellomyces capsulatus NAm1] gi|150415405|gb|EDN10758.1| conserved [Ajellomyces capsulatus NAm1]
  misc_feature (1)..(313): NCBI GI: 261204579 Blast Desc: dihydrodipicolinate synthetase [Ajellomyces dermatitidis SLH14081] gi|239587288|gb|EEQ69931.1| dihydrodipicolinate synthetase [Ajellomyces dermatitidis
  misc_feature (1)..(313): NCBI GI: 239614173 Blast Desc: dihydrodipicolinate synthetase [Ajellomyces dermatitidis ER-3]
  misc_feature (1)..(313): NCBI GI: 226286306 Blast Desc: dihydrodipicolinate synthase [Paracoccidioides brasiliensis Pb01]
  misc_feature (1)..(313): NCBI GI: 240282175 Blast Desc: dihydrodipicolinate synthetase [Ajellomyces capsulatus H143]
  misc_feature (1)..(310): NCBI GI: 225559242 Blast Desc: dihydrodipicolinate synthetase [Ajellomyces capsulatus G186AR]
  misc_feature (1)..(314): NCBI GI: 261353316 Blast Desc: dihydrodipicolinate synthase [Verticillium albo-atrum VaMs.102]
  misc_feature (1)..(313): NCBI GI: 225679991 Blast Desc: dihydrodipicolinate synthase [Paracoccidioides brasiliensis Pb03]
  misc_feature (1)..(313): NCBI GI: 226291770 Blast Desc: dihydrodipicolinate synthase [Paracoccidioides brasiliensis Pb18]
  misc_feature (41)..(246): SWISSPROT Homolog: EC 4.2.1.52 Dihydrodipicolinate synthase
MSPKVPPSGIWAPAITFFDPETDVLIPESQSKYYSYLSKSGLAGLVILGTNAETFLLTREERKELVKIAREATGPDFPIMAGVGGHSTRQVLEYIDDAADAGANYALVLPPAYFGKATTPAVIDNFFGDVATKSAIPIVLYNFPGVCNGIDLDSETIARLAKKYDNIVGVKLTCGSVAKITRLAAELPADRFATFGGQSDFLIGGLSVGSAGCIAAFANVFPRSIVKIYNLYKEGKYKEALDLHQKAALAEQPCKSGIAATKYAAAINTAKAAGIEGAVEKLRPRRPYTEPTEAAKQNVVAQMAELAKIEESLR

SEQ ID NO: 105 - DNA, 3963 bp, Muscodor strobelii
  misc_feature: SGI cDNA ID NO. 559594
  misc_feature: Encodes the peptide sequence at SEQ ID NO 106
atgtataaccagggcaagatcatcaagaggctcctcggccgcgagatcgccagcgacaacaacggcatcccctccagcagtgcgcccaacccccagatctaccgacccaatgcctcccagaacgccgtctacccctcgcccgtgcccgtcgcctgcatcgatcgatccgacgatggccgcgtcgctgtgttgggagggagacatgtgctcaggactattcgtgtggacggagtagagataagagagggtatcgatgtccgcgccgccatcacggcccagtttgcaagcaaggggagcattgccagcttggcctcggaacagctgtccatcaaggatgtcaagatcggtacccacaacagcgccgagatcttcactgcatgcgccaacggcaagatcttcatgtacaacctcaaccgcctcaccccgaactcgagtaccggcctagagtgcgttcagacgtgggagggttcgcgccaagtcaacaagctcgacatcaaccctcacagaaagacattgatgctctcgggtgggcaggatggcactgttcgttgcttagatatccaagccccggtgcagggccgcaatggcctgactttccgaacccgtcaagctttccggtgcaacgccgaggccattcgcgatataaaatggtcacccaaggatggcgtcatctttgcctgtggaacggaatccggcgctatattgaaatgggacgttcgcaacccgagaacgcctcttctcagaattaatgcgcatgatccccaaaagggcgtgacctcgatagcctggcactacgacggaaaccatctcatcagctccggccttgatggtaaatgttcagtctgggacctctcgacaaaggagaagagacagaagccaaaatggacaatcaatgccccagctccagttacgtgtgtgtcatggcgacccggtctatggtcagcaacagctcagggccgacgagctgcccaggttgccgtagcttatgacgagggaagtcagttgaagaagaatggtatcagttccgtacatatttgggatctggcgcgccccacattgccctacaaagagattcagatgtttgataattcaccttacaacctcctctggcatgaccaggacttgctatgggctgtaggacaagatggtttcacgcaatgcgatgtggcgtttgctccgaaagtggtggatcggcagccgttgtccagtcttgatttctccgctcgtggcgagattctcatgtttcttgaagagagaaaccagatccaccgacctcggtcaactatcagaacacgggatctactaccaacagcttcatacagttctagtccaactgggccaatgatgagtcttagtcgtagcgattcggaagaggacgtcattggtagctttttaggccctaagcggcgatcaagcggcagacgaaagaacggcaatcagcaaactcagccactcagtactacacctccctctggacccggactcgaaaatgagactatcgggctagagactgccattaagttgaccaaccctttccggcctcagcaggttatggcaatcggacatgtcccggcagctacgaaagtcgacacatatcagttcttttcgcagcaatacctcgaaatactcaaacgagagcttccactccctgagacaaatccagaaacagcagagtcacttgataaaagagttttgaagattgtggaccaatacgctcgaacagcagagagcgtcagtcaattcagacttgctcagacttggcgtatcctgtcattcgccatgaacatgcttcttcaaagcagatcaaaataccatctggaacgtcgattgacgagacctgaaaagaaaaagacttccgccaaaatcgacaatgaaagacctgtccctcaacgagtgagttcttcgggcaggctcggggtggacggtgcagatacaccacgaaaagctccctctgtcacatcaatcgaaagccggccaacacacacaaggtcattactggctgaggagattgatagcgaatccaatctagctactccccttgctcgaccggttcaagaacacctagttgattttgatggggttgatacggaaagaaaattgacgccggtcacagaagtagagagtttctctttaggaccggcgattcattcagcaaaacctagtcctcgacgccgactcgattcggccccgttatctgtcattagccaggatagtcaaatctccagtacagaagggtatgacttctacgatctgggtgccattgaggatttaccagctgctacagcgatcgatgtaccgcagagaagggaaccgttgagaatcgagcctatagaaccaagatcgcccaacagccatcgaaggaaagcatcaagacacgactcggacgatagctttgctcccatctttccgctatccgaggcaagccgtcaaacctccatcctcactagctcgtcaacaggtagctcccagccactaccaaaaagacagcaacaaagttcagggagctatgaatatgagtatggaagtaggatacgtggcaaacagatatcagagtctccagaacaccgtcgatttcctgccccaccgcctctcgagagacatggctccagcaatctcacaacagatttcatgatatcccaaacaactacagacactttttccagtgaccgtcccgaatcagagtcagcatacgcctctgcgaaactcaaagacagccctcccatcaaacagaataccatacctaaacccgtcaaagagtcgacacgaccggaagatcatgtttcgcctaccatcacggagacagattacttgccttgggacgatgatcccgactacccgtaccccatttcatctaatccctcaccgaaggacacatcacctccgatcaatccctaccggatgctagcaagagcatttgccttcgagaccaaacgatctcccctcaatgccgctgccataatcttgctcctcaaaccgctcgtgccatatgacataatcgacgaccatcaagctaccgcagtgttgcggcaacaccatagccgtctcatgaatatgagattgtttgtggaagctgcattactgcgaaacctgtgcgttcgtggttggccttcaggtctcgatatatggggcgacaactacccttcgatctttcgacccgcgcaagatcgagttgcagttggttttgcttgcgcaacatgtcacaggcctcgcgagattgttcgaaacacacccgacagtaccagcatctggaaatgtgaacgttgccgggcacttgttgcgccctgtgctgtctgtggtcatcgagaagccggtcttgatccacagtctgcagtagttattggcgacggcctactcaatccttcgactacacccgacgatgcattccttgcgacctggtggtattgcccaggctgtgcacacggcggtcatgccaactgtctgcaagaatggcacggccccataacaacttcgtccctcatagaccacagcaaaatgacggattcgacctcaatttattcggatctctcaccagaaacgaacagcgatgggtgttgtcccgccgatggctgcggtcatgcctgtctccccggtagatggcgcaacgaaagcacaactgcacgaaccgaggagttgggacgagctatgcgagaacagtatcgtggaatcgtcacgggtcttaagaaggcagatacgaaaccacgagcgagtatcgatgcctcggtgacctcgacacctgcgggtagcgtccgaggtgatagtctcgaagtccctcagagccgagctgtagagagtgtccgtgaggcactaggcagtaacgggaatgagagggatacgagatcaggggggttaatggggatcctgagttcgagtcctggccgaagcagtggatttggcattgcgacgggtgagagagaacgaaggaagagcgtcaagtttgcgggccccgccgaggatcgtcgatag

SEQ ID NO: 106 - protein, 1320 aa, Muscodor strobelii
  misc_feature: SGI Peptide ID NO. 559594
  misc_feature (244)..(283): Pfam Id: PF00400 Pfam Desc: WD domain, G-beta repeat
  misc_feature (255)..(283): Pfam Id: PF00400 Pfam Desc: WD domain, G-beta repeat
  misc_feature (148)..(186): Pfam Id: PF00400 Pfam Desc: WD domain, G-beta repeat
  misc_feature (1)..(1314): NCBI GI: 256720820 Blast Desc: NECHADRAFT_63910 [Nectria haematococca mpVI 77-13-4]
  misc_feature (1)..(1314): NCBI GI: 46133991 Blast Desc: FG09135.1 [Gibberella zeae PH-1]
  misc_feature (8)..(1220): NCBI GI: 116182834 Blast Desc: CHGG_02045 [Chaetomium globosum CBS 148.51] gi|88186342|gb|EAQ93810.1| CHGG_02045 [Chaetomium globosum CBS 148.51]
  misc_feature (1)..(1197): NCBI GI: 85115232 Blast Desc: NCU08632 [Neurospora crassa OR74A] gi|28926635|gb|EAA35604.1| [Neurospora crassa OR74A]
  misc_feature (2)..(1314): NCBI GI: 171694664 Blast Desc: protein product [Podospora anserina] gi|170947574|emb|CAP59735.1| protein product [Podospora anserina]
  misc_feature (8)..(1320): NCBI GI: 145607425 Blast Desc: MGG_04235 [Magnaporthe grisea 70-15] gi|145014981|gb|EDJ99549.1| MGG_04235 [Magnaporthe grisea 70-15]
  misc_feature (22)..(1122): NCBI GI: 261361328 Blast Desc: WD repeat-containing protein [Verticillium albo-atrum VaMs.102]
  misc_feature (3)..(1269): NCBI GI: 156054372 Blast Desc: SS1G_06034 [Sclerotinia sclerotiorum 1980] gi|154703814|gb|EDO03553.1| SS1G_06034 [Sclerotinia sclerotiorum 1980]
  misc_feature (35)..(1270): NCBI GI: 240279562 Blast Desc: WD40 domain-containing protein [Ajellomyces capsulatus H143]
  misc_feature (35)..(700): NCBI GI: 154279802 Blast Desc: conserved [Ajellomyces capsulatus NAm1] gi|150412657|gb|EDN08044.1| conserved [Ajellomyces capsulatus NAm1]
MYNQGKIIKRLLGREIASDNNGIPSSSAPNPQIYRPNASQNAVYPSPVPVACIDRSDDGRVAVLGGRHVLRTIRVDGVEIREGIDVRAAITAQFASKGSIASLASEQLSIKDVKIGTHNSAEIFTACANGKIFMYNLNRLTPNSSTGLECVQTWEGSRQVNKLDINPHRKTLMLSGGQDGTVRCLDIQAPVQGRNGLTFRTRQAFRCNAEAIRDIKWSPKDGVIFACGTESGAILKWDVRNPRTPLLRINAHDPQKGVTSIAWHYDGNHLISSGLDGKCSVWDLSTKEKRQKPKWTINAPAPVTCVSWRPGLWSATAQGRRAAQVAVAYDEGSQLKKNGISSVHIWDLARPTLPYKEIQMFDNSPYNLLWHDQDLLWAVGQDGFTQCDVAFAPKVVDRQPLSSLDFSARGEILMFLEERNQIHRPRSTIRTRDLLPTASYSSSPTGPMMSLSRSDSEEDVIGSFLGPKRRSSGRRKNGNQQTQPLSTTPPSGPGLENETIGLETAIKLTNPFRPQQVMAIGHVPAATKVDTYQFFSQQYLEILKRELPLPETNPETAESLDKRVLKIVDQYARTAESVSQFRLAQTWRILSFAMNMLLQSRSKYHLERRLTRPEKKKTSAKIDNERPVPQRVSSSGRLGVDGADTPRKAPSVTSIESRPTHTRSLLAEEIDSESNLATPLARPVQEHLVDFDGVDTERKLTPVTEVESFSLGPAIHSAKPSPRRRLDSAPLSVISQDSQISSTEGYDFYDLGAIEDLPAATAIDVPQRREPLRIEPIEPRSPNSHRRKASRHDSDDSFAPIFPLSEASRQTSILTSSSTGSSQPLPKRQQQSSGSYEYEYGSRIRGKQISESPEHRRFPAPPPLERHGSSNLTTDFMISQTTTDTFSSDRPESESAYASAKLKDSPPIKQNTIPKPVKESTRPEDHVSPTITETDYLPWDDDPDYPYPISSNPSPKDTSPPINPYRMLARAFAFETKRSPLNAAAIILLLKPLVPYDIIDDHQATAVLRQHHSRLMNMRLFVEAALLRNLCVRGWPSGLDIWGDNYPSIFRPAQDRVAVGFACATCHRPREIVRNTPDSTSIWKCERCRALVAPCAVCGHREAGLDPQSAVVIGDGLLNPSTTPDDAFLATWWYCPGCAHGGHANCLQEWHGPITTSSLIDHSKMTDSTSIYSDLSPETNSDGCCPADGCGHACLPGRWRNESTTARTEELGRAMREQYRGIVTGLKKADTKPRASIDASVTSTPAGSVRGDSLEVPQSRAVESVREALGSNGNERDTRSGGLMGILSSSPGRSSGFGIATGERERRKSVKFAGPAEDRR

SEQ ID NO: 107 - DNA, 4880 bp, Muscodor strobelii
  misc_feature: SGI EST ID NO. CUFF.465.0
  misc_feature: Variant of the nucleotide sequence at SEQ ID NO 105
cgacatggcagcgtgggtagttggctcacaaatggtccctgaaaatgggctgagatggggcctacctaaccttagacgggtccagtgggaggagctccgcattctgcgcccgcgtttccactaaccttaaagcttcgtctggtcgcaagaacggcaacgacatcatctcagctgacagctgtcgcgtcatcccatacccaacctcagctctctgtagcgacatgccggcgcatgattcaagagttgcctaatccatacaactcgcctctttcgtgcaaccccatcgacatcatcacggtcgcacggatccgaaccatgacgctgtggcagccgacacctcgcctggccataccgatgcgccatcgcccactccgccatgtataaccagggcaagatcatcaagaggctcctcggccgcgagatcgccagcgacaacaacggcatcccctccagcagtgcgcccaacccccagatctaccgacccaatgcctcccagaacgccgtctacccctcgcccgtgcccgtcgcctgcatcgatcgatccgacgatggccgcgtcgctgtgttgggagggagacatgtgctcaggactattcgtgtggacggagtagagataagagagggtatcgatgtccgcgccgccatcacggcccagtttgcaagcaaggggagcattgccagcttggcctcggaacagctgtccatcaaggatgtcaagatcggtacccacaacagcgccgagatcttcactgcatgcgccaacggcaagatcttcatgtacaacctcaaccgcctcaccccgaactcgagtaccggcctagagtgcgttcagacgtgggagggttcgcgccaagtcaacaagctcgacatcaaccctcacagaaagacattgatgctctcgggtgggcaggatggcactgttcgttgcttagatatccaagccccggtgcagggccgcaatggcctgactttccgaacccgtcaagctttccggtgcaacgccgaggccattcgcgatataaaatggtcacccaaggatggcgtcatctttgcctgtggaacggaatccggcgctatattgaaatgggacgttcgcaacccgagaacgcctcttctcagaattaatgcgcatgatccccaaaagggcgtgacctcgatagcctggcactacgacggaaaccatctcatcagctccggccttgatggtaaatgttcagtctgggacctctcgacaaaggagaagagacagaagccaaaatggacaatcaatgccccagctccagttacgtgtgtgtcatggcgacccggtctatggtcagcaacagctcagggccgacgagctgcccaggttgccgtagcttatgacgagggaagtcagttgaagaagaatggtatcagttccgtacatatttgggatctggcgcgccccacattgccctacaaagagattcagatgtttgataattcaccttacaacctcctctggcatgaccaggacttgctatgggctgtaggacaagatggtttcacgcaatgcgatgtggcgtttgctccgaaagtggtggatcggcagccgttgtccagtcttgatttctccgctcgtggcgagattctcatgtttcttgaagagagaaaccagatccaccgacctcggtcaactatcagaacacgggatctactaccaacagcttcatacagttctagtccaactgggccaatgatgagtcttagtcgtagcgattcggaagaggacgtcattggtagctttttaggccctaagcggcgatcaagcggcagacgaaagaacggcaatcagcaaactcagccactcagtactacacctccctctggacccggactcgaaaatgagactatcgggctagagactgccattaagttgaccaaccctttccggcctcagcaggttatggcaatcggacatgtcccggcagctacgaaagtcgacacatatcagttcttttcgcagcaatacctcgaaatactcaaacgagagcttccactccctgagacaaatccagaaacagcagagtcacttgataaaagagttttgaagattgtggaccaatacgctcgaacagcagagagcgtcagtcaattcagacttgctcagacttggcgtatcctgtcattcgccatgaacatgcttcttcaaagcagatcaaaataccatctggaacgtcgattgacgagacctgaaaagaaaaagacttccgccaaaatcgacaatgaaagacctgtccctcaacgagtgagttcttcgggcaggctcggggtggacggtgcagatacaccacgaaaagctccctctgtcacatcaatcgaaagccggccaacacacacaaggtcattactggctgaggagattgatagcgaatccaatctagctactccccttgctcgaccggttcaagaacacctagttgattttgatggggttgatacggaaagaaaattgacgccggtcacagaagtagagagtttctctttaggaccggcgattcattcagcaaaacctagtcctcgacgccgactcgattcggccccgttatctgtcattagccaggatagtcaaatctccagtacagaagggtatgacttctacgatctgggtgccattgaggatttaccagctgctacagcgatcgatgtaccgcagagaagggaaccgttgagaatcgagcctatagaaccaagatcgcccaacagccatcgaaggaaagcatcaagacacgactcggacgatagctttgctcccatctttccgctatccgaggcaagccgtcaaacctccatcctcactagctcgtcaacaggtagctcccagccactaccaaaaagacagcaacaaagttcagggagctatgaatatgagtatggaagtaggatacgtggcaaacagatatcagagtctccagaacaccgtcgatttcctgccccaccgcctctcgagagacatggctccagcaatctcacaacagatttcatgatatcccaaacaactacagacactttttccagtgaccgtcccgaatcagagtcagcatacgcctctgcgaaactcaaagacagccctcccatcaaacagaataccatacctaaacccgtcaaagagtcgacacgaccggaagatcatgtttcgcctaccatcacggagacagattacttgccttgggacgatgatcccgactacccgtaccccatttcatctaatccctcaccgaaggacacatcacctccgatcaatccctaccggatgctagcaagagcatttgccttcgagaccaaacgatctcccctcaatgccgctgccataatcttgctcctcaaaccgctcgtgccatatgacataatcgacgaccatcaagctaccgcagtgttgcggcaacaccatagccgtctcatgaatatgagattgtttgtggaagctgcattactgcgaaacctgtgcgttcgtggttggccttcaggtctcgatatatggggcgacaactacccttcgatctttcgacccgcgcaagatcgagttgcagttggttttgcttgcgcaacatgtcacaggcctcgcgagattgttcgaaacacacccgacagtaccagcatctggaaatgtgaacgttgccgggcacttgttgcgccctgtgctgtctgtggtcatcgagaagccggtcttgatccacagtctgcagtagttattggcgacggcctactcaatccttcgactacacccgacgatgcattccttgcgacctggtggtattgcccaggctgtgcacacggcggtcatgccaactgtctgcaagaatggcacggccccataacaacttcgtccctcatagaccacagcaaaatgacggattcgacctcaatttattcggatctctcaccagaaacgaacagcgatgggtgttgtcccgccgatggctgcggtcatgcctgtctccccggtagatggcgcaacgaaagcacaactgcacgaaccgaggagttgggacgagctatgcgagaacagtatcgtggaatcgtcacgggtcttaagaaggcagatacgaaaccacgagcgagtatcgatgcctcggtgacctcgacacctgcgggtagcgtccgaggtgatagtctcgaagtccctcagagccgagctgtagagagtgtccgtgaggcactaggcagtaacgggaatgagagggatacgagatcaggggggttaatggggatcctgagttcgagtcctggccgaagcagtggatttggcattgcgacgggtgagagagaacgaaggaagagcgtcaagtttgcgggccccgccgaggatcgtcgatagtggcgacgatccattgtctggagtgagcctgggacgagagatgagactaggacggtgctggagactattatccctgacgcgacgtacgatgattgagttctgtgtatcattacgagggtgttgggaggtagtgtatgagttgatgtaggtgtaatgtatgaatttacgacagctcgatgttacgtgtgctcctgattatgatacttccatgggatggtcgcgtgatgggcctagagacctggagcacacccacgactatttatgcaaaagactctcaacaatgaacgcaatagtgactatcaacccgtgtcaacatcagcgatgagcccgttcctggcatgaattgatccaagtcggggaagttcgcgttacgtagagataggctgagttctggtagctactaggggtacaaacaatacaaatactcatacccagggacacgctgattaatcctccgaatgttgaggtttgaagtacatatggcccaataattacagctcctctggtcgacagccttaagtgatcggtcacagctaacgca

SEQ ID NO: 108 - DNA, 714 bp, Muscodor strobelii
  misc_feature: SGI cDNA ID NO. 559595
  misc_feature: Encodes the peptide sequence at SEQ ID NO 109
atggatgcctctgagacttccacggtccccaatgaggtgcccatcggctacattgtgacgggtatctggatcatgagacgcaagatgagccatcgctattccactctcgaggccagcgtcgcccccacgggcggttggtgcatcgccttgacctgtgagaacggccagattttcaccatcctgcccgtggccggggaagagcccgattctcatgtgagcgtcgagatcatgagcattttgagtcccgagcaagcagccttgaacgtccctcgcttaatcctcttccacaacagccaagagttttggggtcgcagtgccgttcctggaacaacggtgctgaaagtaatgatggatatctggaggtgtcgccttcaccagtatggactaagagatggcagaggtcttcgctactggctcttgctcgccctcttcgcgatcaagaaacactacatcgagacgagccttacccccaggctcctgaccgacgaggccatcttcgttctccgccttttccagaatgacgtgaacggcaatggatcagtagagtcagcccctattgtgtgcggtaccatgccttcttatttcgaccttgcagccgagggtcgtttgtctatatgggaatgtgagcgtcgcttccgcttcatgcaagagcgcgatatcacgaggcactttgctcccgaagtccctccgaaatacccaacctacaaggactag

SEQ ID NO: 109 - protein, 237 aa, Muscodor strobelii
  misc_feature: SGI Peptide ID NO. 559595
MDASETSTVPNEVPIGYIVTGIWIMRRKMSHRYSTLEASVAPTGGWCIALTCENGQIFTILPVAGEEPDSHVSVEIMSILSPEQAALNVPRLILFHNSQEFWGRSAVPGTTVLKVMMDIWRCRLHQYGLRDGRGLRYWLLLALFAIKKHYIETSLTPRLLTDEAIFVLRLFQNDVNGNGSVESAPIVCGTMPSYFDLAAEGRLSIWECERRFRFMQERDITRHFAPEVPPKYPTYKD

SEQ ID NO: 110 - DNA, 5705 bp, Muscodor strobelii
  misc_feature: SGI EST ID NO. CUFF.301.0
  misc_feature: Variant of the nucleotide sequence at SEQ ID NO 108
gttatctagctacaagcaaaaggccacgacgtgatatgctctcctataattcgtcctcggcaccctcgattttcttgtctggtatatttcaatcataacggtagggtgcgagcgcgggtaggaaatgggcttcaatcttcgcagccatgtggggaatcaaccccccagcaaacgagtcacgacgcacccaatagaacaaagtccgagatgcaattcatgtcgtcctctagatatctgggaaacactacaacgcgatccaacgacactcaaaggcgcaacgactaagatcaacatcccttttgttcgtagtcagagtacggaaggcgagacgttgtcctcagattgcgcattttgcaaggtcgtaggtgggtcagagccaagacagtcttatgatgtagccactagcaactttctcgaagcatatcgaggatttcgacgaccagcgtacagaaagcatctggaaaattatcgacattattgctctacctgtctggaggtggatgacgatctattcttcttccccgacaccaagactggactgttagcaccccgccgtgttgacaatgtgttcgatcccgaattcgcggtcagctggttgaccaaatgcatgcaacttcacccatcgacatgtgttccaccctctgccggttctccagaccgagtcatcgactgtgtgacacgtaccgtaattgctggttatcccgggatcaattatctcgctctgagctatgtctggggcatgaaggcaaacgctctcaagcaggcttctcgactgggcacgacagtaggactgtcccaacgtctccccgatgatctcccgcagacaatcgaggatgccattgccctgacgaagatgatcgggtaccggtatatatggatcgacatgtactgcatcgatcaagcagatataggcgacaagcacaaacaagttgctcatatggacgtagtatacgcttgtgcagaggctaccattatcgtcgcggctgggaaagactgctattccggtatccctggcattgggaagaccccgagaagaccccaacactctgcaattatcgacggagtcaatctctatgccttcgggcaatcagtcggaaaggaagttcgaggatctaaatggtggactagagcgtggacattccaagaggggttactgtctcatcgcagattgatcttcacggaaagccaggccttcttcgaatgtaacgcgataacatcgacggaagcaattggaggcttggagctgatcaagacgcgatctgaattgcgactgtacgaggaaatcttcgacaatgcaatttttcgatgtcttctcacgaatgaagagcggtttgacgggttctttgacggaagtacacaaaagcatgaaatcatttacagtccgcccgatacagatcccagcatccatttcttccagaccctggtccgaatttatactgcgaaactgttgagctttgactctgatgctctgaatgcatttaatgctattgcaatgtcattttcgagacccaatcgacgctcgacagtagctcgtagcacgcaacatccagtcttgaacttttgcggagttccattcattccaaagccagacgacttgcaaatgtcattgacaaatggattactgtggtcttcccccggtagtcggcgtcaatgctttccatcgtggtcctgggctgagtatcgaggtgttgtagactgggcagaatcgattgaaaccccgcattgggaaatactcagcatacaaacggatagcggcaccacgcacgatatttcaacgcttgacgacgctgatctcagagatggtacactgcaaccccagatcattcacatcaaagcaaaagctgtaaagcgcgagatgtggcagctcctacagttggcaggtgggaaatggaaaggcccagcaaactcaccctggggacaacatattcttgcatctccaatgtcgcaaggattttatagtgcatcctctgaattgttgccgtttcttcagtctgggcaatgggaggcgctatgtgctggtagttctcgacgtatcggcactttcgtacttttcttggtggagactttagccaacggcttttcaacgcgtgttcgtctggtagaaatgatttatgggtggaaatcttctcgaggcgaacaagctgagagggaagatcaaggactgcaggtgtttctagagcagggtaccgttgatcggcttgtaaagttggtgtgaatccatccgatcaagcctgtatatgtcatggaaccttgtcaaaagggactaaattgcctgacaatgtctatactgcatccatgatgaagcatagtctcatgtgctttttcaacgttcatttcaaaatcagaccatcgacggaacgggaacagaagacatggccatgctgccatggtcctctcatcaacaagtcagacccagtttgtggcatctgacacctagagagcgtgctgcagggcatcaactggggtggtatgtctcagccaattagagttgcagaagagacactgtaataggcatctcttcgagtgcaaaggtcgacaatgcttcaaacaggactttggatcatgagctcgtagcctaaaggtcttccatgattgtttgtgcccgcgcacgtggattctgcgtctcctctcccctctcttcaacatcaatggcccagaacttccaacacctctcatgatgcaatatgttcccgccaggtcagtcgggcttcgcgtacataggcggcgaggtcaatgccacgggttacaaccttctttccccaacgcgaaagtcaccctagggagggcacgatgttccaagcagctgatctaaggatttctttacaaaatcagctcatgggagctataggaatgcgctgcgagaatgctttggatctagcagttcttgtgacgctgcacgccgtgatcgtgttgctcgaccagactacacatcctgacttggagattttcagaatattcgaagaggcaatcggactcttggccgaacgtatgacaacctcgcgtcgacggttcagagtccaggcatcgccgcacctcatgccgattaccgatgtttcagcagaacaagcagagaaggaacgaatttctattgagaagcgtcagaaacgagaacttgaagaggcggaacgtatgaatcgcgaggacacgtctcttctgctcgagctgcgagatgctgacgatgaacttacaatgctgagagacttgttcactgagcagattaccgttatcgaagccatgcgagaagactacaggaagccagagctagtcgaaataacacgacaggggggtcgtttttctggatcgggccttgtcaagactgagcgagtacaaaaaagcaagtcaacgacctgaagggtcgaatcgagaatgcgaggaaggattaccagacgctccttgagatgatgcagcgcgtagacgacgtacgatccagtcggctccagactgagctagcgagtacccagaatcgaacactgatgatctttacatctttcaccgtcatctttctgccactgagcttcttcaaagtctgtttggcatgaacacgcagtagtggggcggtgataacaacatcagcctcaagactattggtgccattagtctgcccgcgagtttcctgcttattgccacgagtctgatcatcgctctcagcacgagaatacagtctgccatcaaggcagtatttaaaccgttgaaaacacgactccggtctagccggctcaaattctatacggacaaaatccctcagaacaggctacgacttgaaaataagatgagggaacgttcatacgacttttgggaatctgtgaggacagagagaccgggagactatcggattccagacatgaaccgcaaaagaggtgcagccagacggatctctgtctcttcgacttgattgatgtgtttcgtccttctcacggaccacctaagaacgctcacttgggtacccgatatgggaacgtatcgtgatggtgatagagatactgatgtatgatgctttggttcgatgctttggttcgatgctttggttcgatgcttttgaagcaatctcgatgggatgaagggaacccgcatgactctactgcttgattagcagaataacccggagcatgtcttaaatagcggagtccctatcttagatcagtgagaagggcctgccgaatccccatccccacttccggcggtatgtttaaaccaccccctccgggccctggccggcgatgttacatgccccacgcgggtctccgggcttgttggcaaggctaacaggttgatgaaatcagtgcagtgaaagctagcaggtagtggctttgatcagagctgggcctaaaaacttttcccagatccagctagggcacaacttcccttgttttcccacatgagctccgtcacaccaacacaacttttggtcatccatgcaactctcaaagcttgggacctcaaagcactgatttcgtcgtctttgctgatggataagtgagcatcctcacccccattcttcatcctttgtctcctgctcttcctcttgttcctgtcaagctttcagctgtttacttgcaattgcaacatctgcctcgctccctcgtccttgcttgctcctttgcctgctcttccatccatcatttcactcttggtcttagctccttcctgctccatcaagatggatgcctctgagacttccacggtccccaatgaggtgcccatcggctacattgtgacgggtatctggatcatgagacgcaagatgagccatcgctattccactctcgaggccagcgtcgcccccacgggcggttggtgcatcgccttgacctgtgagaacggccagattttcaccatcctgcccgtggccggggaagagcccgattctcatgtgagcgtcgagatcatgagcattttgagtcccgagcaagcagccttgaacgtccctcgcttaatcctcttccacaacagccaagagttttggggtcgcagtgccgttcctggaacaacggtgctgaaagtaatgatggatatctggaggtgtcgccttcaccagtatggactaagagatggcagaggtcttcgctactggctcttgctcgccctcttcgcgatcaagaaacactacatcgagacgagccttacccccaggctcctgaccgacgaggccatcttcgttctccgccttttccagaatgacgtgaacggcaatggatcagtagagtcagcccctattgtgtgcggtaccatgccttcttatttcgaccttgcagccgagggtcgtttgtctatatgggaatgtgagcgtcgcttccgcttcatgcaagagcgcgatatcacgaggcactttgctcccgaagtccctccgaaatacccaacctacaaggactagaccaattcgttttcatctttagcgtctgcactccatctccacactctcctcaagatatgatcaaccttctggggtgcagcgccggtatagatctcagtgctcggcagatcgaggttctctgcccaacttgtgccatggcaccatatctgttccctcctttatggacagagaccatacccctatatagatgcacgcccctcaaagtgtcacgtgcactgctgtctttagcgtagacgagcgaataataacccgataaacaacacgcgttgcatccgttctgactcttcaagtgcaccgtgattgagattcgttgttttgtcccgttagatagtaa

SEQ ID NO: 111 - DNA, 561 bp, Muscodor strobelii
  misc_feature: SGI cDNA ID NO. 559596
  misc_feature: Encodes the peptide sequence at SEQ ID NO 112
atgttccaagcagctgatctaaggatttctttacaaaatcagctcatgggagctataggaatgcgctgcgagaatgctttggatctagcagttcttgtgacgctgcacgccgtgatcgtgttgctcgaccagactacacatcctgacttggagattttcagaatattcgaagaggcaatcggactcttggccgaacgtatgacaacctcgcgtcgacggttcagagtccaggcatcgccgcacctcatgccgattaccgatgtttcagcagaacaagcagagaaggaacgaatttctattgagaagcgtcagaaacgagaacttgaagaggcggaacgtatgaatcgcgaggacacgtctcttctgctcgagctgcgagatgctgacgatgaacttacaatgctgagagacttgttcactgagcagattaccgttatcgaagccatgcgagaagactacaggaagccagagctagtcgaaataacacgacaggggggtcgtttttctggatcgggccttgtcaagactgagcgagtacaaaaaagcaagtcaacgacctga

SEQ ID NO: 112 - protein, 186 aa, Muscodor strobelii
  misc_feature: SGI Peptide ID NO. 559596
  misc_feature (1)..(165): NCBI GI: 164426021 Blast Desc: NCU04767 [Neurospora crassa OR74A] gi|157071168|gb|EAA30980.2| [Neurospora crassa OR74A]
  misc_feature (1)..(153): NCBI GI: 171682100 Blast Desc: protein product [Podospora anserina] gi|170941009|emb|CAP66659.1| protein product [Podospora anserina]
  misc_feature (1)..(165): NCBI GI: 116202171 Blast Desc: CHGG_08970 [Chaetomium globosum CBS 148.51] gi|88177488|gb|EAQ84956.1| CHGG_08970 [Chaetomium globosum CBS 148.51]
  misc_feature (1)..(165): NCBI GI: 256727872 Blast Desc: NECHADRAFT_46452 [Nectria haematococca mpVI 77-13-4]
  misc_feature (1)..(165): NCBI GI: 46130868 Blast Desc: FG08989.1 [Gibberella zeae PH-1]
  misc_feature (1)..(149): NCBI GI: 119480791 Blast Desc: NFIA_084790 [Neosartorya fischeri NRRL 181] gi|119408578|gb|EAW18527.1| conserved [Neosartorya fischeri NRRL 181]
  misc_feature (1)..(153): NCBI GI: 115443332 Blast Desc: conserved [Aspergillus terreus NIH2624] gi|114188342|gb|EAU30042.1| conserved [Aspergillus terreus NIH2624]
  misc_feature (1)..(153): NCBI GI: 145246622 Blast Desc: An12g04900 [Aspergillus niger] gi|134080279|emb|CAK32609.1| protein product [Aspergillus niger]
  misc_feature (1)..(149): NCBI GI: 121698923 Blast Desc: conserved [Aspergillus clavatus NRRL 1] gi|119395991|gb|EAW06423.1| conserved [Aspergillus clavatus NRRL 1]
  misc_feature (1)..(153): NCBI GI: 238493603 Blast Desc: conserved [Aspergillus flavus NRRL3357] gi|220696532|gb|EED52874.1| conserved [Aspergillus flavus NRRL3357]
MFQAADLRISLQNQLMGAIGMRCENALDLAVLVTLHAVIVLLDQTTHPDLEIFRIFEEAIGLLAERMTTSRRRFRVQASPHLMPITDVSAEQAEKERISIEKRQKRELEEAERMNREDTSLLLELRDADDELTMLRDLFTEQITVIEAMREDYRKPELVEITRQGGRFSGSGLVKTERVQKSKSTT

SEQ ID NO: 113 - DNA, 5705 bp, Muscodor strobelii; identical to SEQ ID NO: 110
  misc_feature: SGI EST ID NO. CUFF.301.0
  misc_feature: Variant of the nucleotide sequence at SEQ ID NO 111

SEQ ID NO: 114 - DNA, 1476 bp, Muscodor strobelii
  misc_feature: SGI cDNA ID NO. 559597
  misc_feature: Encodes the peptide sequence at SEQ ID NO 115
atgaaggcaaacgctctcaagcaggcttctcgactgggcacgacagtaggactgtcccaacgtctccccgatgatctcccgcagacaatcgaggatgccattgccctgacgaagatgatcgggtaccggtatatatggatcgacatgtactgcatcgatcaagcagatataggcgacaagcacaaacaagttgctcatatggacgtagtatacgcttgtgcagaggctaccattatcgtcgcggctgggaaagactgctattccggtatccctggcattgggaagaccccgagaagaccccaacactctgcaattatcgacggagtcaatctctatgccttcgggcaatcagtcggaaaggaagttcgaggatctaaatggtggactagagcgtggacattccaagaggggttactgtctcatcgcagattgatcttcacggaaagccaggccttcttcgaatgtaacgcgataacatcgacggaagcaattggaggcttggagctgatcaagacgcgatctgaattgcgactgtacgaggaaatcttcgacaatgcaatttttcgatgtcttctcacgaatgaagagcggtttgacgggttctttgacggaagtacacaaaagcatgaaatcatttacagtccgcccgatacagatcccagcatccatttcttccagaccctggtccgaatttatactgcgaaactgttgagctttgactctgatgctctgaatgcatttaatgctattgcaatgtcattttcgagacccaatcgacgctcgacagtagctcgtagcacgcaacatccagtcttgaacttttgcggagttccattcattccaaagccagacgacttgcaaatgtcattgacaaatggattactgtggtcttcccccggtagtcggcgtcaatgctttccatcgtggtcctgggctgagtatcgaggtgttgtagactgggcagaatcgattgaaaccccgcattgggaaatactcagcatacaaacggatagcggcaccacgcacgatatttcaacgcttgacgacgctgatctcagagatggtacactgcaaccccagatcattcacatcaaagcaaaagctgtaaagcgcgagatgtggcagctcctacagttggcaggtgggaaatggaaaggcccagcaaactcaccctggggacaacatattcttgcatctccaatgtcgcaaggattttatagtgcatcctctgaattgttgccgtttcttcagtctgggcaatgggaggcgctatgtgctggtagttctcgacgtatcggcactttcgtacttttcttggtggagactttagccaacggcttttcaacgcgtgttcgtctggtagaaatgatttatgggtggaaatcttctcgaggcgaacaagctgagagggaagatcaaggactgcaggtgtttctagagcagggtaccgttgatcggcttgtaaagttggtgtga

SEQ ID NO: 115 - protein, 491 aa, Muscodor strobelii
  misc_feature: SGI Peptide ID NO. 559597
  misc_feature (2)..(136): Pfam Id: PF06985 Pfam Desc: Heterokaryon incompatibility protein (HET)
  misc_feature (21)..(136): Pfam Id: PF06985 Pfam Desc: Heterokaryon incompatibility protein (HET)
  misc_feature (22)..(365): NCBI GI: 256723982 Blast Desc: NECHADRAFT_86266 [Nectria haematococca mpVI 77-13-4]
  misc_feature (25)..(344): NCBI GI: 171678749 Blast Desc: protein product [Podospora anserina] gi|170937444|emb|CAP62102.1| protein product [Podospora anserina]
  misc_feature (22)..(320): NCBI GI: 145239895 Blast Desc: An08g04760 [Aspergillus niger] gi|134077108|emb|CAK45449.1| protein product [Aspergillus niger]
  misc_feature (26)..(316): NCBI GI: 169599629 Blast Desc: SNOG_02638 [Phaeosphaeria nodorum SN15] gi|160705281|gb|EAT89369.2| SNOG_02638 [Phaeosphaeria nodorum SN15]
  misc_feature (9)..(320): NCBI GI: 256722891 Blast Desc: NECHADRAFT_87161 [Nectria haematococca mpVI 77-13-4]
  misc_feature (25)..(337): NCBI GI: 169615755 Blast Desc: SNOG_11040 [Phaeosphaeria nodorum SN15] gi|111060419|gb|EAT81539.1| SNOG_11040 [Phaeosphaeria nodorum SN15]
  misc_feature (10)..(316): NCBI GI: 256728352 Blast Desc: NECHADRAFT_87690 [Nectria haematococca mpVI 77-13-4]
  misc_feature (17)..(324): NCBI GI: 256727917 Blast Desc: [Nectria haematococca mpVI 77-13-4]
  misc_feature (15)..(317): NCBI GI: 171693549 Blast Desc: protein product [Podospora anserina] gi|170946723|emb|CAP73526.1| protein product [Podospora anserina]
  misc_feature (22)..(318): NCBI GI: 9368560 Blast Desc: related to tol protein [Neurospora crassa]
MKANALKQASRLGTTVGLSQRLPDDLPQTIEDAIALTKMIGYRYIWIDMYCIDQADIGDKHKQVAHMDVVYACAEATIIVAAGKDCYSGIPGIGKTPRRPQHSAIIDGVNLYAFGQSVGKEVRGSKWWTRAWTFQEGLLSHRRLIFTESQAFFECNAITSTEAIGGLELIKTRSELRLYEEIFDNAIFRCLLTNEERFDGFFDGSTQKHEIIYSPPDTDPSIHFFQTLVRIYTAKLLSFDSDALNAFNAIAMSFSRPNRRSTVARSTQHPVLNFCGVPFIPKPDDLQMSLTNGLLWSSPGSRRQCFPSWSWAEYRGVVDWAESIETPHWEILSIQTDSGTTHDISTLDDADLRDGTLQPQIIHIKAKAVKREMWQLLQLAGGKWKGPANSPWGQHILASPMSQGFYSASSELLPFLQSGQWEALCAGSSRRIGTFVLFLVETLANGFSTRVRLVEMIYGWKSSRGEQAEREDQGLQVFLEQGTVDRLVKLV

SEQ ID NO: 116 - DNA, 5705 bp, Muscodor strobelii; identical to SEQ ID NO: 110
  misc_feature: SGI EST ID NO. CUFF.301.0
  misc_feature: Variant of the nucleotide sequence at SEQ ID NO 114

SEQ ID NO: 117 - DNA, 1005 bp, Muscodor strobelii
  misc_feature: SGI cDNA ID NO. 559598
  misc_feature: Encodes the peptide sequence at SEQ ID NO 118
atggcgacctttacctcgctcccccgattcaatgatttaccagcggaacttatcctgatgatattagactttaagacctgggacgactatcaagaccgactgatttttgacatcgacatcgacgatgttgtagcagaccaactagtcccggctcagacggacaaggagttgattccgactcgtgcccgtcttgatcatctcgatcactacaaacgcggagaacgtgaagaacgcgaaaggactattcccagacttaagacatactgcaacgctatgtttattttacccatggaactcgaccatgcgtatattgagcgcgaggatctacatggtctgttgttgttatcgccagcggagagcaagacgtcgcaacagctgctcgagattcgttctctttatgaacctctcatcaagccaaagccacaaacattgacccagatatgggacatcttgttccgcgctgttcggtcgatcggccagaatgaagctgtctcgcgtagattcgtggctttggttctcgccctccagcaagcaggcgaattatcagatgacttcggcaacccagctaagctgagtacccaaacggtttggaaggacttacctgaattttcaataacgttccggatctatggcatctacatacaaaagcccgacgagtacgaaggcgactgggcagaacaagcgccaacacttttcaatgcgtctacattcggcgcgatattcctcaatcagaccatggagcaagttgtgtacttggaggcggccatgatatggatccgactagcattcaaggccttgcttgcactttgcaatgataactatgcgcggggagctgttagtggtgggagcgagtggtggtggaaggggaaaataggctttagtctcgcgcgatgggagttttggaaggcgagacttcaggagcttggacaagatctgggtcttgataaccgattgcgagcgatgaccagacaggctcaagagttgatgcagattgctgagagatga

SEQ ID NO: 118 - protein, 334 aa, Muscodor strobelii
  misc_feature: SGI Peptide ID NO. 559598
  misc_feature (144)..(312): NCBI GI: 238497730 Blast Desc: conserved [Aspergillus flavus NRRL3357] gi|220693374|gb|EED49719.1| conserved [Aspergillus flavus NRRL3357]
  misc_feature (144)..(334): NCBI GI: 255930319 Blast Desc: Pc06g01100 [Penicillium chrysogenum Wisconsin 54-1255] gi|211581332|emb|CAP79103.1| Pc06g01100 [Penicillium chrysogenum Wisconsin 54-1255]
  misc_feature (144)..(312): NCBI GI: 169768424 Blast Desc: [Aspergillus oryzae RIB40] gi|83766540|dbj|BAE56680.1| protein product [Aspergillus oryzae]
  misc_feature (250)..(332): NCBI GI: 169608546 Blast Desc: SNOG_07355 [Phaeosphaeria nodorum SN15] gi|160701668|gb|EAT84821.2| SNOG_07355 [Phaeosphaeria nodorum SN15]
MATFTSLPRFNDLPAELILMILDFKTWDDYQDRLIFDIDIDDVVADQLVPAQTDKELIPTRARLDHLDHYKRGEREERERTIPRLKTYCNAMFILPMELDHAYIEREDLHGLLLLSPAESKTSQQLLEIRSLYEPLIKPKPQTLTQIWDILFRAVRSIGQNEAVSRRFVALVLALQQAGELSDDFGNPAKLSTQTVWKDLPEFSITFRIYGIYIQKPDEYEGDWAEQAPTLFNASTFGAIFLNQTMEQVVYLEAAMIWIRLAFKALLALCNDNYARGAVSGGSEWWWKGKIGFSLARWEFWKARLQELGQDLGLDNRLRAMTRQAQELMQIAER

SEQ ID NO: 119 - DNA, 897 bp, Muscodor strobelii
  misc_feature: SGI cDNA ID NO. 559599
  misc_feature: Encodes the peptide sequence at SEQ ID NO 120
atgtcgtcggcaaatacaatgtctcaattagccgagacacagaacggcccatcaaagggctccagtttgtccctgcagaaaaagatcaagaagactgtagcacctaccttcaggctctttcctaaattgcccacggagattcacgtcatgatctgggagtttgccattctgctccacaatcgtggtcgactcatctcacttctgctggattatgataagatcaagcccgtcacgagtactatgtgttgctctcctcacttctttgtctcgtacgaaagccgtgaggtcgccctccagctctatccgatgcgaattcctttggaaggtaccaagaggttcaaaggaagcaaaaactcagcgcctcgttatgaaataccggaagaatccacactgtatctcagcccaaaatacgacgtgttcataatgcgacatgacgtgtatacttaccgctctcggcaggcctacgagctcatcaactcgtcgcccctctcttcgagccagatggcggaaatagagcaggttcttctgctccagcctaaccacacacaatgcacacacacgccatttactacacttccccttccaatgcgtcgttattactcggttaggtttaacaacccttgcgtcttgagccgaaaggtctttccaacactcaagtcctgctactacgcgatggtaaggaatcacctctctttgttctacctatctcgtcaaaaatacttcagggactttttatacgacaggaagaagcagataaccttaagcggactgtgcaagtggatgcgtctggcagaggtcaagggaaaggacttggagggtttctgctctgggcagaaagtggatgggaaatgtatctgcgagtatgaggcgccagatggtgaaggcgacgagctatga

SEQ ID NO: 120 - protein, 298 aa, Muscodor strobelii
  misc_feature: SGI Peptide ID NO. 559599
MSSANTMSQLAETQNGPSKGSSLSLQKKIKKTVAPTFRLFPKLPTEIHVMIWEFAILLHNRGRLISLLLDYDKIKPVTSTMCCSPHFFVSYESREVALQLYPMRIPLEGTKRFKGSKNSAPRYEIPEESTLYLSPKYDVFIMRHDVYTYRSRQAYELINSSPLSSSQMAEIEQVLLLQPNHTQCTHTPFTTLPLPMRRYYSVRFNNPCVLSRKVFPTLKSCYYAMVRNHLSLFYLSRQKYFRDFLYDRKKQITLSGLCKWMRLAEVKGKDLEGFCSGQKVDGKCICEYEAPDGEGDEL

SEQ ID NO: 121 - DNA, 357 bp, Muscodor strobelii
  misc_feature: SGI EST ID NO. CUFF.312.0
  misc_feature: Variant of the nucleotide sequence at SEQ ID NO 119
tcaagtcctgctactacgcgatggtaaggaatcacctctctttgttctacctatctcgtcaaaaatacttcagggactttttatacgacaggaagaagcagataaccttaagcggactgtgcaagtggatgcgtctggcagaggtcaagggaaaggacttggagggtttctgctctgggcagaaagtggatgggaaatgtatctgcgagtatgaggcgccagatggtgaaggcgacgagctatgagcactgcgaagaaggtgcttctcacagactgtggcgatgacaaacatgaatcgcgaagactacaagacaaaggcgatacagtggtctaaggatgaagcttagcaatgtgctg

SEQ ID NO: 122 - DNA, 1698 bp, Muscodor strobelii
  misc_feature: SGI cDNA ID NO. 559600
  misc_feature: Encodes the peptide sequence at SEQ ID NO 123
atgactactcttttatcgaacgaagagaagcacacagcatttgatagaggcccgaccacgtccgttattgtcgagaatcaagatggaggaattgagcagctggaccgggatcatgaagagggccatctgaagggctggagattacatacacttacacttggactctgcgtaggaaccttcctagtcaatctcgaagtatcaatcgtcagcacatctctcgtgtcgataacaaacgacttgaagcacttcagccaggcaacatgggtcgtcaccgcttatctcctaacatacacgagctttatgatcatcactgcgaaacttagcgatatgctcggacggaagagtatgatgctattcgctatgggggtatttacggtgttctcgggggcttgcgcggcggcagggacgattgttgagcttatcgtcctccgagcactccagggtataggaggctgcggtatctacgctctctctatcgtaatcgtcgtcgagatggtgccgtcgcgtaaatggtcactgtacatgatactccttacctccttgtttgctgtggctatgatactaggtccggtcctcggcggcttgattaatgaatattctagctggatttgggtgtttcttctcaatgtacccggcggtgcccttgcgtttcttctcgtggcgatatcgatgcctgccaaattcccacatcagaataatccaaatgtcaggcgccgaatttccctcggtcgtattgatttcctcggtggattcctacttctcgctgctatgacattgtggatcacgagttttgaacaagcggcgaatttgtatccttgggcttcggcgactgtcctcgcgcccctaactatatcgatagtcctttggatactattcttcgtatcgcaatggtgggtcacgaagagggaaagaaaagtcgagcctgttttcccttggcggttctgtagagatcgagttgttatgggcatcatcgcaaactcatttctgagcggcaccatatcaacaacgtgcataatcaacatcccactgcgcttccagaccgctgccggactctctgcactacaagctggcatccgactcatacccctgactgtcacacttcaaatcggcgctatgctggtcgcgatactcacgaaaaagggaaggattgcaccgatttatctcttgttagcaggtgcaattctccagctaatcggcgttgccttcctaagtcaaggggaccctgaacaccccacatggagtggtacatacgggttcgaagcagtgacgggtgttggattgggattgagtatcggcgtcgtgacattaatgatgcctcacgcgtgcgaggttagagatagaggtgcgcaaactataccccatcttccagcagacgctaatgaatacaaagcaaccgccacatcagcagtcgtacaattcaggttcctcggaggagcaacggtcctcgctattgtcacagcagtcgcgaataaatggatactggacgttctcgtgacgcttgtgtctcctgaacaagcgatggtaatcttgagagattctgcagctattgcagatttgcctgctgcaacggagacggcggtgagagaactgtttgtggagagttttgatctgcagatgaagattgtaattgggtttgctgcggcgcagttcccggttatagtactcatgtggaagcggacacctcttttgcttgattga

SEQ ID NO: 123 - protein, 565 aa, Muscodor strobelii
  misc_feature: SGI Peptide ID NO. 559600
  misc_feature (55)..(482): Pfam Id: PF07690 Pfam Desc: Major Facilitator Superfamily
  misc_feature (55)..(562): NCBI GI: 212533541 Blast Desc: multidrug resistance protein fnx1, [Penicillium marneffei ATCC 18224] gi|210072291|gb|EEA26380.1| multidrug resistance protein fnx1, [Penicillium marneffei ATCC 18224]
  misc_feature (107)..(560): NCBI GI: 242810792 Blast Desc: efflux pump antibiotic resistance protein, [Talaromyces stipitatus ATCC 10500] gi|218716280|gb|EED15702.1| efflux pump antibiotic resistance protein, [Talaromyces ATCC
  misc_feature (36)..(559): NCBI GI: 242773497 Blast Desc: efflux pump antibiotic resistance protein, [Talaromyces stipitatus ATCC 10500] gi|218721871|gb|EED21289.1| efflux pump antibiotic resistance protein, [Talaromyces ATCC
  misc_feature (37)..(559): NCBI GI: 67526853 Blast Desc: AN3884.2 [Aspergillus nidulans FGSC A4] gi|40739959|gb|EAA59149.1| AN3884.2 [Aspergillus nidulans FGSC A4] gi|259481548|tpe|CBF75171.1| TPA: MFS multidrug transporter,
  misc_feature (7)..(561): NCBI GI: 256728111 Blast Desc: NECHADRAFT_53897 [Nectria haematococca mpVI 77-13-4]
  misc_feature (23)..(561): NCBI GI: 225556984 Blast Desc: drug resistance transporter EmrB/QacA subfamily [Ajellomyces capsulatus G186AR]
  misc_feature (2)..(446): NCBI GI: 240278164 Blast Desc: MFS multidrug transporter [Ajellomyces capsulatus H143]
  misc_feature (16)..(561): NCBI GI: 145605649 Blast Desc: MGG_11786 [Magnaporthe grisea 70-15] gi|145013450|gb|EDJ98091.1| MGG_11786 [Magnaporthe grisea 70-15]
  misc_feature (2)..(450): NCBI GI: 225557520 Blast Desc: drug resistance transporter [Ajellomyces capsulatus G186AR]
  misc_feature (25)..(561): NCBI GI: 212545512 Blast Desc: MFS multidrug transporter, [Penicillium marneffei ATCC 18224] gi|210065879|gb|EEA19973.1| MFS multidrug transporter, [Penicillium marneffei ATCC 18224]
MTTLLSNEEKHTAFDRGPTTSVIVENQDGGIEQLDRDHEEGHLKGWRLHTLTLGLCVGTFLVNLEVSIVSTSLVSITNDLKHFSQATWVVTAYLLTYTSFMIITAKLSDMLGRKSMMLFAMGVFTVFSGACAAAGTIVELIVLRALQGIGGCGIYALSIVIVVEMVPSRKWSLYMILLTSLFAVAMILGPVLGGLINEYSSWIWVFLLNVPGGALAFLLVAISMPAKFPHQNNPNVRRRISLGRIDFLGGFLLLAAMTLWITSFEQAANLYPWASATVLAPLTISIVLWILFFVSQWWVTKRERKVEPVFPWRFCRDRVVMGIIANSFLSGTISTTCIINIPLRFQTAAGLSALQAGIRLIPLTVTLQIGAMLVAILTKKGRIAPIYLLLAGAILQLIGVAFLSQGDPEHPTWSGTYGFEAVTGVGLGLSIGVVTLMMPHACEVRDRGAQTIPHLPADANEYKATATSAVVQFRFLGGATVLAIVTAVANKWILDVLVTLVSPEQAMVILRDSAAIADLPAATETAVRELFVESFDLQMKIVIGFAAAQFPVIVLMWKRTPLLLD

SEQ ID NO: 124 - DNA, 2150 bp, Muscodor strobelii
  misc_feature: SGI EST ID NO. CUFF.386.2
  misc_feature: Variant of the nucleotide sequence at SEQ ID NO 122
gctggaatcactttgctgcggtatgcctatttgatttgcaatgaacagttggaggtccttgaattttgtattacggccgaattcttttcagctggtcccgggaacgtggttcgctgcgctgctctcattccatgtcgcggggtcatcgtcccattgttgggagaagagtgcagaggtgtggtatgcaaactggcgttgctgtgccgttcgttgggctgtaagaggctggatgtgtgcggatttcgctttttgctggagaagatggaggctgtatatatagaatagattgacatactgtgtttctagttttcggtttattgagaatgcgagattttgtatcctttgattctagaacggtggctcggaatctgtagtgacgatgactactcttttatcgaacgaagagaagcacacagcatttgatagaggcccgaccacgtccgttattgtcgagaatcaagatggaggaattgagcagctggaccgggatcatgaagagggccatctgaagggctggagattacatacacttacacttggactctgcgtaggaaccttcctagtcaatctcgaagtatcaatcgtcagcacatctctcgtgtcgataacaaacgacttgaagcacttcagccaggcaacatgggtcgtcaccgcttatctcctaacatacacgagctttatgatcatcactgcgaaacttagcgatatgctcggacggaagagtatgatgctattcgctatgggggtatttacggtgttctcgggggcttgcgcggcggcagggacgattgttgagcttatcgtcctccgagcactccagggtataggaggctgcggtatctacgctctctctatcgtaatcgtcgtcgagatggtgccgtcgcgtaaatggtcactgtacatgatactccttacctccttgtttgctgtggctatgatactaggtccggtcctcggcggcttgattaatgaatattctagctggatttgggtgtttcttctcaatgtacccggcggtgcccttgcgtttcttctcgtggcgatatcgatgcctgccaaattcccacatcagaataatccaaatgtcaggcgccgaatttccctcggtcgtattgatttcctcggtggattcctacttctcgctgctatgacattgtggatcacgagttttgaacaagcggcgaatttgtatccttgggcttcggcgactgtcctcgcgcccctaactatatcgatagtcctttggatactattcttcgtatcgcaatggtgggtcacgaagagggaaagaaaagtcgagcctgttttcccttggcggttctgtagagatcgagttgttatgggcatcatcgcaaactcatttctgagcggcaccatatcaacaacgtgcataatcaacatcccactgcgcttccagaccgctgccggactctctgcactacaagctggcatccgactcatacccctgactgtcacacttcaaatcggcgctatgctggtcgcgatactcacgaaaaagggaaggattgcaccgatttatctcttgttagcaggtgcaattctccagctaatcggcgttgccttcctaagtcaaggggaccctgaacaccccacatggagtggtacatacgggttcgaagcagtgacgggtgttggattgggattgagtatcggcgtcgtgacattaatgatgcctcacgcgtgcgaggttagagatagagcaaccgccacatcagcagtcgtacaattcaggttcctcggaggagcaacggtcctcgctattgtcacagcagtcgcgaataaatggatactggacgttctcgtgacgcttgtgtctcctgaacaagcgatggtaatcttgagagattctgcagctattgcagatttgcctgctgcaacggagacggcggtgagagaactgtttgtggagagttttgatctgcagatgaagattgtaattgggtttgctgcggcgcagttcccggttatagtactcatgtggaagcggacacctcttttgcttgattgatgtttggtatggtctgtcgtgacgggtcgggctgtatatgtacgaagtaggcgtataacatctagattagttgaagcttaggactttagcggaatacacaatgctctgactattgttggag

SEQ ID NO: 125 - DNA, 1650 bp, Muscodor strobelii
  misc_feature: SGI cDNA ID NO. 559601
  misc_feature: Elevated expression when VOC is produced
  misc_feature: Encodes the peptide sequence at SEQ ID NO 126
atgactactcttttatcgaacgaagagaagcacacagcatttgatagaggcccgaccacgtccgttattgtcgagaatcaagatggaggaattgagcagctggaccgggatcatgaagagggccatctgaagggctggagattacatacacttacacttggactctgcgtaggaaccttcctagtcaatctcgaagtatcaatcgtcagcacatctctcgtgtcgataacaaacgacttgaagcacttcagccaggcaacatgggtcgtcaccgcttatctcctaacatacacgagctttatgatcatcactgcgaaacttagcgatatgctcggacggaagagtatgatgctattcgctatgggggtatttacggtgttctcgggggcttgcgcggcggcagggacgattgttgagcttatcgtcctccgagcactccagggtataggaggctgcggtatctacgctctctctatcgtaatcgtcgtcgagatggtgccgtcgcgtaaatggtcactgtacatgatactccttacctccttgtttgctgtggctatgatactaggtccggtcctcggcggcttgattaatgaatattctagctggatttgggtgtttcttctcaatgtacccggcggtgcccttgcgtttcttctcgtggcgatatcgatgcctgccaaattcccacatcagaataatccaaatgtcaggcgccgaatttccctcggtcgtattgatttcctcggtggattcctacttctcgctgctatgacattgtggatcacgagttttgaacaagcggcgaatttgtatccttgggcttcggcgactgtcctcgcgcccctaactatatcgatagtcctttggatactattcttcgtatcgcaatggtgggtcacgaagagggaaagaaaagtcgagcctgttttcccttggcggttctgtagagatcgagttgttatgggcatcatcgcaaactcatttctgagcggcaccatatcaacaacgtgcataatcaacatcccactgcgcttccagaccgctgccggactctctgcactacaagctggcatccgactcatacccctgactgtcacacttcaaatcggcgctatgctggtcgcgatactcacgaaaaagggaaggattgcaccgatttatctcttgttagcaggtgcaattctccagctaatcggcgttgccttcctaagtcaaggggaccctgaacaccccacatggagtggtacatacgggttcgaagcagtgacgggtgttggattgggattgagtatcggcgtcgtgacattaatgatgcctcacgcgtgcgaggttagagatagagcaaccgccacatcagcagtcgtacaattcaggttcctcggaggagcaacggtcctcgctattgtcacagcagtcgcgaataaatggatactggacgttctcgtgacgcttgtgtctcctgaacaagcgatggtaatcttgagagattctgcagctattgcagatttgcctgctgcaacggagacggcggtgagagaactgtttgtggagagttttgatctgcagatgaagattgtaattgggtttgctgcggcgcagttcccggttatagtactcatgtggaagcggacacctcttttgcttgattga

SEQ ID NO: 126 - protein, 549 aa, Muscodor strobelii
  misc_feature: SGI Peptide ID NO. 559601
  misc_feature (55)..(466): Pfam Id: PF07690 Pfam Desc: Major Facilitator Superfamily
  misc_feature (55)..(546): NCBI GI: 212533541 Blast Desc: multidrug resistance protein fnx1, [Penicillium marneffei ATCC 18224] gi|210072291|gb|EEA26380.1| multidrug resistance protein fnx1, [Penicillium marneffei ATCC 18224]
  misc_feature (107)..(544): NCBI GI: 242810792 Blast Desc: efflux pump antibiotic resistance protein, [Talaromyces stipitatus ATCC 10500] gi|218716280|gb|EED15702.1| efflux pump antibiotic resistance protein, [Talaromyces ATCC
  misc_feature (37)..(543): NCBI GI: 67526853 Blast Desc: AN3884.2 [Aspergillus nidulans FGSC A4] gi|40739959|gb|EAA59149.1| AN3884.2 [Aspergillus nidulans FGSC A4] gi|259481548|tpe|CBF75171.1| TPA: MFS multidrug transporter,
  misc_feature (7)..(545): NCBI GI: 256728111 Blast Desc: NECHADRAFT_53897 [Nectria haematococca mpVI 77-13-4]
  misc_feature (36)..(543): NCBI GI: 242773497 Blast Desc: efflux pump antibiotic resistance protein, [Talaromyces stipitatus ATCC 10500] gi|218721871|gb|EED21289.1| efflux pump antibiotic resistance protein, [Talaromyces ATCC
  misc_feature (6)..(545): NCBI GI: 225556984 Blast Desc: drug resistance transporter EmrB/QacA subfamily [Ajellomyces capsulatus G186AR]
  misc_feature (2)..(457): NCBI GI: 240278164 Blast Desc: MFS multidrug transporter [Ajellomyces capsulatus H143]
  misc_feature (25)..(545): NCBI GI: 212545512 Blast Desc: MFS multidrug transporter, [Penicillium marneffei ATCC 18224] gi|210065879|gb|EEA19973.1| MFS multidrug transporter, [Penicillium marneffei ATCC 18224]
  misc_feature (16)..(545): NCBI GI: 145605649 Blast Desc: MGG_11786 [Magnaporthe grisea 70-15] gi|145013450|gb|EDJ98091.1| MGG_11786 [Magnaporthe grisea 70-15]
  misc_feature (44)..(543): NCBI GI: 169772129 Blast Desc: [Aspergillus oryzae RIB40] gi|83768393|dbj|BAE58532.1| protein product [Aspergillus oryzae]
  misc_feature: Useful for introducing or modulating the production of volatile compounds
MTTLLSNEEKHTAFDRGPTTSVIVENQDGGIEQLDRDHEEGHLKGWRLHTLTLGLCVGTFLVNLEVSIVSTSLVSITNDLKHFSQATWVVTAYLLTYTSFMIITAKLSDMLGRKSMMLFAMGVFTVFSGACAAAGTIVELIVLRALQGIGGCGIYALSIVIVVEMVPSRKWSLYMILLTSLFAVAMILGPVLGGLINEYSSWIWVFLLNVPGGALAFLLVAISMPAKFPHQNNPNVRRRISLGRIDFLGGFLLLAAMTLWITSFEQAANLYPWASATVLAPLTISIVLWILFFVSQWWVTKRERKVEPVFPWRFCRDRVVMGIIANSFLSGTISTTCIINIPLRFQTAAGLSALQAGIRLIPLTVTLQIGAMLVAILTKKGRIAPIYLLLAGAILQLIGVAFLSQGDPEHPTWSGTYGFEAVTGVGLGLSIGVVTLMMPHACEVRDRATATSAVVQFRFLGGATVLAIVTAVANKWILDVLVTLVSPEQAMVILRDSAAIADLPAATETAVRELFVESFDLQMKIVIGFAAAQFPVIVLMWKRTPLLLD

SEQ ID NO: 127 - DNA, 2150 bp, Muscodor strobelii; identical to SEQ ID NO: 124
  misc_feature: SGI EST ID NO. CUFF.386.2
  misc_feature: Variant of the nucleotide sequence at SEQ ID NO 125

SEQ ID NO: 128 - DNA, 1053 bp, Muscodor strobelii
  misc_feature: SGI cDNA ID NO. 559602
  misc_feature: Reduced expression when VOC is produced
  misc_feature: Encodes the peptide sequence at SEQ ID NO 129
atgcaccgcacatactctatgcgccagtcgcgggcgcccaccgcttcacagattcagaacccccctcctccgccatcttccaccaagtccggtcgcctgttcggcaagggtggcttcggacatgctctccgtcgcaatgcggcaggcgcctttggccctgatctcgccaagaagctcacccagctcgtcaagatggagaagaacgtgatgcgcagcatggagctcgtcgccaaggagcgcatggaggtcgctcaacaactctccatctggggcgagggcggcgacgaggatgtgtccgacgtcaccgacaagctcggcgtgctgctctacgagatcgccgagctcgaggaccagtatgtcgaccgctacgaccagtaccgcgtcaccatgaagagcattaggaacatcgaggcctctgtccagcccagcagagacaggaaacagaagatcgccgaccagatcgcccagctcaagtacaaagagcccaactcgcccaagatcgtcgtgctcgagcaggagctcgtccgcgccgaggccgagtcgctcgtcgccgaggcgcagctgtccaacatcacgcgcgagaagataaaggccgcctacacgtaccagttcgacgccctgcgcgagcacagcgagaaggtcgccatcatcgccggcttcggcaagcacctgctcgagctcatcgacgacacccccgtcacccccggcgagacccgcgccgcctacgacggctacgaggccagcaaggccatcatccaggactgcgaggaggccctgaccaactgggtcacctccaacgccgccgtctcctccaagctctccacccgcgcccgcaccctgtccacccgccgccgcaacaacatcaaggcccgctccgaaggtatggacttgtcgggtcaggacgcgccgctgaacgaccgggactcgtgggtcgccgccggtgaccacaagggcgagtacgacgacgaagaggacgacgaggcgcactcggttctggactcggacaacggtctgaacggcgagcagcgcgggagacagcccatcgcagcctag

SEQ ID NO: 129 - protein, 350 aa, Muscodor strobelii
  misc_feature: SGI Peptide ID NO. 559602
  misc_feature (1)..(345): NCBI GI: 39975401 Blast Desc: sphingolipid long chain base sensory protein, [Magnaporthe grisea 70-15] gi|145018996|gb|EDK03275.1| sphingolipid long chain base sensory protein, [Magnaporthe grisea
  misc_feature (7)..(345): NCBI GI: 171687393 Blast Desc: protein product [Podospora anserina] gi|170943658|emb|CAP69310.1| protein product [Podospora anserina]
  misc_feature (1)..(346): NCBI GI: 189202420 Blast Desc: meiotic expression up-regulated protein 14 [Pyrenophora tritici-repentis Pt-1C-BFP] gi|187984645|gb|EDU50133.1| meiotic expression up-regulated 14
  misc_feature (1)..(318): NCBI GI: 119178416 Blast Desc: CIMG_08044 [Coccidioides immitis RS] gi|240104855|gb|EER23050.1| sphingolipid long chain base-responsive protein PIL1, [Coccidioides posadasii C735 delta
  misc_feature (1)..(345): NCBI GI: 46108036 Blast Desc: FG00900.1 [Gibberella zeae PH-1]
  misc_feature (1)..(348): NCBI GI: 67538094 Blast Desc: AN5217.2 [Aspergillus nidulans FGSC A4] gi|40743208|gb|EAA62398.1| AN5217.2 [Aspergillus nidulans FGSC A4] gi|259484676|tpe|CBF81101.1| TPA: primary component of FGSC
  misc_feature (1)..(326): NCBI GI: 115390693 Blast Desc: sphingolipid long chain base-responsive protein PIL1 [Aspergillus terreus NIH2624] gi|114193775|gb|EAU35475.1| sphingolipid long chain base-responsive protein PIL1 [Aspergillus
  misc_feature (1)..(346): NCBI GI: 261355214 Blast Desc: sphingolipid long chain base-responsive protein LSP1 [Verticillium albo-atrum VaMs.102]
  misc_feature (1)..(350): NCBI GI: 212540872 Blast Desc: cell wall integrity signaling protein Lsp1/Pil1, [Penicillium marneffei ATCC 18224] gi|210067890|gb|EEA21982.1| cell wall integrity signaling protein Lsp1/Pil1, [Penicillium
  misc_feature (1)..(325): NCBI GI: 255943347 Blast Desc: Pc18g06150 [Penicillium chrysogenum Wisconsin 54-1255] gi|211587175|emb|CAP94839.1| Pc18g06150 [Penicillium chrysogenum Wisconsin 54-1255]
  misc_feature: Useful for introducing or modulating the production of volatile compounds
MHRTYSMRQSRAPTASQIQNPPPPPSSTKSGRLFGKGGFGHALRRNAAGAFGPDLAKKLTQLVKMEKNVMRSMELVAKERMEVAQQLSIWGEGGDEDVSDVTDKLGVLLYEIAELEDQYVDRYDQYRVTMKSIRNIEASVQPSRDRKQKIADQIAQLKYKEPNSPKIVVLEQELVRAEAESLVAEAQLSNITREKIKAAYTYQFDALREHSEKVAIIAGFGKHLLELIDDTPVTPGETRAAYDGYEASKAIIQDCEEALTNWVTSNAAVSSKLSTRARTLSTRRRNNIKARSEGMDLSGQDAPLNDRDSWVAAGDHKGEYDDEEDDEAHSVLDSDNGLNGEQRGRQPIAA

SEQ ID NO: 130 - DNA, 1915 bp, Muscodor strobelii
  misc_feature: SGI EST ID NO. CUFF.688.0
  misc_feature: Variant of the nucleotide sequence at SEQ ID NO 128
ccgcctcgttgtgcctccatggcccattccccatgtcttatttatgcggcgtccgctttgacgatcagtgtccccttccctcattgttcaattcccagcttgcaaacaatcaaacaacactcttccctatcctctttgacgtatctgctcttatccggactcttgtcgcaacaacaacaacatcaccccgcatcctaccgaagcattcctgactcctgagcccctagactctctctctcacccgcgtttgcccttgtcgcaatcgcttgagaaacaacccctacagccttttacatatctcaccactacccctctaccaacatgcaccgcacatactctatgcgccagtcgcgggcgcccaccgcttcacagattcagaacccccctcctccgccatcttccaccaagtccggtcgcctgttcggcaagggtggcttcggacatgctctccgtcgcaatgcggcaggcgcctttggccctgatctcgccaagaagctcacccagctcgtcaagatggagaagaacgtgatgcgcagcatggagctcgtcgccaaggagcgcatggaggtcgctcaacaactctccatctggggcgagggcggcgacgaggatgtgtccgacgtcaccgacaagctcggcgtgctgctctacgagatcgccgagctcgaggaccagtatgtcgaccgctacgaccagtaccgcgtcaccatgaagagcattaggaacatcgaggcctctgtccagcccagcagagacagtcagtccatcccacttcatccattgcgaccaaataacacactgacatcagcgatctcacagggaaacagaagatcgccgaccagatcgcccagctcaagtacaaagagcccaactcgcccaagatcgtcgtgctcgagcaggagctcgtccgcgccgaggccgagtcgctcgtcgccgaggcgcagctgtccaacatcacgcgcgagaagataaaggccgcctacacgtaccagttcgacgccctgcgcgagcacagcgagaaggtcgccatcatcgccggcttcggcaagcacctgctcgagctcatcgacgacacccccgtcacccccggcgagacccgcgccgcctacgacggctacgaggccagcaaggccatcatccaggactgcgaggaggccctgaccaactgggtcacctccaacgccgccgtctcctccaagctctccacccgcgcccgcaccctgtccacccgccgccgcaacaacatcaaggcccgctccgaaggtatggacttgtcgggtcaggacgcgccgctgaacgaccgggactcgtgggtcgccgccggtgaccacaagggcgagtacgacgacgaagaggacgacgaggcgcactcggttctggactcggacaacggtctgaacggcgagcagcgcgggagacagcccatcgcagcctaggcgaatgatgtgaggagcgagtcccccgagatggccggcacgttcccggacacgactgttttaatgtctaatatgagcaaaaagcaaaacctactatcaaagctaaaggagggactgagagaattcggtgaagaagtcaatcgcgctggccctgctgctggtggggctggaggcatactgttgagttgagtggaggagaattgagaattgacttgagtacggacggcgatataccatgggcgagagatgaattgtattttactgaactgggtaggcacatgcgagcgaaggagaagcagcacacgatgccattcttttcattaccagactagcaatcatatttattcagagcattcatcatgtggcccgcctatgtcattgcacatgccatatacttgccgagggagttgaggtctctaaccgcccaaaatgttgaatttcgaataattatcaaacgtgaactataataaacactcgct

SEQ ID NO: 131 - DNA, 3177 bp, Muscodor strobelii
  misc_feature: SGI cDNA ID NO. 559603
  misc_feature: Encodes the peptide sequence at SEQ ID NO 132
atgcctacgacaacaaacacaactaccagagcggcgtcctcgaaaatgaccagccaggatgtcaaagccaatccactaccaatgaggccctctggtccggtaaagaagactcaggatattactgatacaccttccgcttctgttcctaccgccacgttgaccgttcaaatccagagaactccaaaaactcaaaccccaaagaaagtggattggactgttgaaaaagtcgagaatcaacttcgacaattctctcatgaaattggcactaatcacgccaatttgactgcccgtcttatccacgatgcttggaagaaagatgtacccaaaccccagcatatcagccaaaaggattggtttgctggcatgaaaagaactcctgtggagccgggaggcgatacaggtgatgctatgcgtatcaagactaagcaagttggccagggacggtcaggcaagcaggagaagagagaacttttcaaggtcatatgcatcaagaccaacaaggaggcaacacctcgatatacttaccatcacgtggagatcagaaagaacattttatctccaaacacaatgctcacgtatgttccacatcttcgagacttggcagataacgaagaaggtatctaccgacgctggcttgagaatctggaagcaatggacaagacttcaggtttcgctactttaagtcgacacgagaaggtgcaaaagacgattcaaaaggaacgggccacgacactcctagaatatatcgatatttggttgcctcgactgggtattgagggctgtaacaaagctacactcatccgtcatatagccacgcaaagcgatgccgtcactcctcagcagagatcaagcatattgaactcttacaacgacgatcctggttcaccggggtctgcaaagtccgtccgcatgtttaccgaggcatttgatcgagtatttaataatgatgatctggacgatcaagccgttccactccgcgacatcctgttgctcgataagtccgtcgacacgatcgtggatacgaagaagacgatgaaggatacacctagtcaggccaaggttggcgaggcagatatgtcggttgagacctttctcgagacatactctctgctcggttgtctcgtgtgtacaagccattcatgcgagcatggagagtatggtgttgacaacgagcgcaagcggttctctgtggaagttgttggtggactctcacctatgatacgccgacaactcgctcagagagccgaaaagatgaacgaagaacagcctttgacaccccgcaaagctagaaagccctgcggcgaagaatgtttcctacacggtcgtccgggtactcgcgctcgtccgtggacagagacggagaacatgctgttgaaatctttccatctaaatttccacggcacttccatccctgtggcatgctctactgctgtagcgacgggtcgtccctgttgggatgtacagaggcaaatagataagctcgatttgtcacttcctatcgctgaagcccccacaccgtttcaagtcaagcctctcccttggtccgttgtgcttggtcaatccaagattgcgggctacggtctattctctactgaagatatcggtccagatgagttcgtgattgagtatgtgggtgagctgatcagccaagatgaaggcgttcggcgtgaggctcgacgaggcgacgtatttgatgaaagttcgaattcatcctatctcttcactttactggagcaggaaggtatttgggtggatgccgcgatttacggtaacctgagtcgatacatcaatcaccaagatggcaactgcaatatcactccaaggattatgtatgtcaatggcgaatatcggatcaagttcacgtcgttgcgcgagatcaaggcgggagaggagctattcttccattatggagagaatttccctaacctgaccaagaagctgctacaagaagaaaaagacgaaaagaagcgacgaaaagccaaagcgcgtgctgcagaaaaggcagacaagaacaagaagaaacctggacggaaaccgggcaggaaacctggtcgaaagcctggcactggtcctggtcctggtcgcaaacccggtaggaagccaaagaagaagagtttcgctgctctcgagtcagaagacgatagtgacgaaggtggcgacgatgagccttcagaggatccattccctgatatcgaaattcttcctcctcgcaaacggagacgaatgattcatgatgaatctgactctgcagactatcgaccaggtctgggagggtctcgagaagatacccgatcgggcactcagtctatgatgacatctgctgcccaatcgcgagatccatcccttatggcgccgctgccactgaagcgaaccggccatttgaagcgaaagcgtacagctaagggcacgttcgcgccaaaagagaagccggggaagactgtgcaagtaaacgaaaatatggaggccaacgacgaggctgacatgattgacgttgcaaatgaggacaatgacaatgaggaaaaggatgacacaatcgcgagtaatccatcccagaatctacaaaactctaacgatgtcacaactggtgatgacgagcaaccaatcccccctgtcacgccgaagcgacggggtagaaagccgaagcatcctaggccggaagatgtctacgaagacgccagccgtgagcccgctgatgaagtaatcggtcccgctcctagtactcatcacagtgtcacgcgtgcgagtatacagaatagcagtcgatatagtcacaccgaggcacgattggagctcaatccggattcaccagataatgagacaccatcacgacagctacagctagaatccccagctgtagttttggacgaagagactcccacgcgactaagaagccgacgtaaacccgcggaggtcgtagaatctagtccgctctcgaccccgagtgatcccggctctgcgtacatggacgcagaagccgggatatccgattcagatgcaccacgatcggccaggagacgaaaaaagagaatgggcggtactggcggtgatgacgagtataatggcagcagttggacggatagtgacggggtgagacatctcggcggtaaggacgacagtgatgatgattccatcccgatccggaggaggagacgtagaccggctaggtataacgactag

SEQ ID NO: 132 - protein, 1058 aa, Muscodor strobelii
  misc_feature: SGI Peptide ID NO. 559603
  misc_feature (508)..(644): Pfam Id: PF00856 Pfam Desc: SET domain
  misc_feature (515)..(644): Pfam Id: PF00856 Pfam Desc: SET domain
  misc_feature (65)..(514): NCBI GI: 171695980 Blast Desc: protein product [Podospora anserina] gi|170948232|emb|CAP60396.1| protein product [Podospora anserina]
  misc_feature (64)..(514): NCBI GI: 261355213 Blast Desc: SET domain-containing protein [Verticillium albo-atrum VaMs.102]
  misc_feature (61)..(514): NCBI GI: 256734713 Blast Desc: NECHADRAFT_123084 [Nectria haematococca mpVI 77-13-4]
  misc_feature (60)..(514): NCBI GI: 46108034 Blast Desc: FG00899.1 [Gibberella zeae PH-1]
  misc_feature (45)..(514): NCBI GI: 85116376 Blast Desc: NCU07496 [Neurospora crassa OR74A] gi|28926844|gb|EAA35807.1| [Neurospora crassa OR74A]
  misc_feature (58)..(514): NCBI GI: 116180820 Blast Desc: CHGG_01038 [Chaetomium globosum CBS 148.51] gi|88185335|gb|EAQ92803.1| CHGG_01038 [Chaetomium globosum CBS 148.51]
  misc_feature (40)..(499): NCBI GI: 145611742 Blast Desc: MGG_00152 [Magnaporthe grisea 70-15] gi|145018997|gb|EDK03276.1| MGG_00152 [Magnaporthe grisea 70-15]
  misc_feature (513)..(693): NCBI GI: 116180820 Blast Desc: CHGG_01038 [Chaetomium globosum CBS 148.51] gi|88185335|gb|EAQ92803.1| CHGG_01038 [Chaetomium globosum CBS 148.51]
  misc_feature (516)..(697): NCBI GI: 145611742 Blast Desc: MGG_00152 [Magnaporthe grisea 70-15] gi|145018997|gb|EDK03276.1| MGG_00152 [Magnaporthe grisea 70-15]
  misc_feature (512)..(769): NCBI GI: 256734713 Blast Desc: NECHADRAFT_123084 [Nectria haematococca mpVI 77-13-4]
MPTTTNTTTRAASSKMTSQDVKANPLPMRPSGPVKKTQDITDTPSASVPTATLTVQIQRTPKTQTPKKVDWTVEKVENQLRQFSHEIGTNHANLTARLIHDAWKKDVPKPQHISQKDWFAGMKRTPVEPGGDTGDAMRIKTKQVGQGRSGKQEKRELFKVICIKTNKEATPRYTYHHVEIRKNILSPNTMLTYVPHLRDLADNEEGIYRRWLENLEAMDKTSGFATLSRHEKVQKTIQKERATTLLEYIDIWLPRLGIEGCNKATLIRHIATQSDAVTPQQRSSILNSYNDDPGSPGSAKSVRMFTEAFDRVFNNDDLDDQAVPLRDILLLDKSVDTIVDTKKTMKDTPSQAKVGEADMSVETFLETYSLLGCLVCTSHSCEHGEYGVDNERKRFSVEVVGGLSPMIRRQLAQRAEKMNEEQPLTPRKARKPCGEECFLHGRPGTRARPWTETENMLLKSFHLNFHGTSIPVACSTAVATGRPCWDVQRQIDKLDLSLPIAEAPTPFQVKPLPWSVVLGQSKIAGYGLFSTEDIGPDEFVIEYVGELISQDEGVRREARRGDVFDESSNSSYLFTLLEQEGIWVDAAIYGNLSRYINHQDGNCNITPRIMYVNGEYRIKFTSLREIKAGEELFFHYGENFPNLTKKLLQEEKDEKKRRKAKARAAEKADKNKKKPGRKPGRKPGRKPGTGPGPGRKPGRKPKKKSFAALESEDDSDEGGDDEPSEDPFPDIEILPPRKRRRMIHDESDSADYRPGLGGSREDTRSGTQSMMTSAAQSRDPSLMAPLPLKRTGHLKRKRTAKGTFAPKEKPGKTVQVNENMEANDEADMIDVANEDNDNEEKDDTIASNPSQNLQNSNDVTTGDDEQPIPPVTPKRRGRKPKHPRPEDVYEDASREPADEVIGPAPSTHHSVTRASIQNSSRYSHTEARLELNPDSPDNETPSRQLQLESPAVVLDEETPTRLRSRRKPAEVVESSPLSTPSDPGSAYMDAEAGISDSDAPRSARRRKKRMGGTGGDDEYNGSSWTDSDGVRHLGGKDDSDDDSIPIRRRRRRPARYND

SEQ ID NO: 133 - DNA, 5821 bp, Muscodor strobelii
  misc_feature: SGI EST ID NO. CUFF.435.0
  misc_feature: Variant of the nucleotide sequence at SEQ ID NO 131
caccagcctagccgcccaattggacccatcaatgtcatttgcgccaagttgccgggattggacagtcgcgtcagaagttgtgatatggaagagtgaagagagccacgtccataaggcactcatcccgctttgtcgttgggcatacggggtcgttgtcgtaaagacatgtcctcatatcattctgtgctgagccagaacaactccttgttcatggagacgcgcctgcgcctgcgcctgcatttgcatccgcaatactgactcagttttcatcattcaccatcagataatcatccacggcgttcaattctcttttcatcagtcggaacctggcctcatcatttttcatcctcacttcatcctttccttcgtttctgtatactagggaagctcatgactgcataatcttcaaaccgcaggacgaaataagcatagctgccaagcaattgcaagttcgacgagtgtgtgccttttgttgccatcagatacccctctcgctgcaagagatgacattcaatcatgacaagacccaagaaggatacctcggaggaggcgcatggggagattttgtacaaatcaaagactagttttctagacaacttcacatttccaggtcggagtcgcaagccaatcagccccccggttatcaatcgccagcccccaaactcgggtactctggactccatctcgtatcgcgaaactgctccaatgcctacgacaacaaacacaactaccagagcggcgtcctcgaaaatgaccagccaggatgtcaaagccaatccactaccaatgaggccctctggtccggtaaagaagactcaggatattactgatacaccttccgcttctgttcctaccgccacgttgaccgttcaaatccagagaactccaaaaactcaaaccccaaagaaagtggattggactgttgaaaaagtcgagaatcaacttcgacaattctctcatgaaattggcactaatcacgccaatttgactgcccgtcttatccacgatgcttggaagaaagatgtacccaaaccccagcatatcagccaaaaggattggtttgctggcatgaaaagaactcctgtggagccgggaggcgatacaggtgatgctatgcgtatcaagactaagcaagttggccagggacggtcaggcaagcaggagaagagagaacttttcaaggtcatatgcatcaagaccaacaaggaggcaacacctcgatatacttaccatcacgtggagatcagaaagaacattttatctccaaacacaatgctcacgtatgttccacatcttcgagacttggcagataacgaagaaggtatctaccgacgctggcttgagaatctggaagcaatggacaagacttcaggtttcgctactttaagtcgacacgagaaggtgcaaaagacgattcaaaaggaacgggccacgacactcctagaatatatcgatatttggttgcctcgactgggtattgagggctgtaacaaagctacactcatccgtcatatagccacgcaaagcgatgccgtcactcctcagcagagatcaagcatattgaactcttacaacgacgatcctggttcaccggggtctgcaaagtccgtccgcatgtttaccgaggcatttgatcgagtatttaataatgatgatctggacgatcaagccgttccactccgcgacatcctgttgctcgataagtccgtcgacacgatcgtggatacgaagaagacgatgaaggatacacctagtcaggccaaggttggcgaggcagatatgtcggttgagacctttctcgagacatactctctgctcggttgtctcgtgtgtacaagccattcatgcgagcatggagagtatggtgttgacaacgagcgcaagcggttctctgtggaagttgttggtggactctcacctatgatacgccgacaactcgctcagagagccgaaaagatgaacgaagaacagcctttgacaccccgcaaagctagaaagccctgcggcgaagaatgtttcctacacggtcgtccgggtactcgcgctcgtccgtggacagagacggagaacatgctgttgaaatctttccatctaaatttccacggcacttccatccctgtggcatgctctactgctgtagcgacgggtcgtccctgttgggatgtacagaggcaaatagataagctcgatttgtcacttcctatcgctgaagcccccacaccgtttcaagtcaagcctctcccttggtacgacaggaaaaagaagatgctcatcggtgattggcaagagcaaaccaatactcatgagcatcagcgaaaggatcacttcgatccgtgtcatcacgatgggccatgcgacagaaattgcccttgcgttcaaaatcatattatgtgcgaacgcttctgtcgctgtacagaggagacctgcgccaacaagttcacaggatgcgcttgtcattccctgggaaagagttgcgtagcaaagcagaaggatcgaccttgcatttgcatccaattaaatcgcgaatgcgatcctgcgttatgcggtacatgtggcgcgagagaaagagccatgccgaaaaatgcagatgacgatgcccttcattcgaccggctgtcagaattgctcattacaacgtggcaaatccaggtccgttgtgcttggtcaatccaagattgcgggctacggtctattctctactgaagatatcggtccagatgagttcgtgattgagtatgtgggtgagctgatcagccaagatgaaggcgttcggcgtgaggctcgacgaggcgacgtatttgatgaaagttcgaattcatcctatctcttcactttactggagcaggaaggtatttgggtggatgccgcgatttacggtaacctgagtcgatacatcaatcaccaagatggcaactgcaatatcactccaaggattatgtatgtcaatggcgaatatcggatcaagttcacgtcgttgcgcgagatcaaggcgggagaggagctattcttccattatggagagaatttccctaacctgaccaagaagctgctacaagaagaaaaagacgaaaagaagcgacgaaaagccaaagcgcgtgctgcagaaaaggcagacaagaacaagaagaaacctggacggaaaccgggcaggaaacctggtcgaaagcctggcactggtcctggtcctggtcgcaaacccggtaggaagccaaagaagaagagtttcgctgctctcgagtcagaagacgatagtgacgaaggtggcgacgatgagccttcagaggatccattccctgatatcgaaattcttcctcctcgcaaacggagacgaatgattcatgatgaatctgactctgcagactatcgaccaggtctgggagggtctcgagaagatacccgatcgggcactcagtctatgatgacatctgctgcccaatcgcgagatccatcccttatggcgccgctgccactgaagcgaaccggccatttgaagcgaaagcgtacagctaagggcacgttcgcgccaaaagagaagccggggaagactgtgcaagtaaacgaaaatatggaggccaacgacgaggctgacatgattgacgttgcaaatgaggacaatgacaatgaggaaaaggatgacacaatcgcgagtaatccatcccagaatctacaaaactctaacgatgtcacaactggtgatgacgagcaaccaatcccccctgtcacgccgaagcgacggggtagaaagccgaagcatcctaggccggaagatgtctacgaagacgccagccgtgagcccgctgatgaagtaatcggtcccgctcctagtactcatcacagtgtcacgcgtgcgagtatacagaatagcagtcgatatagtcacaccgaggcacgattggagctcaatccggattcaccagataatgagacaccatcacgacagctacagctagaatccccagctgtagttttggacgaagagactcccacgcgactaagaagccgacgtaaacccgcggaggtcgtagaatctagtccgctctcgaccccgagtgatcccggctctgcgtacatggacgcagaagccgggatatccgattcagatgcaccacgatcggccaggagacgaaaaaagagaatgggcggtactggcggtgatgacgagtataatggcagcagttggacggatagtgacggggtgagacatctcggcggtaaggacgacagtgatgatgattccatcccgatccggaggaggagacgtagaccggctaggtataacgactagatctcggcgatgggtggggtgcgtcgggtgcttaagaagatgtttggctcatgagaggcggacactgggaattagggggggtggattatatggctatacgtattgctatgatagcaaatcaaccttgtgaagaaaaagccgagaggtgtatgcctaagagatagcacctaggtagatacgtaatcgctagtaatcgttgagttcacagaatgtgtggttttgaatttggcgtgaaaattgcgaactcgccgtgtttctgacgattggaggtacgaggatgcagcaatgcgcattggacgtgatcgcgttgcctcctgttactggtgcaggcagtcaactatatagttcgaaatagtttaaccctctccaaggtctagcataccatatacacggtaagccatcctctaggtagtcgggcaagtccgagttcctggttggtcggtgacgacgagagtggaatgttgcctttttgccttttctttttacttctgcctcttctccacaccctacgcgtaactggcgtttgcctctactcgcgtttacaatagtactcctaactcagttgatcatagttacagaacgcaaatgacagtatgaagagacaagccagattactctgctcgaaaatcgcaatcattgctaaaagtattatcccccttctcatagtttcaagttattgcgtacacataattatatccattcaactcaatcactttccgacgcttcaagcaaatagagacctttcatcatcccgtatgatgctaggggcattttcctccaagagttggacatttacacttgccatcacagcacaactttgtgtcactagcatttccttttcctctagggcactcctgagtgcagaatttccctttatctgggtcacactcaggttcaggaggaggcggcggcggtggtgggggcggaggctcagctgtggaagtagtcgttccaacaggtggctcatgcacctgctcaactgtgtgctgcgatatggtcattgataatagtcccgtcgctttagaagaagaagcagacgtactactggtagtctgagacgaaactgaagtcgtcgaggttgacgttggatgtgtagatgtcgaaggagtcgtcttcgaagaagcagaacttgcgctggacacagaagaggtaccaggattcaaagtaacagtctgctgcgagacactgtagatagtttgtgtagccgttactgtctgcgagacgccgggctgtgtcgtaatctcggtcacaacaacagtggaggcacccgctggaggagcgatggtctgcgtgacagttgaggtgacatttttgcaatcgactggattcattccggtctggacttgcgctgttcgtattatgcttggtgcagtgatgggacaggtgccaatgttttggacaccagtcgcaacaaccatgattatcacatcgtccactttgaaagtcgtatccaaaactgctgctgctggatcgatgctttcagcaaggaccgcgaacaccgttgtcatgggctgaatggtcgtcttgaaaggcgtcc

SEQ ID NO: 134 - DNA, 588 bp, Muscodor strobelii
  misc_feature: SGI cDNA ID NO. 559604
  misc_feature: Elevated expression when VOC is produced
  misc_feature: Encodes the peptide sequence at SEQ ID NO 135
atgttggtcagtctgtcgatcttggccccattggccttggtcccaagtgttgatggtcgcatacatcgacatgctcatagacgtgatctcgcaccccgagacgctagctcagcaacagcatatgacccccctattacagaggtcgtagtcacatccacgatatgtagttggacgcctttcaagacgaccattcagcccatgacaacggtgttcgcggtccttgctgaaagcatcgatccagcagcagcagttttggatacgactttcaaagtggacgatgtgataatcatggttgttgcgactggtgtccaaaacattggcacctgtcccatcactgcaccaagcataatacgaacagcgcaagtccagaccggaatgaatccagtcgattgcaaaaatgtcacctcaactgtcacgcagaccatcgctcctccagcgggtgcctccactgttgttgtgaccgagattacgacacagcccggcgtctcgcagacacgcaagttctgcttcttcgaagacgactccttcgacatctacacatccaacgtcaacctcgacgacttcagtttcgtctcagactaccagtag

SEQ ID NO: 135 - protein, 195 aa, Muscodor strobelii
  misc_feature: SGI Peptide ID NO. 559604
  misc_feature: Useful for introducing or modulating the production of volatile compounds
MLVSLSILAPLALVPSVDGRIHRHAHRRDLAPRDASSATAYDPPITEVVVTSTICSWTPFKTTIQPMTTVFAVLAESIDPAAAVLDTTFKVDDVIIMVVATGVQNIGTCPITAPSIIRTAQVQTGMNPVDCKNVTSTVTQTIAPPAGASTVVVTEITTQPGVSQTRKFCFFEDDSFDIYTSNVNLDDFSFVSDYQ

SEQ ID NO: 136 - DNA, 8577 bp, Muscodor strobelii
  misc_feature: SGI EST ID NO. CUFF.436.1
  misc_feature: Variant of the nucleotide sequence at SEQ ID NO 134
ttcaggtctgatctatcctcggatgagacgcttttaatcgtgcgttgctcgtctcgctcgcccgtttgaatctcaccgtccaaactcatctcatcttttgtctcacccatttgcgtattgtctgcgctacttatcattccgggtcgcagaaaaccgcccctgactaccaccgacaggcgaactctaaggaactgtcgtaatcaatctcagtatgatctagtcatagtaatctcgatattttctttcgtctctgtccattcgtcatcccatcaagtgtcatgtggactttaggaagtcgactggattcgccagcttcattttccatttgcagatggcatttctcctgcgtggtctgacttggttcctgtcacttggatcactcgcagacatgcatcaacaataccagcatcaatatgatgacaccacgctcacccttacgtctgttggagcgccagatccatatgtcaagctgattaggaatcgattctttatgacatttactgcgtccgaccgaattgagatatggtcatccccgagtcttcttgacattgagaaatctgggactaaacatgttatatggaagccacctccggggacagaccactctgcagatctatgggcgcccgaactgcacgctcttaggggacgctggtacatctactatgccgccgccaacccccgagatggcaacaaaagtcatcgtatgtacgtgctaggtggaccgcctgcgacagaaaatccctcaatgggccaatgggaatttctgggtcgcatccacgacatgcccgatcaatgggcaatagacggaacaattctcgacattgacgatcgcctctacctcgtatactcgggttggccgctcgaaagcactgtacaacaccagctagaccaatctcactctatcgaagactatatcagacagtatcagatcaccaatagagccagtaacaagagatacaggaagaccaaagaaagaacggagctatggaggaaatcgcaaaagtgccagctgaatgatgatcttcgcagtgccaatgggtcggacctcgttcagcaattgttcatcatgcgacttgatgacccgacgacagcgggaagtcgccctgttgcaatttgtctccccgaccaaccgtgggagataacgcatgattggaatggggatcacgctatcaacgaaggaccgcaatggctttctgcgccagatggacgatggcagggattagtgtacagctgtgctgcatcttggacaaacgaatacaagatggcgacattgaaatacgacggtggagacccacttgatccgacatcatggcataaaggagacagacctcttctccagacgaagacaaaaggacgtccgccttggtacggacctggacacgggagtttcttgaatgttggaaatagcaacatgatctcggtatatcacgctactgatggtccggctgatggatgggagaatagacgtgctagagttcaacgagttggatttacggagcatggaccatatatggggaaatcgtttggttttgggaagaaaaagagttggatagggaaggtgaaagataaaatcaggggcaagaatgaagacgaaattggatgcgacggccggcaagggtttagagagatgcttggaggtcaggttgcgagagacaggaggccagatgagatgtaaatctgggaggatgtgcagggaagtcgagctggtactcgtttgagcttgctgaatttgagcttgtatgctgtttgatgaagccatctttctaaagctatggcgtccgcaatacacggctactatatccttcctaaccaccgcatccctatggcaacccgatccgaataatcaaattgaataaccagtcctgcccctccttctctcattggccggccgtacctgagtacatgagtccaaaaagcgctcagacattcaacacaaatggcctagtggtctgaaggtgcaattcctcaaacgcacctaaagccatggggttcgacgccgggtcgtgcctcctgtgtagatcggggaatgctgcggttgtgttgagaacgctcgctccacttatccaaggctcttgtttcagtaggtcatttgtgtcttttttattttattttttcatttcttatatacaaaaaagcatcataacccgagcatcgggcgcgggttacgcacacaaaagtcaaacgcaacagtatttctgcaagccgagtctctggttctgtgtccattcacatatcatttcttcacttgataatgctatattgtcgttaggtcgaactgtccagtccaccctgtacgatatccagcccgagatcatcccatagtggtggaatgtgccgatggctgttggtatcacgaagcacatccgaagaaaaccggggaatgctggagtgtggggggcggaactgagttgcttgttggcgtactggaatgtgcctggtaagaaccgacggtcaccggaaacgactccttcattaaaggtatttgatatccgaccaacggctctatgatcaccactttatgaatgcttgtatagcgccaacgtgatatccgaaatcgccaacattgggattgccaacaactatcgcgctcactctggatcaggacaaagaacaccgaactcatgtataccgagatcttggaacttctgtggaacaatgtgtgggatccgcctcactttaaacaaagtggacatgagtctatgatcctttcgtagttaagtcatgttggtcagtctgtcgatcttggccccattggccttggtcccaagtgttgatggtcgcatacatcgacatgctcatagacgtgatctcgcaccccgagacgctagctcagcaacagcatatgacccccctattacagaggtcgtagtcacatccacgatatgtagttggacgcctttcaagacgaccattcagcccatgacaacggtgttcgcggtccttgctgaaagcatcgatccagcagcagcagttttggatacgactttcaaagtggacgatgtgataatcatggttgttgcgactggtgtccaaaacattggcacctgtcccatcactgcaccaagcataatacgaacagcgcaagtccagaccggaatgaatccagtcgattgcaaaaatgtcacctcaactgtcacgcagaccatcgctcctccagcgggtgcctccactgttgttgtgaccgagattacgacacagcccggcgtctcgcagacagtaacggctacacaaactatctacagtgtctcgcagcagactgttactttgaatcctggtacctcttctgtgtccagcgcaagttctgcttcttcgaagacgactccttcgacatctacacatccaacgtcaacctcgacgacttcagtttcgtctcagactaccagtagtacgtctgcttcttcttctaaagcgacgggactattatcaatgaccatatcgcagcacacagttgagcaggtgcatgagccacctgttggaacgactacttccacagctgagcctccgcccccaccaccgccgccgcctcctcctgaacctgagtgtgacccagataaagggaaattctgcactcaggagtgccctagaggaaaaggaaatgctagtgacacaaagttgtgctgtgatggcaagtgtaaatgtccaactcttggaggaaaatgcccctagcatcatacgggatgatgaaaggtctctatttgcttgaagcgtcggaaagtgattgagttgaatggatataattatgtgtacgcaataacttgaaactatgagaagggggataatacttttagcaatgattgcgattttcgagcagagtaatctggcttgtctcttcatactgtcatttgcgttctgtaactatgatcaactgagttaggagtactattgtaaacgcgagtagaggcaaacgccagttacgcgtagggtgtggagaagaggcagaagtaaaaagaaaaggcaaaaaggcaacattccactctcgtcgtcaccgaccaaccaggaactcggacttgcccgactacctagaggatggcttaccgtgtatatggtatgctagaccttggagagggttaaactatttcgaactatatagttgactgcctgcaccagtaacaggaggcaacgcgatcacgtccaatgcgcattgctgcatcctcgtacctccaatcgtcagaaacacggcgagttcgcaattttcacgccaaattcaaaaccacacattctgtgaactcaacgattactagcgattacgtatctacctaggtgctatctcttaggcatacacctctcggctttttcttcacaaggttgatttgctatcatagcaatacgtatagccatataatccaccccccctaattcccagtgtccgcctctcatgagccaaacatcttcttaagcacccgacgcaccccacccatcgccgagatctagtcgttatacctagccggtctacgtctcctcctccggatcgggatggaatcatcatcactgtcgtccttaccgccgagatgtctcaccccgtcactatccgtccaactgctgccattatactcgtcatcaccgccagtaccgcccattctcttttttcgtctcctggccgatcgtggtgcatctgaatcggatatcccggcttctgcgtccatgtacgcagagccgggatcactcggggtcgagagcggactagattctacgacctccgcgggtttacgtcggcttcttagtcgcgtgggagtctcttcgtccaaaactacagctggggattctagctgtagctgtcgtgatggtgtctcattatctggtgaatccggattgagctccaatcgtgcctcggtgtgactatatcgactgctattctgtatactcgcacgcgtgacactgtgatgagtactaggagcgggaccgattacttcatcagcgggctcacggctggcgtcttcgtagacatcttccggcctaggatgcttcggctttctaccccgtcgcttcggcgtgacaggggggattggttgctcgtcatcaccagttgtgacatcgttagagttttgtagattctgggatggattactcgcgattgtgtcatccttttcctcattgtcattgtcctcatttgcaacgtcaatcatgtcagcctcgtcgttggcctccatattttcgtttacttgcacagtcttccccggcttctcttttggcgcgaacgtgcccttagctgtacgctttcgcttcaaatggccggttcgcttcagtggcagcggcgccataagggatggatctcgcgattgggcagcagatgtcatcatagactgagtgcccgatcgggtatcttctcgagaccctcccagacctggtcgatagtctgcagagtcagattcatcatgaatcattcgtctccgtttgcgaggaggaagaatttcgatatcagggaatggatcctctgaaggctcatcgtcgccaccttcgtcactatcgtcttctgactcgagagcagcgaaactcttcttctttggcttcctaccgggtttgcgaccaggaccaggaccagtgccaggctttcgaccaggtttcctgcccggtttccgtccaggtttcttcttgttcttgtctgccttttctgcagcacgcgctttggcttttcgtcgcttcttttcgtctttttcttcttgtagcagcttcttggtcaggttagggaaattctctccataatggaagaatagctcctctcccgccttgatctcgcgcaacgacgtgaacttgatccgatattcgccattgacatacataatccttggagtgatattgcagttgccatcttggtgattgatgtatcgactcaggttaccgtaaatcgcggcatccacccaaataccttcctgctccagtaaagtgaagagataggatgaattcgaactttcatcaaatacgtcgcctcgtcgagcctcacgccgaacgccttcatcttggctgatcagctcacccacatactcaatcacgaactcatctggaccgatatcttcagtagagaatagaccgtagcccgcaatcttggattgaccaagcacaacggacctggatttgccacgttgtaatgagcaattctgacagccggtcgaatgaagggcatcgtcatctgcatttttcggcatggctctttctctcgcgccacatgtaccgcataacgcaggatcgcattcgcgatttaattggatgcaaatgcaaggtcgatccttctgctttgctacgcaactctttcccagggaatgacaagcgcatcctgtgaacttgttggcgcaggtctcctctgtacagcgacagaagcgttcgcacataatatgattttgaacgcaagggcaatttctgtcgcatggcccatcgtgatgacacggatcgaagtgatcctttcgctgatgctcatgagtattggtttgctcttgccaatcaccgatgagcatcttctttttcctgtcgtaccaagggagaggcttgacttgaaacggtgtgggggcttcagcgataggaagtgacaaatcgagcttatctatttgcctctgtacatcccaacagggacgacccgtcgctacagcagtagagcatgccacagggatggaagtgccgtggaaatttagatggaaagatttcaacagcatgttctccgtctctgtccacggacgagcgcgagtacccggacgaccgtgtaggaaacattcttcgccgcagggctttctagctttgcggggtgtcaaaggctgttcttcgttcatcttttcggctctctgagcgagttgtcggcgtatcataggtgagagtccaccaacaacttccacagagaaccgcttgcgctcgttgtcaacaccatactctccatgctcgcatgaatggcttgtacacacgagacaaccgagcagagagtatgtctcgagaaaggtctcaaccgacatatctgcctcgccaaccttggcctgactaggtgtatccttcatcgtcttcttcgtatccacgatcgtgtcgacggacttatcgagcaacaggatgtcgcggagtggaacggcttgatcgtccagatcatcattattaaatactcgatcaaatgcctcggtaaacatgcggacggactttgcagaccccggtgaaccaggatcgtcgttgtaagagttcaatatgcttgatctctgctgaggagtgacggcatcgctttgcgtggctatatgacggatgagtgtagctttgttacagccctcaatacccagtcgaggcaaccaaatatcgatatattctaggagtgtcgtggcccgttccttttgaatcgtcttttgcaccttctcgtgtcgacttaaagtagcgaaacctgaagtcttgtccattgcttccagattctcaagccagcgtcggtagataccttcttcgttatctgccaagtctcgaagatgtggaacatacgtgagcattgtgtttggagataaaatgttctttctgatctccacgtgatggtaagtatatcgaggtgttgcctccttgttggtcttgatgcatatgaccttgaaaagttctctcttctcctgcttgcctgaccgtccctggccaacttgctgtgtggggtgtcagaaacagcgactgtaatttcgcaaggggagtctctggcaaaccttagtcttgatacgcatagcatcacctgtatcgcctcccggctccacaggagttcttttcatgccagcaaaccaatccttttggctgatatgctggggtttgggtacatctttcttccaagcatcgtggataagacgggcagtcaaattggcgtgattagtgccaatttcatgagagaattgtcgaagttgattctcgactttttcaacagtccaatccactttctttggggtttgagtttttggagttctctggatttgaacggtcaacgtggcggtaggaacagaagcggaaggtgtatcagtaatatcctgagtcttctttaccggaccagagggcctcattggtagtggattggctttgacatcctggctggtcattttcgaggacgccgctctggtagttgtgtttgttgtcgtaggcattggagcagtttcgcgatacgagatggagtccagagtacccgagtttgggggctggcgattgataaccggggggctgattggcttgcgactccgacctggaaatgtgaagttgtctagaaaactagtctttgatttgtacaaaatctccccatgcgcctcctccgaggtatccttcttgggtcttgtcatgattgaatgtcatctcttgcagcgagaggggtatctgatggcaacaaaaggcacacactcgtcgaacttgcaattgcttggcagctatgcttatttcgtcctgcggtttgaagattatgcagtcatgagcttccctagtatacagaaacgaaggaaaggatgaagtgaggatgaaaaatgatgaggccaggttccgactgatgaaaagagaattgaacgccgtggatgattatctgatggtgaatgatgaaaactgagtcagtattgcggatgcaaatgcaggcgcaggcgcaggcgcgtctccatgaacaaggagttgttctgg

SEQ ID NO: 137 - DNA, 1287 bp, Muscodor strobelii
  misc_feature: SGI cDNA ID NO. 559605
  misc_feature: Encodes the peptide sequence at SEQ ID NO 138
atgcatcaacaataccagcatcaatatgatgacaccacgctcacccttacgtctgttggagcgccagatccatatgtcaagctgattaggaatcgattctttatgacatttactgcgtccgaccgaattgagatatggtcatccccgagtcttcttgacattgagaaatctgggactaaacatgttatatggaagccacctccggggacagaccactctgcagatctatgggcgcccgaactgcacgctcttaggggacgctggtacatctactatgccgccgccaacccccgagatggcaacaaaagtcatcgtatgtacgtgctaggtggaccgcctgcgacagaaaatccctcaatgggccaatgggaatttctgggtcgcatccacgacatgcccgatcaatgggcaatagacggaacaattctcgacattgacgatcgcctctacctcgtatactcgggttggccgctcgaaagcactgtacaacaccagctagaccaatctcactctatcgaagactatatcagacagtatcagatcaccaatagagccagtaacaagagatacaggaagaccaaagaaagaacggagctatggaggaaatcgcaaaagtgccagctgaatgatgatcttcgcagtgccaatgggtcggacctcgttcagcaattgttcatcatgcgacttgatgacccgacgacagcgggaagtcgccctgttgcaatttgtctccccgaccaaccgtgggagataacgcatgattggaatggggatcacgctatcaacgaaggaccgcaatggctttctgcgccagatggacgatggcagggattagtgtacagctgtgctgcatcttggacaaacgaatacaagatggcgacattgaaatacgacggtggagacccacttgatccgacatcatggcataaaggagacagacctcttctccagacgaagacaaaaggacgtccgccttggtacggacctggacacgggagtttcttgaatgttggaaatagcaacatgatctcggtatatcacgctactgatggtccggctgatggatgggagaatagacgtgctagagttcaacgagttggatttacggagcatggaccatatatggggaaatcgtttggttttgggaagaaaaagagttggatagggaaggtgaaagataaaatcaggggcaagaatgaagacgaaattggatgcgacggccggcaagggtttagagagatgcttggaggtcaggttgcgagagacaggaggccagatgagatgtaa

SEQ ID NO: 138 - protein, 428 aa, Muscodor strobelii
  misc_feature: SGI Peptide ID NO. 559605
  misc_feature (12)..(373): Pfam Id: PF04616 Pfam Desc: Glycosyl hydrolases family 43
  misc_feature (76)..(109): Pfam Id: PF04616 Pfam Desc: Glycosyl hydrolases family 43
  misc_feature (301)..(356): Pfam Id: PF04616 Pfam Desc: Glycosyl hydrolases family 43
  misc_feature (1)..(377): NCBI GI: 169595450 Blast Desc: SNOG_00464 [Phaeosphaeria nodorum SN15] gi|160701098|gb|EAT91959.2| SNOG_00464 [Phaeosphaeria nodorum SN15]
  misc_feature (4)..(397): NCBI GI: 189208622 Blast Desc: alpha-L-arabinofuranosidase II [Pyrenophora tritici-repentis Pt-1C-BFP] gi|187976737|gb|EDU43363.1| alpha-L-arabinofuranosidase II [Pyrenophora tritici-repentis
  misc_feature (16)..(387): NCBI GI: 145614176 Blast Desc: MGG_08929 [Magnaporthe grisea 70-15] gi|145021126|gb|EDK05255.1| MGG_08929 [Magnaporthe grisea 70-15]
  misc_feature (16)..(373): NCBI GI: 164655021 Blast Desc: MGL_4203 [Malassezia globosa CBS 7966] gi|159102524|gb|EDP41428.1| MGL_4203 [Malassezia globosa CBS 7966]
  misc_feature (23)..(376): NCBI GI: 86141759 Blast Desc: lipoprotein [Leeuwenhoekiella blandensis MED217] gi|85831322|gb|EAQ49778.1| lipoprotein [Leeuwenhoekiella blandensis MED217]
  misc_feature (20)..(372): NCBI GI: 256419400 Blast Desc: Alpha-N-arabinofuranosidase [Chitinophaga pinensis DSM 2588] gi|256034308|gb|ACU57852.1| Alpha-N-arabinofuranosidase [Chitinophaga pinensis DSM 2588]
  misc_feature (3)..(372): NCBI GI: 149280516 Blast Desc: putatuve glycosylhydrolase [Pedobacter sp. BAL39] gi|149228760|gb|EDM34161.1| putatuve glycosylhydrolase [Pedobacter sp. BAL39]
  misc_feature (16)..(382): NCBI GI: 149278848 Blast Desc: hydrolase [Pedobacter sp. BAL39] gi|149230467|gb|EDM35851.1| hydrolase [Pedobacter sp. BAL39]
  misc_feature (23)..(376): NCBI GI: 256425115 Blast Desc: Alpha-N-arabinofuranosidase [Chitinophaga pinensis DSM 2588] gi|256040023|gb|ACU63567.1| Alpha-N-arabinofuranosidase [Chitinophaga pinensis DSM 2588]
  misc_feature (23)..(372): NCBI GI: 253564317 Blast Desc: glycosylhydrolase [Bacteroides sp. 3_2_5] gi|251948093|gb|EES88375.1| glycosylhydrolase [Bacteroides sp. 3_2_5]
MHQQYQHQYDDTTLTLTSVGAPDPYVKLIRNRFFMTFTASDRIEIWSSPSLLDIEKSGTKHVIWKPPPGTDHSADLWAPELHALRGRWYIYYAAANPRDGNKSHRMYVLGGPPATENPSMGQWEFLGRIHDMPDQWAIDGTILDIDDRLYLVYSGWPLESTVQHQLDQSHSIEDYIRQYQITNRASNKRYRKTKERTELWRKSQKCQLNDDLRSANGSDLVQQLFIMRLDDPTTAGSRPVAICLPDQPWEITHDWNGDHAINEGPQWLSAPDGRWQGLVYSCAASWTNEYKMATLKYDGGDPLDPTSWHKGDRPLLQTKTKGRPPWYGPGHGSFLNVGNSNMISVYHATDGPADGWENRRARVQRVGFTEHGPYMGKSFGFGKKKSWIGKVKDKIRGKNEDEIGCDGRQGFREMLGGQVARDRRPDEM

SEQ ID NO: 139 - DNA, 8577 bp, Muscodor strobelii; identical to SEQ ID NO: 136
  misc_feature: SGI EST ID NO. CUFF.436.1
  misc_feature: Variant of the nucleotide sequence at SEQ ID NO 137

SEQ ID NO: 140 - DNA, 2181 bp, Muscodor strobelii
  misc_feature: SGI cDNA ID NO. 559606
  misc_feature: Encodes the peptide sequence at SEQ ID NO 141
atgctgtccagatcgagcttaacgatacggaggctgatgcctcaaagaaggtatagcgaggaggacattgacgggatcggcatcgagctgaagaacgaagagcctctgacaaattccatgagctcgtggtcagagaacaccatcgtcactgcgggtgcaaggaggataagccacaagaagacggcgacggcgccaggaccaattatagccaccaactcgcttacccacaacgatatcttgaggccactaccgccgcttccaacagagacaccacgttcctcagattgttcggattgtagctttggtagcttcgggtcggatgattctcttggtcgtcgtgtgcccaagtctcgatttaactccaagactaacaacgactcatcacgatcttcctcactcgacttggagctaaaagaccgaaagtcacttgagaagtctgataagtcagcagagaagccttcaaaacgcataccatctcaagagtactcggagggagttttgaatttcattcaagagaccgataaagctttcaaagacgacgagcttcttacaacacacattagtctccttcaaagcacaaagccagaagtgccgaatacatcgcccacgttaccttctgcgccaccaactcccccgccaaaggagccctcaacactcccttcaaagagcccgccaagaccgagccaagaacgtccccaagaacatccccaagatcgcacattaccagtaactcacaatatcacccctcctctcaatcccccaaaggaaaacttcatactatcaaaacccccacagaagaaacagaataaatttagatcaatgaaggcacagcggaaacccaccgcaccaaaactggcggtgaaaggtcctccaagatgggccgactccagatggacactaacggacaatgtctcgggtatactcaccgggaaattgtttcacaagatagatgcagatgaaatgctcacgcccgatcaaattgaggcgtttaaacaacggcgactcatggagcgccaagccgaggctcaagcccagcaaacggaagaggctgaagccgtggaagatgattcggcggagaccccgattgagccgttctaccttgaagacgactcgggacgtattggaccagcggcgatcgacactcgctacgccgagacaaccagtgaaggaagaagttctatttcattttctgaagatgtcgtcacaagagacttttcatttgagagacagaatgccacttctccgattccaatcccatctggatcaccatctagccagcggtcaatcctcaagaacaagactttcccaatggtatctccaaatcaatcaagccatcggaggcagttgagcaatgacttgccagcaattcccgaggcagactcgatgtactcgacacctcagccacagccgggcgatgagcttttctttggacagatgtcaaacgactcacaagaagattttggcgattcggaatacatcttcctagaatgttctccgtgcactgtcactgttccaaccttccgacatgggtcgatccgactgtcaaagccggacatcatgccagacccaaatctcggaggcgatgagggtcttgactggacggcgttccagatggccatcctcggcggtgccggcgactggttttcggatagcgatgacacgattcgccgccgagagcaagaagaggttgatgatattgctgagtggtgggacacattccaccaaagcagtggcgacctcatcactcgggatttcgaagcgtcgagtcccacgagcactatctcgggagaggaactcccagacattccctacacacagaccgagaaggataactcttacagcacccatcacggatggcaacagacaccacacggacaaggacttggactcaacatggactatgcgcaggacaaacaagtagcgcattcctactaccccgctcccctgcaagtgaatgagagatggaggcgcgatagcgagcagaaacaggtagtagtcaatcgggacagtctggctagtctgaatagcctaccgcctagcccgatgcttgacctgcgcgttattcgcagcaatcacggcgatgatttggatgtagtcccgatgggattcaacctcggacatgatcttggggactacttgaagtgggaaacggaacatgcatttgcaggcgatttcagttga

SEQ ID NO: 141 - protein, 726 aa, Muscodor strobelii
  misc_feature: SGI Peptide ID NO. 559606
  misc_feature (1)..(720): NCBI GI: 261355321 Blast Desc: conserved [Verticillium albo-atrum VaMs.102]
  misc_feature (254)..(726): NCBI GI: 46105308 Blast Desc: FG00282.1 [Gibberella zeae PH-1]
  misc_feature (1)..(586): NCBI GI: 145615944 Blast Desc: MGG_03675 [Magnaporthe grisea 70-15] gi|145009732|gb|EDJ94388.1| MGG_03675 [Magnaporthe grisea 70-15]
  misc_feature (296)..(581): NCBI GI: 116182558 Blast Desc: CHGG_01907 [Chaetomium globosum CBS 148.51] gi|88186204|gb|EAQ93672.1| CHGG_01907 [Chaetomium globosum CBS 148.51]
  misc_feature (277)..(720): NCBI GI: 154320548 Blast Desc: BC1G_01746 [Botryotinia fuckeliana B05.10] gi|150853435|gb|EDN28627.1| BC1G_01746 [Botryotinia fuckeliana B05.10]
  misc_feature (162)..(582): NCBI GI: 171694928 Blast Desc: protein product [Podospora anserina] gi|170947706|emb|CAP59868.1| protein product [Podospora anserina]
  misc_feature (449)..(720): NCBI GI: 156054884 Blast Desc: SS1G_06290 [Sclerotinia sclerotiorum 1980] gi|154704070|gb|EDO03809.1| SS1G_06290 [Sclerotinia sclerotiorum 1980]
  misc_feature (360)..(573): NCBI GI: 85114831 Blast Desc: NCU00941 [Neurospora crassa OR74A] gi|28926560|gb|EAA35531.1| [Neurospora crassa OR74A]
  misc_feature (491)..(584): NCBI GI: 256735531 Blast Desc: [Nectria haematococca mpVI 77-13-4]
  misc_feature (672)..(725): NCBI GI: 145615944 Blast Desc: MGG_03675 [Magnaporthe grisea 70-15] gi|145009732|gb|EDJ94388.1| MGG_03675 [Magnaporthe grisea 70-15]
MLSRSSLTIRRLMPQRRYSEEDIDGIGIELKNEEPLTNSMSSWSENTIVTAGARRISHKKTATAPGPIIATNSLTHNDILRPLPPLPTETPRSSDCSDCSFGSFGSDDSLGRRVPKSRFNSKTNNDSSRSSSLDLELKDRKSLEKSDKSAEKPSKRIPSQEYSEGVLNFIQETDKAFKDDELLTTHISLLQSTKPEVPNTSPTLPSAPPTPPPKEPSTLPSKSPPRPSQERPQEHPQDRTLPVTHNITPPLNPPKENFILSKPPQKKQNKFRSMKAQRKPTAPKLAVKGPPRWADSRWTLTDNVSGILTGKLFHKIDADEMLTPDQIEAFKQRRLMERQAEAQAQQTEEAEAVEDDSAETPIEPFYLEDDSGRIGPAAIDTRYAETTSEGRSSISFSEDVVTRDFSFERQNATSPIPIPSGSPSSQRSILKNKTFPMVSPNQSSHRRQLSNDLPAIPEADSMYSTPQPQPGDELFFGQMSNDSQEDFGDSEYIFLECSPCTVTVPTFRHGSIRLSKPDIMPDPNLGGDEGLDWTAFQMAILGGAGDWFSDSDDTIRRREQEEVDDIAEWWDTFHQSSGDLITRDFEASSPTSTISGEELPDIPYTQTEKDNSYSTHHGWQQTPHGQGLGLNMDYAQDKQVAHSYYPAPLQVNERWRRDSEQKQVVVNRDSLASLNSLPPSPMLDLRVIRSNHGDDLDVVPMGFNLGHDLGDYLKWETEHAFAGDFS

SEQ ID NO: 142 - DNA, 648 bp, Muscodor strobelii
  misc_feature: SGI cDNA ID NO. 559607
  misc_feature: Encodes the peptide sequence at SEQ ID NO 143
atgaacttctacttgtactttcgggcattttcatgcgccatctctcctttgaaacccgagtcagagctcgatggccgtgactacactggtaccgatgtatgggttgatcccgtgacgggtttcatcgggggcgctgcgggcaaggcggttgagcctgctgcaaagacaatcgctgcaggcgcgaaatatggcagcacggcattgtcacctctcgcaaagattgctcgcgcgagcggcatatccggcgccgtgggtagtgacacagaagccatcgtgcgatcagtactactacgtgagcgaatcgacccggggaacgttgctttggatatatccgaggggttctttagcggcgcaattggcggaccaatcgaggagaagtcccacgagactgcttctcccaagatgaaggcggcggctaggcagttcctgaatcgcgcgaggggacgggcgaaggcttatgatatgaagggatccaatatctacgatgggagcggtgtagagcttgtgagctttaggaatagtcttggagggagtagctcgtgggttgataccgaagtttctgatctggccagtacgggattgcgatctaggtttggtacgctgggcggccatgacatggcatttcctatcatactcggcgagttctga

SEQ ID NO: 143 - protein, 215 aa, Muscodor strobelii
  misc_feature: SGI Peptide ID NO. 559607
MNFYLYFRAFSCAISPLKPESELDGRDYTGTDVWVDPVTGFIGGAAGKAVEPAAKTIAAGAKYGSTALSPLAKIARASGISGAVGSDTEAIVRSVLLRERIDPGNVALDISEGFFSGAIGGPIEEKSHETASPKMKAAARQFLNRARGRAKAYDMKGSNIYDGSGVELVSFRNSLGGSSSWVDTEVSDLASTGLRSRFGTLGGHDMAFPIILGEF

SEQ ID NO: 144 - DNA, 434 bp, Muscodor strobelii
  misc_feature: SGI EST ID NO. CUFF.367.0
  misc_feature: Variant of the nucleotide sequence at SEQ ID NO 142
gaagccatcgtgcgatcagtactactacgtgagcgaatcgacccggggaacgttgctttggatatatccgaggggttctttagcggcgcaattggcggaccaatcgaggagaagtcccacgagactgcttctcccaagatgaaggcggcggctaggcagttcctgaatcgcgcgaggggacgggcgaaggcttatgatatgaagggatccaatatctacgatgggagcggtgtagagcttgtgagctttaggaatagtcttggagggagtagctcgtgggttgataccgaagtttctgatctggccagtacgggattgcgatctaggtttggtacgctgggcggccatgacatggcatttcctatcatactcggcgagttctgaaagtcggtaatttaataacggtaaggcggaactagggaaagtgagcagca

SEQ ID NO: 145 - DNA, 978 bp, Muscodor strobelii
  misc_feature: SGI cDNA ID NO. 559608
  misc_feature: Encodes the peptide sequence at SEQ ID NO 146
atgtcttcggctgtcagctccatcgcgccagaaggacctctgttccgcgcagtggcaagctccacccgccagataaaccaactcctcaagtgtatcagcttcgttcccaaagtcgatgtccatctgacccacgatggcatacgcttcactgccgatcacgcccgaagcatgcagggtgtggcatttctggaccaatcactcttcactactttcaccctaaactgtcccgaccatgcagaggagtcgacgccacgattccagttgaatctctctgcgttactggagaccctccagatctttggtgccacggacgcggctgcaaaagctgctaagaccgaagcagatccatatcgtagcaaccttcgcaattatcggccagatgccttcagccatcagacactcggcatggccggcacctgtacctttgtctacgaagagggatcgcccctcgctgtcattcttgaggagtctggagtcaaaacccagtgtaatatcaccacctacatgcctgatgcgcccgagtacatcccctttgatcggaacgatctagtgttcaagatcatcatgcaagcccggtggctcttggacgccctgtccgagctgtcacctatgtcacctagccgattgaagatctctgctgttccggatgctccttatctgaaactatctggtggcggtgataccggcagtgccagcgtcgacttctccaacggccgagaacttcttgaggtcttgaacgtaacggactcctggatccaaagctacaagtttgatctggtcagatgggccagtgaagcaatgcgcgttggcagcaaagtcagctttcgcggagataggcagggcgttctcagcttgcagttcatggtagagaatgaaggtggaactgtgagcttcttggactttcgtttcattccttacactgcgcaagatgaagacgagtcggactcagagagcgacgacgacgatgattgtgactga

SEQ ID NO: 146 - protein, 325 aa, Muscodor strobelii
  misc_feature: SGI Peptide ID NO. 559608
  misc_feature (141)..(289): Pfam Id: PF02144 Pfam Desc: Repair protein Rad1/Rec1/Rad17
  misc_feature (147)..(289): Pfam Id: PF02144 Pfam Desc: Repair protein Rad1/Rec1/Rad17
  misc_feature (13)..(322): NCBI GI: 261355322 Blast Desc: DNA repair exonuclease rad1 [Verticillium albo-atrum VaMs.102]
  misc_feature (13)..(306): NCBI GI: 46105306 Blast Desc: FG00281.1 [Gibberella zeae PH-1]
  misc_feature (13)..(306): NCBI GI: 256735532 Blast Desc: NECHADRAFT_98993 [Nectria haematococca mpVI 77-13-4]
  misc_feature (12)..(306): NCBI GI: 39943192 Blast Desc: MGG_03676 [Magnaporthe grisea 70-15] gi|145009731|gb|EDJ94387.1| MGG_03676 [Magnaporthe grisea 70-15]
  misc_feature (13)..(323): NCBI GI: 154295609 Blast Desc: BC1G_13075 [Botryotinia fuckeliana B05.10] gi|150843955|gb|EDN19148.1| BC1G_13075 [Botryotinia fuckeliana B05.10]
  misc_feature (59)..(315): NCBI GI: 156053908 Blast Desc: SS1G_05802 [Sclerotinia sclerotiorum 1980] gi|154703582|gb|EDO03321.1| SS1G_05802 [Sclerotinia sclerotiorum 1980]
  misc_feature (13)..(305): NCBI GI: 164428701 Blast Desc: NCU00942 [Neurospora crassa OR74A] gi|157072246|gb|EAA35532.2| conserved [Neurospora crassa OR74A]
  misc_feature (13)..(321): NCBI GI: 169764665 Blast Desc: [Aspergillus oryzae RIB40] gi|83764658|dbj|BAE54802.1| protein product [Aspergillus oryzae]
  misc_feature (13)..(305): NCBI GI: 70993436 Blast Desc: DNA repair protein Rad1 [Aspergillus fumigatus Af293] gi|66849199|gb|EAL89527.1| DNA repair protein Rad1, [Aspergillus fumigatus Af293] gi|159125505|gb|EDP50622.1| DNA repair protein
  misc_feature (13)..(322): NCBI GI: 212541997 Blast Desc: DNA repair protein Rad1, [Penicillium marneffei ATCC 18224] gi|210066060|gb|EEA20153.1| DNA repair protein Rad1, [Penicillium marneffei ATCC 18224]
  misc_feature (8)..(305): SWISSPROT Homolog: EC 3.1.11.2 Exodeoxyribonuclease III
MSSAVSSIAPEGPLFRAVASSTRQINQLLKCISFVPKVDVHLTHDGIRFTADHARSMQGVAFLDQSLFTTFTLNCPDHAEESTPRFQLNLSALLETLQIFGATDAAAKAAKTEADPYRSNLRNYRPDAFSHQTLGMAGTCTFVYEEGSPLAVILEESGVKTQCNITTYMPDAPEYIPFDRNDLVFKIIMQARWLLDALSELSPMSPSRLKISAVPDAPYLKLSGGGDTGSASVDFSNGRELLEVLNVTDSWIQSYKFDLVRWASEAMRVGSKVSFRGDRQGVLSLQFMVENEGGTVSFLDFRFIPYTAQDEDESDSESDDDDDCD

SEQ ID NO: 147 - DNA, 2478 bp, Muscodor strobelii
  misc_feature: SGI EST ID NO. CUFF.526.3
  misc_feature: Variant of the nucleotide sequence at SEQ ID NO 145
ctcttggacactgtccagcaccctccatagagctcccagtaagtaacaacataacaagcaattcaagccccctccattcatttctgttcatcgggcagccagcgtacagtcatcttgcacaattcctccaacctactctacaactttaacaccagccctctgactccaacccccacgaccaagccttcatggatccctctgattcttcgctctttgagctctgggacagaggcactccctttgctcccgctgtcgcaaaggagaaccagttcatcgttgcctttctgctcctggtcctcggtgccggcctgactggcgcatttgctttcaaccgaaccttcgtcaacatcttcctcatcggagtccccgcttcggctgccattgccttcggcaccgtctacatgttctgcgccgtcggcgtctacgtctagctaggacgttcaggaaagaaaaggaagaaaagtgatacccccgcgagcgatagagaaaaaaaaagggcaccggtgaactgaaatcatcagtaccaaccaggaagtgtccccgtatacacctaaaaagagagccaccggcagcccacagtgactggcagcctgagaaagaggtgctccttgtaccgtagatgaattgaggcgtgcattagccctcctccccttacccaccactctgcgtttgattttgcgattgcgattggcaagtgattggctcttgtctgttttgttgttgcggattctcgagtagggtccgttgtgtccgagtactagccgttgtttccgttctctcattttcattcgacatcctccgacccgaaacatgtcttcggctgtcagctccatcgcgccagaaggacctctgttccgcgcagtggcaagctccacccgccagataaaccaactcctcaagtgtatcagcttcgttcccaaagtcgatgtccatctgacccacgatggcatacgcttcactgccgatcacgcccgaagcatgcagggtgtggcatttctggaccaatcactcttcactactttcaccctaaactgtcccgaccatgcagaggagtcgacgccacgattccagttgaatctctctgcgttactggagaccctccagatctttggtgccacggacgcggctgcaaaagctgctaagaccgaagcagatccatatcgtagcaaccttcgcaattatcggccagatgccttcagccatcagacactcggcatggccggcacctgtacctttgtctacgaagagggatcgcccctcgctgtcattcttgaggagtctggagtcaaaacccagtgtaatatcaccacctacatgcctgatgcgcccgagtacatcccctttgatcggaacgatctagtgttcaagatcatcatgcaagcccggtggctcttggacgccctgtccgagctgtcacctatgtcacctagccgattgaagatctctgctgttccggatgctccttatctgaaactatctggtggcggtgataccggcagtgccagcgtcgacttctccaacggccgagaacttcttgaggtcttgaacgtaacggactcctggatccaaagctacaagtttgatctggtcagatgggccagtgaagcaatgcgcgttggcagcaaagtcagctttcgcggagataggcagggcgttctcagcttgcagttcatggtagagaatgaaggtggaactgtgagcttcttggactttcgtttcattccttacactgcgcaagatgaagacgagtcggactcagagagcgacgacgacgatgattgtgactgaagccccggctaccgccgcatcctccgactcccaggctaccttatcggtactcagatccagtgcggcgcctaacacacatttccttactgcgttctacaagtaccgtgcagctacctcccctgtcttggctacaaaaaacggcgggtgtttcaaatgtacaagatggactagaggtggagtacaagacagacagctatcacgattgaccacgctcgtgatgcactttcttaagcgcaaatgaaaataccgtcttcccatgcccatttgtctgtatcgtgagctgaaagcatcactaaatcttttgactgatgttcctcaatcaaacgaccgtctctcatttgttgcccgttctcatgcgcaactaaaaccaatccgagtcatgaggcgctgtcgaattgccatgggatgattttacttaccccagccaaaaaggacttacataagcttttctttcgattttgcatcagagctgaaatctttgcgaatagtctgcgtcgctaaatgtcaagctagtcgcaagctgaactggcaagtctagaccaccacccgaaagtcgagaccatcaggtgtccaccttgacgccgccgtagttcaacaaccaatggccacccacgagcctcgatcgcgtacttgtttatctctcttttggcgcaagcctcttctgtcagatgtacatgatagagttctgcg

SEQ ID NO: 148 - DNA, 321 bp, Muscodor strobelii
  misc_feature: SGI cDNA ID NO. 559609
  misc_feature: Encodes the peptide sequence at SEQ ID NO 149
atgaacattcacgccttcctccatgcgcatagctcccaacaccagccctctgactccaacccccacgaccaagccttcatggatccctctgattcttcgctctttgagctctgggacagaggcactccctttgctcccgctgtcgcaaaggagaaccagttcatcgttgcctttctgctcctggtcctcggtgccggcctgactggcgcatttgctttcaaccgaaccttcgtcaacatcttcctcatcggagtccccgcttcggctgccattgccttcggcaccgtctacatgttctgcgccgtcggcgtctacgtctag

SEQ ID NO: 149 - protein, 106 aa, Muscodor strobelii
  misc_feature: SGI Peptide ID NO. 559609
  misc_feature (31)..(106): NCBI GI: 171695242 Blast Desc: protein product [Podospora anserina] gi|170947863|emb|CAP60027.1| protein product [Podospora anserina]
  misc_feature (31)..(106): NCBI GI: 145615942 Blast Desc: MGG_13482 [Magnaporthe grisea 70-15] gi|145009730|gb|EDJ94386.1| MGG_13482 [Magnaporthe grisea 70-15]
  misc_feature (33)..(106): NCBI GI: 70993436 Blast Desc: DNA repair protein Rad1 [Aspergillus fumigatus Af293] gi|66849199|gb|EAL89527.1| DNA repair protein Rad1, [Aspergillus fumigatus Af293] gi|159125505|gb|EDP50622.1| DNA repair protein
  misc_feature (33)..(105): NCBI GI: 119500034 Blast Desc: DNA repair protein Rad1, [Neosartorya fischeri NRRL 181] gi|119414939|gb|EAW24877.1| DNA repair protein Rad1, [Neosartorya fischeri NRRL 181]
  misc_feature (33)..(106): NCBI GI: 121708400 Blast Desc: DNA repair protein Rad1, [Aspergillus clavatus NRRL 1] gi|119400267|gb|EAW10693.1| DNA repair protein Rad1, [Aspergillus clavatus NRRL 1]
  misc_feature (31)..(106): NCBI GI: 189197161 Blast Desc: conserved [Pyrenophora tritici-repentis Pt-1C-BFP] gi|187980866|gb|EDU47492.1| conserved [Pyrenophora tritici-repentis Pt-1C-BFP]
  misc_feature (31)..(106): NCBI GI: 169616708 Blast Desc: SNOG_11529 [Phaeosphaeria nodorum SN15] gi|160703244|gb|EAT81237.2| SNOG_11529 [Phaeosphaeria nodorum SN15]
  misc_feature (33)..(106): NCBI GI: 242769981 Blast Desc: TSTA_078540 [Talaromyces stipitatus ATCC 10500] gi|218725080|gb|EED24497.1| TSTA_078540 [Talaromyces stipitatus ATCC 10500]
  misc_feature (33)..(106): NCBI GI: 225558967 Blast Desc: [Ajellomyces capsulatus G186AR] gi|240281887|gb|EER45390.1| [Ajellomyces capsulatus H143]
  misc_feature (33)..(106): NCBI GI: 212541999 Blast Desc: PMAA_040150 [Penicillium marneffei ATCC 18224] gi|210066061|gb|EEA20154.1| PMAA_040150 [Penicillium marneffei ATCC 18224]
MNIHAFLHAHSSQHQPSDSNPHDQAFMDPSDSSLFELWDRGTPFAPAVAKENQFIVAFLLLVLGAGLTGAFAFNRTFVNIFLIGVPASAAIAFGTVYMFCAVGVYV

SEQ ID NO: 150 - DNA, 2387 bp, Muscodor strobelii
  misc_feature: SGI EST ID NO. CUFF.526.0
  misc_feature: Variant of the nucleotide sequence at SEQ ID NO 148
ataagttatcgtgctctacctcttggacactgtccagcaccctccatagagctcccaacaccagccctctgactccaacccccacgaccaagccttcatggatccctctgattcttcgctctttgagctctgggacagaggcactccctttgctcccgctgtcgcaaaggagaaccagttcatcgttgcctttctgctcctggtcctcggtgccggcctgactggcgcatttgctttcaaccgaaccttcgtcaacatcttcctcatcggagtccccgcttcggctgccattgccttcggcaccgtctacatgttctgcgccgtcggcgtctacgtctagctaggacgttcaggaaagaaaaggaagaaaagtgatacccccgcgagcgatagagaaaaaaaaagggcaccggtgaactgaaatcatcagtaccaaccaggaagtgtccccgtatacacctaaaaagagagccaccggcagcccacagtgactggcagcctgagaaagaggtgctccttgtaccgtagatgaattgaggcgtgcattagccctcctccccttacccaccactctgcgtttgattttgcgattgcgattggcaagtgattggctcttgtctgttttgttgttgcggattctcgagtagggtccgttgtgtccgagtactagccgttgtttccgttctctcattttcattcgacatcctccgacccgaaacatgtcttcggctgtcagctccatcgcgccagaaggacctctgttccgcgcagtggcaagctccacccgccagataaaccaactcctcaagtgtatcagcttcgttcccaaagtcgatgtccatctgacccacgatggcatacgcttcactgccgatcacgcccgaagcatgcagggtgtggcatttctggaccaatcactcttcactactttcaccctaaactgtcccgaccatgcagaggagtcgacgccacgattccagttgaatctctctgcgttactggagaccctccagatctttggtgccacggacgcggctgcaaaagctgctaagaccgaagcagatccatatcgtagcaaccttcgcaattatcggccagatgccttcagccatcagacactcggcatggccggcacctgtacctttgtctacgaagagggatcgcccctcgctgtcattcttgaggagtctggagtcaaaacccagtgtaatatcaccacctacatgcctgatgcgcccgagtacatcccctttgatcggaacgatctagtgttcaagatcatcatgcaagcccggtggctcttggacgccctgtccgagctgtcacctatgtcacctagccgattgaagatctctgctgttccggatgctccttatctgaaactatctggtggcggtgataccggcagtgccagcgtcgacttctccaacggccgagaacttcttgaggtcttgaacgtaacggactcctggatccaaagctacaagtttgatctggtcagatgggccagtgaagcaatgcgcgttggcagcaaagtcagctttcgcggagataggcagggcgttctcagcttgcagttcatggtagagaatgaaggtggaactgtgagcttcttggactttcgtttcattccttacactgcgcaagatgaagacgagtcggactcagagagcgacgacgacgatgattgtgactgaagccccggctaccgccgcatcctccgactcccaggctaccttatcggtactcagatccagtgcggcgcctaacacacatttccttactgcgttctacaagtaccgtgcagctacctcccctgtcttggctacaaaaaacggcgggtgtttcaaatgtacaagatggactagaggtggagtacaagacagacagctatcacgattgaccacgctcgtgatgcactttcttaagcgcaaatgaaaataccgtcttcccatgcccatttgtctgtatcgtgagctgaaagcatcactaaatcttttgactgatgttcctcaatcaaacgaccgtctctcatttgttgcccgttctcatgcgcaactaaaaccaatccgagtcatgaggcgctgtcgaattgccatgggatgattttacttaccccagccaaaaaggacttacataagcttttctttcgattttgcatcagagctgaaatctttgcgaatagtctgcgtcgctaaatgtcaagctagtcgcaagctgaactggcaagtctagaccaccacccgaaagtcgagaccatcaggtgtccaccttgacgccgccgtagttcaacaaccaatggccacccacgagcctcgatcgcgtacttgtttatctctcttttggcgcaagcctcttctgtcagatgtacatgatagagttctgcg

SEQ ID NO: 151 - DNA, 1605 bp, Muscodor strobelii
  misc_feature: SGI cDNA ID NO. 559610
  misc_feature: Reduced expression when VOC is produced
  misc_feature: Encodes the peptide sequence at SEQ ID NO 152
atggtgggcaaggtagagactaatggcaagcgcaaggccagcgaggagcccgcctctcccgcggcctcgaagcgcgcaaagcacgaggacgactcccccgaccccgacgtcgacgccgatgccgatgccgatgccaaacccgacaagcccgccatgaagcccatccccttccccgagaaggtagacaccctttccttggttgacgaccccggatcatccccctttggcccaagtactgccaaagtaagccctgccagtgcagtgcgacagtctccacgctctcgcccccgccctcgcttgctttcgcccggcgcatccccatccccagtcgtgaaggacacgaggaaaaagagacagagcgcagtgcaggagcagagtgacaggagacagaaacaacatgatgctagtggtgtcatcgctgtacgagattcatcggacagtgccccaaacacaagctcgagcacattttcccactctccccccgaaaaagaagaggcagaggaagaggcaaaagaagaggaagacgcgaagagagagcccacagactggtcccagatctgcaagaactgcagactcagaaactcgcataccctcagcccagacacagctactgacccgctctctcttgtccagcctgctgtcatcgaggaacgaaccggagagatcgaattccgcgtagtcaacaacgacaacgagcgcgagtccctcatcatcctcaccggtctgaagtgcatattccagaaacagctgcctaagatgcccaaggactacattgcacgcctcgtctacgaccgaacccatctgtccatcgccatcgtcaagaagcccctcgaggtcgtcggcggcatcacctaccgccccttcaaaggccgacagtttgccgagattgtcttctgcgccatcagcagcgaccaacaggtcaagggatacggcgcccatctcatgtcgcacctcaaagactacgtcaaggccaccagcgacgtcatgcacttcctcacctacgccgataactacgccataggctatttcaagaagcagggcttcaccaaggagatcacgctgcccaggtccaagtggatgggctacatcaaggattacgaaggtggcaccataatgcagtgctccatgctcccccgcgtgcgatatctcgagatgggccgcatgctgctgaagcagaaggaatgtgtccacgccaagatacgcgccttttccaagtcgcatgaggtccaccaaccgccgaagcagtggaagaacgcccgccaaccccgccacgggcccaactacaatcagctccttcacctgctcaacgacatccagaatcatcagtctgcctggccgttcctgaacccggtcaacaaggacgatgtggcagactactacgaggtcatcaaggagcccatggatctgtctacgatggagaccaagctcgaggcggaccagtacgcgacgcccgaggagttcatcaaggacgcgcgactcatcttcgacaactgtcgcaagtacaacaacgagtctacgccctacgccaagtcggccaacaaactggagaagtacatgtgggcgcagatcaaaaacatccccgaatggtcacacctcgaagcctag

SEQ ID NO: 152 - protein, 534 aa, Muscodor strobelii
  misc_feature: SGI Peptide ID NO. 559610
  misc_feature (271)..(349): Pfam Id: PF00583 Pfam Desc: Acetyltransferase (GNAT) family
  misc_feature (427)..(514): Pfam Id: PF00439 Pfam Desc: Bromodomain
  misc_feature (211)..(533): NCBI GI: 145615940 Blast Desc: conserved [Magnaporthe grisea 70-15] gi|145009729|gb|EDJ94385.1| conserved [Magnaporthe grisea 70-15]
  misc_feature (211)..(533): NCBI GI: 261355324 Blast Desc: histone acetyltransferase GCN5 [Verticillium albo-atrum VaMs.102]
  misc_feature (211)..(534): NCBI GI: 171695240 Blast Desc: protein product [Podospora anserina] gi|170947862|emb|CAP60026.1| protein product [Podospora anserina]
  misc_feature (211)..(533): NCBI GI: 256734822 Blast Desc: histone acetyltransferase [Nectria haematococca mpVI 77-13-4]
  misc_feature (211)..(533): NCBI GI: 46105304 Blast Desc: FG00280.1 [Gibberella zeae PH-1]
  misc_feature (150)..(533): NCBI GI: 164428703 Blast Desc: histone acetyltransferase GCN5 [Neurospora crassa OR74A] gi|157072247|gb|EDO65389.1| histone acetyltransferase GCN5 [Neurospora crassa OR74A]
  misc_feature (213)..(533): NCBI GI: 90193553 Blast Desc: histone acetyltransferase NGF-1 [Neurospora crassa]
  misc_feature (212)..(533): NCBI GI: 116182554 Blast Desc: conserved [Chaetomium globosum CBS 148.51] gi|88186202|gb|EAQ93670.1| conserved [Chaetomium globosum CBS 148.51]
  misc_feature (206)..(532): NCBI GI: 212542003 Blast Desc: histone acetyltransferase (Gcn5), [Penicillium marneffei ATCC 18224] gi|210066063|gb|EEA20156.1| histone acetyltransferase (Gcn5), [Penicillium marneffei ATCC 18224]
  misc_feature (135)..(532): NCBI GI: 242769971 Blast Desc: histone acetyltransferase (Gcn5), [Talaromyces stipitatus ATCC 10500] gi|218725078|gb|EED24495.1| histone acetyltransferase (Gcn5), [Talaromyces stipitatus ATCC 10500]
  misc_feature (211)..(532): SWISSPROT Homolog: EC 2.3.1.48 Histone acetyltransferase
  misc_feature: Useful for introducing or modulating the production of volatile compounds
MVGKVETNGKRKASEEPASPAASKRAKHEDDSPDPDVDADADADAKPDKPAMKPIPFPEKVDTLSLVDDPGSSPFGPSTAKVSPASAVRQSPRSRPRPRLLSPGASPSPVVKDTRKKRQSAVQEQSDRRQKQHDASGVIAVRDSSDSAPNTSSSTFSHSPPEKEEAEEEAKEEEDAKREPTDWSQICKNCRLRNSHTLSPDTATDPLSLVQPAVIEERTGEIEFRVVNNDNERESLIILTGLKCIFQKQLPKMPKDYIARLVYDRTHLSIAIVKKPLEVVGGITYRPFKGRQFAEIVFCAISSDQQVKGYGAHLMSHLKDYVKATSDVMHFLTYADNYAIGYFKKQGFTKEITLPRSKWMGYIKDYEGGTIMQCSMLPRVRYLEMGRMLLKQKECVHAKIRAFSKSHEVHQPPKQWKNARQPRHGPNYNQLLHLLNDIQNHQSAWPFLNPVNKDDVADYYEVIKEPMDLSTMETKLEADQYATPEEFIKDARLIFDNCRKYNNESTPYAKSANKLEKYMWAQIKNIPEWSHLEA

SEQ ID NO: 153 - DNA, 2304 bp, Muscodor strobelii
  misc_feature: SGI EST ID NO. CUFF.567.2
  misc_feature: Variant of the nucleotide sequence at SEQ ID NO 151
cttgcggcgacagggctgatcaccaccggttatcaactctccactctcgcctcatccaaagcccatcatccacctgcgtctccctgcgccgaatagtctggggatacatgaatctctcgctggtgattcaggtacacaagcgacaggctcgtgggctctattctgcaggtgcagacatgcaatgcgcattgttacaactgcatttcatctaatactttgacaccaccaccaccaccctcgccgtccacccgtccacccgtccaccccatcatccccgcaagcgacaacaaaggttgagcatcattcaatatggtgggcaaggtagagactaatggcaagcgcaaggccagcgaggagcccgcctctcccgcggcctcgaagcgcgcaaagcacgaggacgactcccccgaccccgacgtcgacgccgatgccgatgccgatgccaaacccgacaagcccgccatgaagcccatccccttccccgagaagcctgctgtcatcgaggaacgaaccggagagatcgaattccgcgtagtcaacaacgacaacgagcgcgagtccctcatcatcctcaccggtctgaagtgcatattccagaaacagctgcctaagatgcccaaggactacattgcacgcctcgtctacgaccgaacccatctgtccatcgccatcgtcaagaagcccctcgaggtcgtcggcggcatcacctaccgccccttcaaaggccgacagtttgccgagattgtcttctgcgccatcagcagcgaccaacaggtcaagggatacggcgcccatctcatgtcgcacctcaaagactacgtcaaggccaccagcgacgtcatgcacttcctcacctacgccgataactacgccataggctatttcaagaagcagggcttcaccaaggagatcacgctgcccaggtccaagtggatgggctacatcaaggattacgaaggtggcaccataatgcagtgctccatgctcccccgcgtgcgatatctcgagatgggccgcatgctgctgaagcagaaggaatgtgtccacgccaagatacgcgccttttccaagtcgcatgaggtccaccaaccgccgaagcagtggaagaacggtgtatcggccatcgatcctctctctattgaggccattcgcgtttcaggctggtccccccgatatggatgagctagcccgccaaccccgccacgggcccaactacaatcagctccttcacctgctcaacgacatccagaatcatcagtctgcctggccgttcctgaacccggtcaacaaggacgatgtggcagactactacgaggtcatcaaggagcccatggatctgtctacgatggagaccaagctcgaggcggaccagtacgcgacgcccgaggagttcatcaaggacgcgcgactcatcttcgacaactgtcgcaagtacaacaacgagtctacgccctacgccaagtcggccaacaaactggagaagtacatgtgggcgcagatcaaaaacatccccgaatggtcacacctcgaagcctaggagaaacttcggaggaaacagcatcgcttgcaggaaacccggataaggccaactccgcagttttcgatggcaacgaggtcgagatcggggcacgctaccagaagcacaagcatgctcatacctttgggggtgcacaacgatactgcacctgttagtgctacggccacaacaaaccctactgtacaacgaaataattcaacggtcactggaattggcaatgcaaaaaacaacacggcgagtgcgagggcagacatcaccaaacctcgtgtgacggtgagcgaagaaatgcaaccagatggcaacgtgagaatcgtctatacgattgacgactagtcactcacacacagtccaagcaacacaacaccgtggaaaatggaggacctttgagttatgtgagtggcatgagaacatggaagcgatggcgttttcggaaattttgtctcttttcttccactttgtgcatctggaggtggtgaggaagtcttcacttcactttatcatgtatggcgttggggaatgaatgatcggaattgtgtttgattatgtaccaagtcaaggactgaaaacctggatggtcttgttctgtgaggcacggaattacgttggatgccagggaaaaaggggacggcgaaggatatacctatctttgcgcaactagtcgcaagggacccctctggaggcttattcactgctcactacgcttagctttgaggcagtacgaagatagctgaatagcaaaaaggaatgaagtaacccaatattacgag

SEQ ID NO: 154 - DNA, 1062 bp, Muscodor strobelii
  misc_feature: SGI cDNA ID NO. 559611
  misc_feature: Reduced expression when VOC is produced
  misc_feature: Encodes the peptide sequence at SEQ ID NO 155
atgaagggccgccccgtcgatcagctcgtctacgagttcatgttccccaagccccggtccaacgacgtccagaacttccagtcgctcctgcaccggcacctcatcctcgaagtccgccaggaggtgcactctttctacggccacctcgacacccaggaggccaaataccccggcctagactactgccacccgatacatcgcatacgcctcacccgatggccctggcaccgccgcctcttccgtgccttcgacggcctgcgcctgaccaactccgagatctggggactgaccaagtgggaaggaacgaaatgggccaaggaacgcttcgagcgcgactcgggcaccgtcatccgcgacacggcctccgacgagattgcaaactgggtcgagcccgaggaccgagtgtccagcgatactgccacggtcattgcaccagaaccagaagagtccggagacgaggaaatggaaggcgagatcgacgaggaagagggtgaggacgacgaagacgacggattcgagagcgtcgggtttgccctcaacgagcggctccgagaaagggcggcgcgcaacgaggccggggagatatcagagccatacgaggaagaatgggagcagtggctgaagaatgccatagattccggcgaattcccctttctgacagataccaacggcggtgctagtctcatccctcaggccctcttccctccacgcatgctgagcgccgctcgagccggtcggtggagcgagattccggagtttcttcacgatatcatgcgccgcactctatacaacgagagaagttcgagatcgcaaccgcaagcgccagcacaagcgcagccccaggcgccaccatcgccacctgcttctgtaggcagatcgccacgatcagtagaggatattctggacacttaccgacggcatgtgcggcctcttacggattctgcttccggtacgcgacctgtctccagcgcagctatgccaactgggattccggctggggagagactccgcgaacctgccaccgaagtccgcatccgacgcacagctcgaccaggcgcatag

SEQ ID NO: 155 - protein, 353 aa, Muscodor strobelii
  misc_feature: SGI Peptide ID NO. 559611
  misc_feature (1)..(282): NCBI GI: 46105302 Blast Desc: FG00279.1 [Gibberella zeae PH-1]
  misc_feature (1)..(266): NCBI GI: 116182372 Blast Desc: CHGG_01814 [Chaetomium globosum CBS 148.51] gi|88186111|gb|EAQ93579.1| CHGG_01814 [Chaetomium globosum CBS 148.51]
  misc_feature (1)..(288): NCBI GI: 171695308 Blast Desc: protein product [Podospora anserina] gi|170947896|emb|CAP60060.1| protein product [Podospora anserina]
  misc_feature (1)..(274): NCBI GI: 145615938 Blast Desc: MGG_13481 [Magnaporthe grisea 70-15] gi|145009728|gb|EDJ94384.1| MGG_13481 [Magnaporthe grisea 70-15]
  misc_feature (1)..(216): NCBI GI: 156053904 Blast Desc: SS1G_05800 [Sclerotinia sclerotiorum 1980] gi|154703580|gb|EDO03319.1| SS1G_05800 [Sclerotinia sclerotiorum 1980]
  misc_feature (1)..(259): NCBI GI: 85091467 Blast Desc: NCU09144 [Neurospora crassa OR74A] gi|28920307|gb|EAA29680.1| [Neurospora crassa OR74A]
  misc_feature (1)..(214): NCBI GI: 154295605 Blast Desc: BC1G_13073 [Botryotinia fuckeliana B05.10] gi|150843953|gb|EDN19146.1| BC1G_13073 [Botryotinia fuckeliana B05.10]
  misc_feature (88)..(275): NCBI GI: 261355325 Blast Desc: conserved [Verticillium albo-atrum VaMs.102]
  misc_feature (6)..(216): NCBI GI: 240279884 Blast Desc: conserved [Ajellomyces capsulatus H143]
  misc_feature (1)..(221): NCBI GI: 225680682 Blast Desc: conserved [Paracoccidioides brasiliensis Pb03]
  misc_feature: Useful for introducing or modulating the production of volatile compounds
MKGRPVDQLVYEFMFPKPRSNDVQNFQSLLHRHLILEVRQEVHSFYGHLDTQEAKYPGLDYCHPIHRIRLTRWPWHRRLFRAFDGLRLTNSEIWGLTKWEGTKWAKERFERDSGTVIRDTASDEIANWVEPEDRVSSDTATVIAPEPEESGDEEMEGEIDEEEGEDDEDDGFESVGFALNERLRERAARNEAGEISEPYEEEWEQWLKNAIDSGEFPFLTDTNGGASLIPQALFPPRMLSAARAGRWSEIPEFLHDIMRRTLYNERSSRSQPQAPAQAQPQAPPSPPASVGRSPRSVEDILDTYRRHVRPLTDSASGTRPVSSAAMPTGIPAGERLREPATEVRIRRTARPGA

SEQ ID NO: 156 - DNA, 3327 bp, Muscodor strobelii
  misc_feature: SGI EST ID NO. CUFF.570.0
  misc_feature: Variant of the nucleotide sequence at SEQ ID NO 154
ttcggattgcatacagtacatcaatgaattagtagtatcacattcgagccgcgttctcgctgtgatccgatgttgtagtggtcgtgatcggataatacaatccttccatatgcttctccatcctgccagtgccttagcaaatatctaagtacctaacctttgcccgctccactggcagttgagtgaatttacatgcctggatgcacccgagccacggccagcgtgatcgtctccttccgctttgcttctgcgcctacttctagatgcgccggctccccacatgcgtagcagaagtgcaggtctagcattccgtaggttgcacgtagaatcccattgttgcattgttgcccgccgtccagcgcccgctttccgattgtcaaccaagaagtcccgacggcgtggccgtgcccaacaaacccaagcaccccaagcaccctaagcaccctaagcaccctcaacctgagccccaagcagtgagcacgagctggaagcaacacgagcccacgagcccacgagcccccggatctttcttttcgacaaagcgcaagcacaccgcaacccccttgacccgacttgacctctttctccccctccaaaacgaccaaccacctggcaccaacaaacgcagcaacacaacattgaacaacagcagcaccagtagcaaaaagcaacaaaaactacagcaatttcaagagtatcaccacaccgcaagatacaccaaccaccaccaaacaccacttttcacgcaacatcgctgaggtagacagtaggtataggtagttatctgcatcatacacggctgcacttgcatttgcattctcacatcctgtgcacatttactggtacctttccgactgctttcaggttgtgtgcttgctgggtgttgccgacacgtgcactcgggctccctgcggtatcgctatctcctaggcgccgctgccctttgccgtcttacggtgagcggctctctcacctcccaaccactgtgtgcgcgcatttctctgcgcacacgctcgactcatctgcctgctctcgtcctctgcgaaaagacacaacgggtcggaatcggcactggtgacaccgccaagatgaagggccgccccgtcgatcagctcgtctacgagttcatgttccccaagccccggtccaacgacgtccagaacttccagtcgctcctgcaccggcacctcatcctcgaagtccgccaggaggtgcactctttctacggccacctcgacacccaggaggccaaataccccggcctagactactgccacccgatacatcgcatacgcctcacccgatggccctggcaccgccgcctcttccgtgccttcgacggcctgcgcctgaccaactccgagatctggggactgaccaagtgggaaggaacgaaatgggccaaggaacgcttcgagcgcgactcgggcaccgtcatccgcgacacggcctccgacgagattgcaaactgggtcgagcccgaggaccgagtgtccagcgatactgccacggtcattgcaccagaaccagaagagtccggagacgaggaaatggaaggcgagatcgacgaggaagagggtgaggacgacgaagacgacggattcgagagcgtcgggtttgccctcaacgagcggctccgagaaagggcggcgcgcaacgaggccggggagatatcagagccatacgaggaagaatgggagcagtggctgaagaatgccatagattccggcgaattcccctttctgacagataccaacggcggtgctagtctcatccctcaggccctcttccctccacgcatgctgagcgccgctcgagccggtcggtggagcgagattccggagtttcttcacgatatcatgcgccgcactctatacaacgagagaagttcgagatcgcaaccgcaagcgccagcacaagcgcagccccaggcgccaccatcgccacctgcttctgtaggcagatcgccacgatcagtagaggatattctggacacttaccgacggcatgtgcggcctcttacggattctgcttccggtacgcgacctgtctccagcgcagctatgccaactgggattccggctggggagagactccgcgaacctgccaccgaagtccgcatccgacgcacagctcgaccaggcgcatagggcttgtctggtgcttagtccggaccacgaacaagacggacagcacgacggatagcaagacgggtgcggattggagaatgggatccgaatgaaactatactcgatgtcggtgcagccctgggtaatcttggcctgacctgattatccatcactattattccgcaaacgacttaaacggaaccattgaagctattgagcacctctagaatgattcgcgtactatactcgcacttataacccgctacactgcgctacgttgcactatacctgaccagtatcggcactcagtaacaatagactgcactgcggactcgaggaagttcattttcatagtaatgctttcgaacatacagaggctctcaatatgcacaacacggctacacgagggtcgtcatcagacagccccaactatgaccatatttttttccccgatcaggaccaaacggcgttcggcatgaggctcaattccccaggtttgacttttcaacgattcatggagtgggcttcacgaactggacttcacgaacgaacataaagagctccattatcatacgatgcgctgcgttccacctctattctcttcatatatgctgtgttgcaaccactctgcgcgaatctcccagtatcaggatccccagagtcgggacccaacagcttataccattgcacatcatgaactcacgacttattttccttcctgcttgttcttgcccggtgcaggagccagccagctaggtaccaaccaacgcaaccctcggaatgatacggtagattgtcaagagcgaaagaggaggaaactgaaaatgccgaggcatctttctgattttcatagatagagagaacacatactacctagtatggtacagaaagcacagtacagggcagaagagaagagaagagaagagatcagatcagaagacgggggaacatatgaaaagcgaaggggaagaaaataaaagtagcatgcgtcgaatgcaatgatgagcgtaatgccttatgcatagatgaatcaattgacttgatccagttcccaatcttctctggaccttccgctgcatggtaattttatgtgttgtgcttgttgaggctttacctattatcggacttggatcatgttttttgcgaaccgaccatcaaggttactagcacatgtacgggctgacaaaatctacacaca

SEQ ID NO: 157 - DNA, 903 bp, Muscodor strobelii
  misc_feature: SGI cDNA ID NO. 559612
  misc_feature: Encodes the peptide sequence at SEQ ID NO 158
atgagcatccaatcgcgtgtgaaagagcgtgtggtggagcacatacgagaaaaacatggcaagcttaataaagccgaacagcgtccctttcgcccatcacagaagagcgagccaattttagtcgatcggccaatagaccgttccgtcgttgaccctctcgatcctgttcacccctcgattccttatcgactcgcgtggtatcatctgaactgggtgcggaacaacatgaagctgtatcaaagtgaaatgggcaagatcaatgagctcagttgtgcccgatacggcgaaaagcgccccgatctcttcattgtgtctgagctcttctaccacaagcacacatttctattgcgccagtgtattactgtgtcgctccaagaatccaaatccgatgccgtggaatcgaagagtacaccgatatcacggccgtcggataaatggctattccggctttgcccacataaggtcttacagcttacccgctgttgtttggtgactcgtcgaggagtcctcggtgctacattatcttattccgtacgaagcaacaacggcggcgaggtcaagaagtactgggacagcgtgtacgggaagcatagttggaatcacatgtgcttcttttgtcacatggacacgcaagccgacattgaacttgcagatggacgccgtgtgcaagtcaagttggccatatgccagaatctggggagtggcgcaaccccgttcgagtcgaactggctcgcagctcttcggggctggaacacgaacaagaagacattgatgaagcttactgacgaggagatcaaacagcaaaataccaaatacctgatgtgggatgccatagaggtgaagaagaaaatgggcttgtgtagaaactggcaagaagaggctaagggccctcgaatcgattaa

SEQ ID NO: 158 - protein, 300 aa, Muscodor strobelii
  misc_feature: SGI Peptide ID NO. 559612
MSIQSRVKERVVEHIREKHGKLNKAEQRPFRPSQKSEPILVDRPIDRSVVDPLDPVHPSIPYRLAWYHLNWVRNNMKLYQSEMGKINELSCARYGEKRPDLFIVSELFYHKHTFLLRQCITVSLQESKSDAVESKSTPISRPSDKWLFRLCPHKVLQLTRCCLVTRRGVLGATLSYSVRSNNGGEVKKYWDSVYGKHSWNHMCFFCHMDTQADIELADGRRVQVKLAICQNLGSGATPFESNWLAALRGWNTNKKTLMKLTDEEIKQQNTKYLMWDAIEVKKKMGLCRNWQEEAKGPRID

SEQ ID NO: 159 - DNA, 855 bp, Muscodor strobelii
  misc_feature: SGI cDNA ID NO. 559613
  misc_feature: Encodes the peptide sequence at SEQ ID NO 160
atgacgaacacttggttcatcacaggcgcaagcaacggcttcggtcttgccatcgcgaacgaagctctcgcacggggggacaacgtgattgcttcctctcgcaagggcacctctctcaccactcttggcgaaaagggagcgcttctccttgacctcgacgtgacgagcgacgacaaagtcctcagcgcggcaatccaggctggaatcgacaagtttggcgaaatcacgcacttcatcaatgcaccgggtttcctccttgagggtcctgcagagggtacgagtgcggcggatgcgcaggatagtttcaacgtcaatgtcttggccatcatgaacctcacgaggctccaaattgggtatctgcggccaagaaggaccggtgttattgcaaactttgggagcatcggtagttggtacggaggagccgcttggagtcattatgccgctgcgaagtgggcagtatctggattcacagaggcagtgaatgatgagatgaaagactttggaatcaaagtcactgttatcgagcccggctacttccgcactggattcctgaacgccggcggcggcaaccgaaagacggcctcaaacgtacttgaggccgaatatcggggtacggctgtggaggcgtatcggcaaatgttcaatgttgcagataacaatcaacccggcgatgtcacgaaaggagccaaagtcattgtcgatgttttgacgggcacaggggtcggcgctggcaaggaatttcccatccgtatcatgcttgggacggattctattgactacatccggggaaagatggaacgtacggagaagttgattcaagagtggaaggacgtcatcgtctctacggactattaa

SEQ ID NO: 160 - protein, 284 aa, Muscodor strobelii
  misc_feature: SGI Peptide ID NO. 559613
  misc_feature (3)..(165): Pfam Id: PF00106 Pfam Desc: short chain dehydrogenase
  misc_feature (3)..(182): Pfam Id: PF08659 Pfam Desc: KR domain
  misc_feature (5)..(283): NCBI GI: 256734842 Blast Desc: NECHADRAFT_75517 [Nectria haematococca mpVI 77-13-4]
  misc_feature (2)..(284): NCBI GI: 261355288 Blast Desc: estradiol 17-beta-dehydrogenase [Verticillium albo-atrum VaMs.102]
  misc_feature (5)..(278): NCBI GI: 171695164 Blast Desc: protein product [Podospora anserina] gi|170947824|emb|CAP59987.1| protein product [Podospora anserina]
  misc_feature (5)..(284): NCBI GI: 46120490 Blast Desc: FG04892.1 [Gibberella zeae PH-1]
  misc_feature (1)..(284): NCBI GI: 261361261 Blast Desc: serine 3-dehydrogenase [Verticillium albo-atrum VaMs.102]
  misc_feature (1)..(283): NCBI GI: 189207298 Blast Desc: 3-oxoacyl-(acyl-carrier-protein) reductase [Pyrenophora tritici-repentis Pt-1C-BFP] gi|187976076|gb|EDU42702.1| 3-oxoacyl-(acyl-carrier-protein)
  misc_feature (5)..(284): NCBI GI: 240109601 Blast Desc: oxidoreductase,short chain dehydrogenase, [Coccidioides posadasii C735 delta SOWgp]
  misc_feature (2)..(284): NCBI GI: 256722645 Blast Desc: NECHADRAFT_49795 [Nectria haematococca mpVI 77-13-4]
  misc_feature (5)..(264): NCBI GI: 116182532 Blast Desc: CHGG_01894 [Chaetomium globosum CBS 148.51] gi|88186191|gb|EAQ93659.1| CHGG_01894 [Chaetomium globosum CBS 148.51]
  misc_feature (2)..(284): NCBI GI: 242808634 Blast Desc: short-chain dehydrogenase, [Talaromyces stipitatus ATCC 10500] gi|218715832|gb|EED15254.1| short-chain dehydrogenase, [Talaromyces stipitatus ATCC 10500]
  misc_feature (1)..(225): SWISSPROT Homolog: EC 1.1.1.276 Serine 3-dehydrogenase
MTNTWFITGASNGFGLAIANEALARGDNVIASSRKGTSLTTLGEKGALLLDLDVTSDDKVLSAAIQAGIDKFGEITHFINAPGFLLEGPAEGTSAADAQDSFNVNVLAIMNLTRLQIGYLRPRRTGVIANFGSIGSWYGGAAWSHYAAAKWAVSGFTEAVNDEMKDFGIKVTVIEPGYFRTGFLNAGGGNRKTASNVLEAEYRGTAVEAYRQMFNVADNNQPGDVTKGAKVIVDVLTGTGVGAGKEFPIRIMLGTDSIDYIRGKMERTEKLIQEWKDVIVSTDY

SEQ ID NO: 161 - DNA, 941 bp, Muscodor strobelii
  misc_feature: SGI EST ID NO. CUFF.398.0
  misc_feature: Variant of the nucleotide sequence at SEQ ID NO 159
cgaacacttggttcatcacaggcgcaagcaacggcttcggtcttgccatcgcgaacgaagctctcgcacggggggacaacgtgattgcttcctctcgcaagggcacctctctcaccactcttggcgaaaagggagcgcttctccttgacctcgacgtgacgagcgacgacaaagtcctcagcgcggcaatccaggctggaatcgacaagtttggcgaaatcacgcacttcatcaatgcaccgggtttcctccttgagggtcctgcagagggtacgagtgcggcggatgcgcaggatagtttcaacgtcaatgtcttggccatcatgaacctcacgaggctccaaattgggtatctgcggccaagaaggaccggtgttattgcaaactttgggagcatcggtagttggtacggaggagccgcttggagtcattatgccgctgcgaagtgggcagtatctggattcacagaggcagtgaatgatgagatgaaagactttggaatcaaagtcactgttatcgagcccggctacttccgcactggattcctgaacgccggcggcggcaaccgaaagacggcctcaaacgtacttgaggccgaatatcggggtacggctgtggaggcgtatcggcaaatgttcaatgttgcagataacaatcaacccggcgatgtcacgaaaggagccaaagtcattgtcgatgttttgacgggcacaggggtcggcgctggcaaggaatttcccatccgtatcatgcttgggacggattctattgactacatccggggaaagatggaacgtacggagaagttgattcaagagtggaaggacgtcatcgtctctacggactattaagatatgaagaaggcttgaacctgccaatgtagtgctagttagtagcctatttgtttggattcatcactatcctaatccagtttactcgtg

SEQ ID NO: 162 - DNA, 1608 bp, Muscodor strobelii
  misc_feature: SGI cDNA ID NO. 559614
  misc_feature: Encodes the peptide sequence at SEQ ID NO 163
atgaagcctaacgtttcgcagctcatggcggccgagcagtcaatagaacaatcgcactcaacatggaatagcctacctgaggaaatcaagctcatcatcttcgaaatcctgtgtcaagatggttgtaggctgagttccctggccacggtgtctcgagagtggcaagcacatattgcgcgacacaacttcgcccgtaccactttaacgccctcgcgtcttgctgattttggctctatgattcatcggaaccgacatctcgttcggtatatctggttttgtttagaacttgatgaatatgactgcaccatatgcgcaccacctaatcgccgatcttttgaagacgaggacgactggataaaagcatatgctattgaggatacaaacacttgtcctatccccacggcatttgaaagcctattttcggtcctgagcacatgggataccaacaacgatctgatactggatatcagcatatactcgccaagtgactcgaaacattggttcaaatatgtgactatcaagcctgatactgcgtcggggctagtcgagcctggcgatacagagcagccgatatcaagaccggtttatgatgatagccatcatggatgggttgctggtttccggcaggctcggccgccgagttcagctttgtgcaaaatatttcatacaattatggatgaaggaccatttgacgattatcagtcagagtttcgatggtggtcccaacttccttcagtcccagcagtgactagtttacttctccgtctgcagaatcgcagacgatggaggcccaagtcgctcgcacatatgcttagccggtttcctagacttaaggaaattcactacgagccttggagggagtggagttgttggcaacctagtaccgatcgcgaatccgaatttctcttcgactcaatcaagcgcctgaacaaagagctcaatagactagtggtatttgagaacttcaatcagcaatatgcggctagcatacaacgattccagttcggagtagaccttacagaatgcgagactacgcgtagtccaaatgcgacagtttcccgagcttttgcacttgcaagcctcgatcttgagcatatcgcagcatctttcattgttgatgccagtcaattcttcgatatcgaaccagcttgggcttggtcgcgactcaaatcactggtgattacttcaagacaactcacgcctgaaggaaaccaagatgatatcaatataatgctacgtttggcggccacagcagctctcaagatgccacggctagagacgatggaaatatggaacgggcgaaagcacttagcggggctttttaggtatcaaacattacacgacacacgacaagctagaattacttggaggggcacgtggcaattcgatatggaaccgcctacagttcaggcttgggaagccgtcgtacgccagcatgacgagtgggatcttactcaagtcaaggaacacttagccgaagatgcaatcgagtctcacgccgatgcaattcactacctgatgctctcaggcgatgtcattcgacccatttcgctgcaacagattcaggacgagcagaaagctttagaaggagtagcaatcgttcgatga

SEQ ID NO: 163 - protein, 535 aa, Muscodor strobelii
  misc_feature: SGI Peptide ID NO. 559614
  misc_feature (20)..(69): Pfam Id: PF00646 Pfam Desc: F-box domain
  misc_feature (15)..(526): NCBI GI: 46114758 Blast Desc: FG03221.1 [Gibberella zeae PH-1]
  misc_feature (115)..(530): NCBI GI: 261355290 Blast Desc: conserved [Verticillium albo-atrum VaMs.102]
  misc_feature (135)..(526): NCBI GI: 46134135 Blast Desc: FG09207.1 [Gibberella zeae PH-1]
  misc_feature (21)..(267): NCBI GI: 154297056 Blast Desc: BC1G_12187 [Botryotinia fuckeliana B05.10] gi|150843016|gb|EDN18209.1| BC1G_12187 [Botryotinia fuckeliana B05.10]
  misc_feature (20)..(528): NCBI GI: 256724033 Blast Desc: NECHADRAFT_86390 [Nectria haematococca mpVI 77-13-4]
  misc_feature (22)..(524): NCBI GI: 169610786 Blast Desc: SNOG_08501 [Phaeosphaeria nodorum SN15] gi|111062549|gb|EAT83669.1| SNOG_08501 [Phaeosphaeria nodorum SN15]
  misc_feature (15)..(535): NCBI GI: 171696214 Blast Desc: protein product [Podospora anserina] gi|170948349|emb|CAP60513.1| protein product [Podospora anserina]
  misc_feature (18)..(456): NCBI GI: 46110501 Blast Desc: FG02132.1 [Gibberella zeae PH-1]
  misc_feature (20)..(524): NCBI GI: 261359117 Blast Desc: conserved [Verticillium albo-atrum VaMs.102]
  misc_feature (22)..(445): NCBI GI: 256731260 Blast Desc: NECHADRAFT_84563 [Nectria haematococca mpVI 77-13-4]
MKPNVSQLMAAEQSIEQSHSTWNSLPEEIKLIIFEILCQDGCRLSSLATVSREWQAHIARHNFARTTLTPSRLADFGSMIHRNRHLVRYIWFCLELDEYDCTICAPPNRRSFEDEDDWIKAYAIEDTNTCPIPTAFESLFSVLSTWDTNNDLILDISIYSPSDSKHWFKYVTIKPDTASGLVEPGDTEQPISRPVYDDSHHGWVAGFRQARPPSSALCKIFHTIMDEGPFDDYQSEFRWWSQLPSVPAVTSLLLRLQNRRRWRPKSLAHMLSRFPRLKEIHYEPWREWSCWQPSTDRESEFLFDSIKRLNKELNRLVVFENFNQQYAASIQRFQFGVDLTECETTRSPNATVSRAFALASLDLEHIAASFIVDASQFFDIEPAWAWSRLKSLVITSRQLTPEGNQDDINIMLRLAATAALKMPRLETMEIWNGRKHLAGLFRYQTLHDTRQARITWRGTWQFDMEPPTVQAWEAVVRQHDEWDLTQVKEHLAEDAIESHADAIHYLMLSGDVIRPISLQQIQDEQKALEGVAIVR

SEQ ID NO: 164 - DNA, 1182 bp, Muscodor strobelii
  misc_feature: SGI cDNA ID NO. 559615
  misc_feature: Encodes the peptide sequence at SEQ ID NO 165
atgggccccttgacaatgacattctcgccatggcggcccatcttcagcctctgcatccccatacttcaactcctggttacgccggtggtggcctacgctgagttgtccaacgcgacgctccggagcatccccagcgccgccgatgccctcgacccgcgtgccggcaagctaatcactccgatcctgattcctcgagtaccgggcacacctggacacgaatcagtgcaacaccatctcgtcgacttcttcgcccgtgagctcccgcaatggcgtctcgaatggcacaactcgacatcgctgactccggccacgggggctaccgagattcccttcgccaacattgtcttcactcgtgatccgccgtggaccaagggcaaaggggacgtcggccggtttgccctggtggcgcactacgactcgatgtacagacctgagggcttcatcggggccacggacagtgcggcgccttgcgccatgctgatgcaagtcgcgcgaaacatcgacgctgcactcactcagaagtgggatgccatagtggagtctggagacttggatatgggtctggaaggtgacgacgcgaaaggcgtccagatcatattcctggacggcgaggaggcttgggtgacgtggtcggacagtgactcgctgtatggtgccagagcgctggcagagaagtgggagatggagacgtatccctcgcattctacacatcagtcggctatcgagtcaatcgagctcttcgtgttgttggatctgctgggaacggcagaccctaacatcccatcgtactttccgtcgacacatcatgaataccagaagctggcggacattgagaagcggatgcgggaactgggtgctttggctacgaagccccagaacccgttcttggcggagagggagaagagaaggaaccagttccgacctgggtacatcggggacgaccacatcccgttcttggttcgtggagtggagattctgcatgttattccaacgccgttccaagagacgtggcacacgatggaggatgatgctgagcaccttgatctggacagcattgacgactggcagaagatttttactgcatttgctgctgaatggctggagctagacgagtttatgaacaagaccagtgttgctcagcatgagaaaagcgagggagttagagacagatctgaattatga

SEQ ID NO: 165 - protein, 393 aa, Muscodor strobelii
  misc_feature: SGI Peptide ID NO. 559615
  misc_feature (130)..(353): Pfam Id: PF04389 Pfam Desc: Peptidase family M28
  misc_feature (27)..(393): NCBI GI: 261355287 Blast Desc: glutaminyl-peptide cyclotransferase [Verticillium albo-atrum VaMs.102]
  misc_feature (31)..(389): NCBI GI: 39943224 Blast Desc: MGG_03692 [Magnaporthe grisea 70-15] gi|145009713|gb|EDJ94369.1| MGG_03692 [Magnaporthe grisea 70-15]
  misc_feature (35)..(373): NCBI GI: 256735556 Blast Desc: [Nectria haematococca mpVI 77-13-4]
  misc_feature (11)..(393): NCBI GI: 159125089 Blast Desc: glutaminyl cyclase, [Aspergillus fumigatus A1163]
  misc_feature (11)..(393): NCBI GI: 70994410 Blast Desc: glutaminyl cyclase [Aspergillus fumigatus Af293] gi|66849632|gb|EAL89960.1| glutaminyl cyclase, [Aspergillus fumigatus Af293]
  misc_feature (14)..(375): NCBI GI: 46135771 Blast Desc: FG09401.1 [Gibberella zeae PH-1]
  misc_feature (14)..(368): NCBI GI: 85089878 Blast Desc: NCU09018 [Neurospora crassa OR74A] gi|28919482|gb|EAA28916.1| NCU09018 [Neurospora crassa OR74A]
  misc_feature (21)..(369): NCBI GI: 116207810 Blast Desc: CHGG_03198 [Chaetomium globosum CBS 148.51] gi|88183795|gb|EAQ91263.1| CHGG_03198 [Chaetomium globosum CBS 148.51]
  misc_feature (29)..(393): NCBI GI: 164427214 Blast Desc: NCU11249 [Neurospora crassa OR74A] gi|157071655|gb|EDO65282.1| conserved [Neurospora crassa OR74A]
  misc_feature (24)..(372): NCBI GI: 261357843 Blast Desc: glutaminyl-peptide cyclotransferase [Verticillium albo-atrum VaMs.102]
  misc_feature (58)..(369): SWISSPROT Homolog: EC 2.3.2.5 Glutaminyl-peptide cyclotransferase
MGPLTMTFSPWRPIFSLCIPILQLLVTPVVAYAELSNATLRSIPSAADALDPRAGKLITPILIPRVPGTPGHESVQHHLVDFFARELPQWRLEWHNSTSLTPATGATEIPFANIVFTRDPPWTKGKGDVGRFALVAHYDSMYRPEGFIGATDSAAPCAMLMQVARNIDAALTQKWDAIVESGDLDMGLEGDDAKGVQIIFLDGEEAWVTWSDSDSLYGARALAEKWEMETYPSHSTHQSAIESIELFVLLDLLGTADPNIPSYFPSTHHEYQKLADIEKRMRELGALATKPQNPFLAEREKRRNQFRPGYIGDDHIPFLVRGVEILHVIPTPFQETWHTMEDDAEHLDLDSIDDWQKIFTAFAAEWLELDEFMNKTSVAQHEKSEGVRDRSEL

SEQ ID NO: 166 - DNA, 1375 bp, Muscodor strobelii
  misc_feature: SGI EST ID NO. CUFF.427.0
  misc_feature: Variant of the nucleotide sequence at SEQ ID NO 164
ccagcttgtcctgtttccaattcgcatcagaaacacgctgggcagcatgtcgaccctcgcggacgggtaaacaggccaacagcatcacatcatgcgcagctgaaagacttcggcaatgggccccttgacaatgacattctcgccatggcggcccatcttcagcctctgcatccccatacttcaactcctggttacgccggtggtggcctacgctgagttgtccaacgcgacgctccggagcatccccagcgccgccgatgccctcgacccgcgtgccggcaagctaatcactccgatcctgattcctcgagtaccgggcacacctggacacgaatcagtgcaacaccatctcgtcgacttcttcgcccgtgagctcccgcaatggcgtctcgaatggcacaactcgacatcgctgactccggccacgggggctaccgagattcccttcgccaacattgtcttcactcgtgatccgccgtggaccaagggcaaaggggacgtcggccggtttgccctggtggcgcactacgactcgatgtacagacctgagggcttcatcggggccacggacagtgcggcgccttgcgccatgctgatgcaagtcgcgcgaaacatcgacgctgcactcactcagaagtgggatgccatagtggagtctggagacttggatatgggtctggaaggtgacgacgcgaaaggcgtccagatcatattcctggacggcgaggaggcttgggtgacgtggtcggacagtgactcgctgtatggtgccagagcgctggcagagaagtgggagatggagacgtatccctcgcattctacacatcagtcggctatcgagtcaatcgagctcttcgtgttgttggatctgctgggaacggcagaccctaacatcccatcgtactttccgtcgacacatcatgaataccagaagctggcggacattgagaagcggatgcgggaactgggtgctttggctacgaagccccagaacccgttcttggcggagagggagaagagaaggaaccagttccgacctgggtacatcggggacgaccacatcccgttcttggttcgtggagtggagattctgcatgttattccaacgccgttccaagagacgtggcacacgatggaggatgatgctgagcaccttgatctggacagcattgacgactggcagaagatttttactgcatttgctgctgaatggctggagctagacgagtttatgaacaagaccagtgttgctcagcatgagaaaagcgagggagttagagacagatctgaattatgatagatacccgagaattacaaatacatattatgatccctccacgatgagatttccagcctcaatctcaagatcccatta

SEQ ID NO: 167 - DNA, 855 bp, Muscodor strobelii
  misc_feature: SGI cDNA ID NO. 559616
  misc_feature: Reduced expression when VOC is produced
  misc_feature: Encodes the peptide sequence at SEQ ID NO 168
atgcgcttcttcaattctcttgcagctgtgctgctagctgcgggcacagctcaggcggcttcgtcgtggagcttcgacgatgccaccgtccaggtcaacgccaagaaggaagctggctctaagcagaagttctccgagacaagccccctcgcccagcccgtcaccctcggcaccgcagacagcatcaagatcttcctgacggccaaggacggcggcaagggcaagcgaccgcaccaggcttttgttgttctccacgataccgtcaccgggctcgatgcgcccttccccatgaccgtcaaggacactgggaaggctgtcgttgagatcaaacatgccgaccttcccctccaacacgcgaccaccacggcacccctccaagcctccgtccagatcggttctttcggcagctcaaccggcctcaacaagcccatcttctccgtcgccctgaagaacgaccccaaccttgcgcccccggtctacgagaagcccctgcgctacggcaagctcgaagagatccaccacgtcttccgcgccgaccccaagaacccgcccaaggtcatatcgctgttcttcgccctcgccgtgttggctacgctgcctgtgcttgctgttgcctggctcgccctcggcgcaaacgtatcccacatctccaaggccctctccaccgagcccctcgcccacggcatcttcttcggctcgctcatcgctctcgagggcgtcttctacatgtactacgtatcatggaccctattccaggtcctccccgtcgccgggctcgtcggtgtcgtcactttcttgtccggagttaaggccctcggtgaagttcagggcagacgcttggccggcgagaggtag

SEQ ID NO: 168 - protein, 284 aa, Muscodor strobelii
  misc_feature: SGI Peptide ID NO. 559616
  misc_feature (165)..(279): Pfam Id: PF05817 Pfam Desc: Ribophorin II (RPN2)
  misc_feature (1)..(284): NCBI GI: 171694964 Blast Desc: protein product [Podospora anserina] gi|170947724|emb|CAP59887.1| protein product [Podospora anserina]
  misc_feature (21)..(284): NCBI GI: 164427212 Blast Desc: NCU11248 [Neurospora crassa OR74A] gi|157071654|gb|EDO65281.1| NCU11248 [Neurospora crassa OR74A]
  misc_feature (1)..(284): NCBI GI: 154323350 Blast Desc: BC1G_00074 [Botryotinia fuckeliana B05.10] gi|150842303|gb|EDN17496.1| BC1G_00074 [Botryotinia fuckeliana B05.10]
  misc_feature (1)..(284): NCBI GI: 156057975 Blast Desc: SS1G_04719 [Sclerotinia sclerotiorum 1980] gi|154702504|gb|EDO02243.1| SS1G_04719 [Sclerotinia sclerotiorum 1980]
  misc_feature (15)..(284): NCBI GI: 256735554 Blast Desc: NECHADRAFT_75514 [Nectria haematococca mpVI 77-13-4]
  misc_feature (10)..(284): NCBI GI: 39943214 Blast Desc: MGG_03687 [Magnaporthe grisea 70-15] gi|145009718|gb|EDJ94374.1| MGG_03687 [Magnaporthe grisea 70-15]
  misc_feature (21)..(284): NCBI GI: 116182544 Blast Desc: CHGG_01900 [Chaetomium globosum CBS 148.51] gi|88186197|gb|EAQ93665.1| CHGG_01900 [Chaetomium globosum CBS 148.51]
  misc_feature (20)..(284): NCBI GI: 238840181 Blast Desc: conserved [Microsporum canis CBS 113480]
  misc_feature (19)..(284): NCBI GI: 240104742 Blast Desc: CPC735_022370 [Coccidioides posadasii C735 delta SOWgp]
  misc_feature (19)..(284): NCBI GI: 119178990 Blast Desc: CIMG_08293 [Coccidioides immitis RS]
  misc_feature (70)..(281): SWISSPROT Homolog: EC 2.4.1.119 Dolichyl-diphosphooligosaccharide--protein glycotransferase
  misc_feature: Useful for introducing or modulating the production of volatile compounds
MRFFNSLAAVLLAAGTAQAASSWSFDDATVQVNAKKEAGSKQKFSETSPLAQPVTLGTADSIKIFLTAKDGGKGKRPHQAFVVLHDTVTGLDAPFPMTVKDTGKAVVEIKHADLPLQHATTTAPLQASVQIGSFGSSTGLNKPIFSVALKNDPNLAPPVYEKPLRYGKLEEIHHVFRADPKNPPKVISLFFALAVLATLPVLAVAWLALGANVSHISKALSTEPLAHGIFFGSLIALEGVFYMYYVSWTLFQVLPVAGLVGVVTFLSGVKALGEVQGRRLAGER

SEQ ID NO: 169 - DNA, 1392 bp, Muscodor strobelii
  misc_feature: SGI EST ID NO. CUFF.430.0
  misc_feature: Variant of the nucleotide sequence at SEQ ID NO 167
caggtgttcaattggaaaggccaccaccaccaaattgccaaattgcccaacccggcgagagagactgaaatctgtcgacgacaacctcttgcgcctccgactgcctccgacgttgaaccagtaccatagatacgacagatccccgaccatgcgcttcttcaattctcttgcagctgtgctgctagctgcgggcacagctcaggcggcttcgtcgtggagcttcgacgatgccaccgtccaggtcaacgccaagaaggaagctggctctaagcagaagttctccgagacaagccccctcgcccagcccgtcaccctcggcaccgcagacagcatcaagatcttcctgacggccaaggacggcggcaagggcaagcgaccgcaccaggcttttgttgttctccacgataccgtcaccgggctcgatgcgcccttccccatgaccgtcaaggacactgggaaggctgtcgttgagatcaaacatgccgaccttcccctccaacacgcgaccaccacggcacccctccaagcctccgtccagatcggttctttcggcagctcaaccggcctcaacaagcccatcttctccgtcgccctgaagaacgaccccaaccttgcgcccccggtctacgagaagcccctgcgctacggcaagctcgaagagatccaccacgtcttccgcgccgaccccaagaacccgcccaaggtcatatcgctgttcttcgccctcgccgtgttggctacgctgcctgtgcttgctgttgcctggctcgccctcggcgcaaacgtatcccacatctccaaggccctctccaccgagcccctcgcccacggcatcttcttcggctcgctcatcgctctcgagggcgtcttctacatgtactacgtatcatggaccctattccaggtcctccccgtcgccgggctcgtcggtgtcgtcactttcttgtccggagttaaggccctcggtgaagttcagggcagacgcttggccggcgagaggtagagaagtttttctggtgttgagtgagagacatttgcccgagaggaatacaggggatgtacggtagcggcatctgaagttattgcaagcgtagatttcctctttgccgcttaagatgataccggatacaagtcatcacagagatggtgtggctcatgaatgaaatatatgagatagaaaaaggaaacctgaaaaggacaggcgaaaagttcaatacaggagagcatgtaccaaaaaggcatggacgagacatagttttcttaccatctctctggctatgattgacattcgtgcagtgcaaacacacctagttctctctatgttagatctaacaagtgctacacgagtaagcagcaaggtaaccgtagaggaaaattatggaaatagacgag

SEQ ID NO: 170 - DNA, 1269 bp, Muscodor strobelii
  misc_feature: SGI cDNA ID NO. 559617
  misc_feature: Reduced expression when VOC is produced
  misc_feature: Encodes the peptide sequence at SEQ ID NO 171
atggcacgaaccgacaagaaggccgtggccgaatgcatatctgacgacgccctcatccacctcaagtcctacaaatactcggccgtcgacaaatcaccagtatccaactatatactacggccatactggaatgcattcgttgagctattaccgttatggctggcaccgaatatggtcacccttctggggttctgcttcatcctcgctaacgtcggcttgctcgtgctattcatgccagacttggtcggaccgggtccatcatggctatacctcagcttcgcattcggcctcttcatgtaccagaccatggataacgtagacggcaagcaggcacggaggacagggacttcgagcggactaggcgagctcttcgaccacggtatcgactccctgaactgcaccctcgcttctctcctcgagacggccgctatggctctgggaacttcgaaatcaggcgtcttcaccgcgttatgtccttgccttcccatgttcttctcaacctgggagacataccacacgcacaccctctacctaggttatttcaacggcccgacagaaggaatcctcatcgcatgttccatcatggcactatctggaatctacggtccccaaatctggacagagcgcatcgtcgacctagtgggagagaagaaccttctcggttacaacgacctcgtaggcgaccatagtgtgcgggacatctggatcctcatcatcgtcggttcgctcgtaatcggtcacatccccttctgcgtcctcaacgtcgtcaaggcccgccgacgcaacaacctacccatcctgcccgtattcttcgaatggatccccatggtcgtctacacgggctcgatcggcgcctggttatactcgccctactccaccctccgcgccgaaaaccacatcgtgctcttctgtctgacgatgagcttcgtgttcggccgcatgatgacgaagatcatcctcgcgcatctcacccggcagcccttcccctactggaccgtcatgctcatccccctcgttggcggcgccattctcgccaacgcgccgcgtctcggtttcacgcccctcacagcggaactagagcactactatctgtgggcatacttcttcttcgcgctcatcgtgtatggtcgctgggcttatctcgttacgacgagtatatgtgacttcttgggcatcaactgtttaacgattccgcacgagaaacaggtcgagaacgagaggaaagccactgagctgaagagggagatgaatgggaagaaggcgcagtga

SEQ ID NO: 171 - protein, 422 aa, Muscodor strobelii
  misc_feature: SGI Peptide ID NO. 559617
  misc_feature (95)..(221): Pfam Id: PF01066 Pfam Desc: CDP-alcohol phosphatidyltransferase
  misc_feature (95)..(136): Pfam Id: PF01066 Pfam Desc: CDP-alcohol phosphatidyltransferase
  misc_feature (1)..(420): NCBI GI: 261355289 Blast Desc: cholinephosphotransferase [Verticillium albo-atrum VaMs.102]
  misc_feature (1)..(422): NCBI GI: 39943220 Blast Desc: MGG_03690 [Magnaporthe grisea 70-15] gi|145009715|gb|EDJ94371.1| MGG_03690 [Magnaporthe grisea 70-15]
  misc_feature (4)..(412): NCBI GI: 164427216 Blast Desc: NCU03223 [Neurospora crassa OR74A] gi|157071656|gb|EAA36087.2| NCU03223 [Neurospora crassa OR74A]
  misc_feature (1)..(421): NCBI GI: 154300421 Blast Desc: BC1G_11034 [Botryotinia fuckeliana B05.10] gi|150856559|gb|EDN31751.1| BC1G_11034 [Botryotinia fuckeliana B05.10]
  misc_feature (1)..(412): NCBI GI: 256735557 Blast Desc: [Nectria haematococca mpVI 77-13-4]
  misc_feature (4)..(420): NCBI GI: 171694960 Blast Desc: protein product [Podospora anserina] gi|170947722|emb|CAP59885.1| protein product [Podospora anserina]
  misc_feature (1)..(401): NCBI GI: 46135773 Blast Desc: FG09402.1 [Gibberella zeae PH-1]
  misc_feature (6)..(363): NCBI GI: 156040315 Blast Desc: SS1G_12174 [Sclerotinia sclerotiorum 1980] gi|154696230|gb|EDN95968.1| SS1G_12174 [Sclerotinia sclerotiorum 1980]
  misc_feature (7)..(421): NCBI GI: 242799454 Blast Desc: sn-1,2-diacylglycerol cholinephosphotransferase [Talaromyces stipitatus ATCC 10500] gi|218716727|gb|EED16148.1| sn-1,2-diacylglycerol cholinephosphotransferase [Talaromyces ATCC
  misc_feature (7)..(420): NCBI GI: 212541208 Blast Desc: sn-1,2-diacylglycerol cholinephosphotransferase [Penicillium marneffei ATCC 18224] gi|210068058|gb|EEA22150.1| sn-1,2-diacylglycerol cholinephosphotransferase [Penicillium ATCC
  misc_feature (13)..(338): SWISSPROT Homolog: EC 2.7.8.1 Ethanolaminephosphotransferase
  misc_feature (13)..(338): SWISSPROT Homolog: EC 2.7.8.2 Diacylglycerol cholinephosphotransferase
  misc_feature: Useful for introducing or modulating the production of volatile compounds
MARTDKKAVAECISDDALIHLKSYKYSAVDKSPVSNYILRPYWNAFVELLPLWLAPNMVTLLGFCFILANVGLLVLFMPDLVGPGPSWLYLSFAFGLFMYQTMDNVDGKQARRTGTSSGLGELFDHGIDSLNCTLASLLETAAMALGTSKSGVFTALCPCLPMFFSTWETYHTHTLYLGYFNGPTEGILIACSIMALSGIYGPQIWTERIVDLVGEKNLLGYNDLVGDHSVRDIWILIIVGSLVIGHIPFCVLNVVKARRRNNLPILPVFFEWIPMVVYTGSIGAWLYSPYSTLRAENHIVLFCLTMSFVFGRMMTKIILAHLTRQPFPYWTVMLIPLVGGAILANAPRLGFTPLTAELEHYYLWAYFFFALIVYGRWAYLVTTSICDFLGINCLTIPHEKQVENERKATELKREMNGKKAQ

SEQ ID NO: 172 - DNA, 2044 bp, Muscodor strobelii
  misc_feature: SGI EST ID NO. CUFF.736.3
  misc_feature: Variant of the nucleotide sequence at SEQ ID NO 170
actattcgcaggttagctcaagatggccaactgatgcgacaagcctctctcatgccgtgtctgcctattctatgacagagactgtgattgcctcttccttcactcatgttagtcgtacaaaaacattccattaccttgcccgaaactgatctacgacaactcgaaattccatccagagactcgtctttctttgtctactagagaaacgcgacaggggtgccccttgcaatgcaatagtcgcaactgccctgatgctcgacgccgatccgagaaccccacgtcttttccatctgaaaatagttggaaggtccgaggcttgaccaaacaacgagacacgtagcctcgaactctcgtctcgttcaccatcgattgcctctcctctttagcaaggcaactattcggaagagtcttcgtgattcatcaagtttaacatctccagcgcagggcatagctctgtcaagctggattggtagcgaacatggcacgaaccgacaagaaggccgtggccgaatgcatatctgacgacgccctcatccacctcaagtcctacaaatactcggccgtcgacaaatcaccagtatccaactatatactacggccatactggaatgcattcgttgagctattaccgttatggctggcaccgaatatggtcacccttctggggttctgcttcatcctcgctaacgtcggcttgctcgtgctattcatgccagacttggtcggaccgggtccatcatggctatacctcagcttcgcattcggcctcttcatgtaccagaccatggataacgtagacggcaagcaggcacggaggacagggacttcgagcggactaggcgagctcttcgaccacggtatcgactccctgaactgcaccctcgcttctctcctcgagacggccgctatggctctgggaacttcgaaatcaggcgtcttcaccgcgttatgtccttgccttcccatgttcttctcaacctgggagacataccacacgcacaccctctacctaggttatttcaacggcccgacagaaggaatcctcatcgcatgttccatcatggcactatctggaatctacggtccccaaatctggacagagcgcatcgtcgacctagtgggagagaagaaccttctcggttacaacgacctcgtaggcgaccatagtgtgcgggacatctggatcctcatcatcgtcggttcgctcgtaatcggtcacatccccttctgcgtcctcaacgtcgtcaaggcccgccgacgcaacaacctacccatcctgcccgtattcttcgaatggatccccatggtcgtctacacgggctcgatcggcgcctggttatactcgccctactccaccctccgcgccgaaaaccacatcgtgctcttctgtctgacgatgagcttcgtgttcggccgcatgatgacgaagatcatcctcgcgcatctcacccggcagcccttcccctactggaccgtcatgctcatccccctcgttggcggcgccattctcgccaacgcgccgcgtctcggtttcacgcccctcacagcggaactagagcactactatctgtgggcatacttcttcttcgcgctcatcgtgtatggtcgctgggcttatctcgttacgacgagtatatgtgacttcttgggcatcaactgtttaacgattccgcacgagaaacaggtcgagaacgagaggaaagccactgagctgaagagggagatgaatgggaagaaggcgcagtgagctggtcttatgcaaggaggaagtagatggaagtcttcccttggtgatagatcccctacgatagatcatttttctcttaaaaaaaaggaaataggtccctgtgatctgtgcaaggcgttgttgggacccttttgtcccttttctgtagtataattgtaatgcaagcagctgaaaggcgagttctaggcaagggctagcgcacttcagaattccatgacaaatgagcatcacgatgaatgaaatgaggtgttgagatagaacataaaataagacagtatagtattgctctgagagatt

SEQ ID NO: 173 - DNA, 615 bp, Muscodor strobelii
  misc_feature: SGI cDNA ID NO. 559618
  misc_feature: Reduced expression when VOC is produced
  misc_feature: Encodes the peptide sequence at SEQ ID NO 174
atgctttcacgaaacatcctcctagccacggccactctcttgctctcctcagtctccgcccaagaacaatacaccatcgaccccgacagcgtttcgttgacactcaggactacgtggtgtaaccaagagaagagcacatgtcctatcatctgccaacagatcccaccaggaggtttactcgagaacgactgcgaacctaaagacttgacatatagctgtatctgccagaatggcctgtcgcccaacctgactgaatactcgcttaccctccccttcttcatatgtcaggaatggggccagcaatgcgtaaagggctgcaacggcgacaacacctgcgcatccgaatgcacacagaaccacccttgcggggccttgagcccatcgaaacccaacaagactgccacctcaactactatgtctgctacgtccggcacggcagcagcaacaacgaatcctaatcaagtctacaacggtctcggaggcgatgacggcgacagcagcagtaactctggctccggtggtaaatcagctgctcctcagactgtgcagtacaacatgtatggcgctatcatgatggcaggattcgttggactggggtcgattttgctgttgtag

SEQ ID NO: 174 - protein, 204 aa, Muscodor strobelii
  misc_feature: SGI Peptide ID NO. 559618
  misc_feature (4)..(156): NCBI GI: 46135775 Blast Desc: FG09403.1 [Gibberella zeae PH-1]
  misc_feature (4)..(204): NCBI GI: 171694962 Blast Desc: protein product [Podospora anserina] gi|170947723|emb|CAP59886.1| protein product [Podospora anserina]
  misc_feature (1)..(204): NCBI GI: 189211887 Blast Desc: conserved [Pyrenophora tritici-repentis Pt-1C-BFP] gi|187979470|gb|EDU46096.1| conserved [Pyrenophora tritici-repentis Pt-1C-BFP]
  misc_feature (23)..(198): NCBI GI: 256735558 Blast Desc: NECHADRAFT_99009 [Nectria haematococca mpVI 77-13-4]
  misc_feature (6)..(204): NCBI GI: 154283653 Blast Desc: [Ajellomyces capsulatus NAm1] gi|150410802|gb|EDN06190.1| [Ajellomyces capsulatus NAm1]
  misc_feature (6)..(204): NCBI GI: 225561942 Blast Desc: conserved [Ajellomyces capsulatus G186AR]
  misc_feature (6)..(204): NCBI GI: 240275556 Blast Desc: conserved [Ajellomyces capsulatus H143]
  misc_feature (7)..(203): NCBI GI: 212541102 Blast Desc: conserved [Penicillium marneffei ATCC 18224] gi|212541104|ref|XP_002150707.1| conserved [Penicillium marneffei ATCC 18224] gi|210068005|gb|EEA22097.1| conserved [Penicillium
  misc_feature (1)..(202): NCBI GI: 156054891 Blast Desc: SS1G_06293 [Sclerotinia sclerotiorum 1980] gi|154704073|gb|EDO03812.1| SS1G_06293 [Sclerotinia sclerotiorum 1980]
  misc_feature (6)..(203): NCBI GI: 261198070 Blast Desc: conserved [Ajellomyces dermatitidis SLH14081] gi|239595400|gb|EEQ77981.1| conserved [Ajellomyces dermatitidis SLH14081]
  misc_feature: Useful for introducing or modulating the production of volatile compounds
MLSRNILLATATLLLSSVSAQEQYTIDPDSVSLTLRTTWCNQEKSTCPIICQQIPPGGLLENDCEPKDLTYSCICQNGLSPNLTEYSLTLPFFICQEWGQQCVKGCNGDNTCASECTQNHPCGALSPSKPNKTATSTTMSATSGTAAATTNPNQVYNGLGGDDGDSSSNSGSGGKSAAPQTVQYNMYGAIMMAGFVGLGSILLL

SEQ ID NO: 175 - DNA, 1392 bp, Muscodor strobelii
  misc_feature: SGI EST ID NO. CUFF.739.0
  misc_feature: Variant of the nucleotide sequence at SEQ ID NO 173
cttggataaacgccatgagtgatagagacactcggacccaaagaataggtataatatgatattgaggtctcctctcaatctcgcgagagactttgctagagagctctctggtctctgtcttcatcatcaggtcttaggccaaaacggtcttccatttctgtgtcagcttcttcgttagacatacactcgcttttgcatatttgttatactcatatacagactttaatttttaatttactcgctttacaacacgcactcgtgcctaatcaccgaatatcatctccctcgctaccgaaaaatataaataatacgataaaacaaaaggtcgatagttgggaatcattcgcatcaccatgctttcacgaaacatcctcctagccacggccactctcttgctctcctcagtctccgcccaagaacaatacaccatcgaccccgacagcgtttcgttgacactcaggactacgtggtgtaaccaagagaagagcacatgtcctatcatctgccaacagatcccaccaggaggtttactcgagaacgactgcgaacctaaagacttgacatatagctgtatctgccagaatggcctgtcgcccaacctgactgaatactcgcttaccctccccttcttcatatgtcaggaatggggccagcaatgcgtaaagggctgcaacggcgacaacacctgcgcatccgaatgcacacagaaccacccttgcggggccttgagcccatcgaaacccaacaagactgccacctcaactactatgtctgctacgtccggcacggcagcagcaacaacgaatcctaatcaagtctacaacggtctcggaggcgatgacggcgacagcagcagtaactctggctccggtggtaaatcagctgctcctcagactgtgcagtacaacatgtatggcgctatcatgatggcaggattcgttggactggggtcgattttgctgttgtagagaagaatagatgagaagttggagaggggggaccgttgctatataagactacctgccttggatacgaggtgggcgatatgcataatttgaactaataccaaaagcatagcgagatcaattgatcagagactattctggaagcaacatcaaaaactattcaattaaaacccgaatgtgaataacaacgaatgatatacgcgctctgcgcagagagaccacctgcagcaaggaaggatgattagagtgcttatggggtttgggttcagcgcggttcattctactgatccaatggctgctgtgcgagtgtcaccaactcctctccacatcgacaaccatgtttctttcccgtagcgatgatctcatctaaagaatgacgaaacatctgcttacacccacatgcgttctctgatcttgaaggttggcc

SEQ ID NO: 176 - DNA, 1242 bp, Muscodor strobelii
  misc_feature: SGI cDNA ID NO. 559619
  misc_feature: Elevated expression when VOC is produced
  misc_feature: Encodes the peptide sequence at SEQ ID NO 177
atggatgagtacgatcttgtgatcacgaatggtgtttgtgtgacagcggccgatgttgcgccgtacgatgttgcgatcaaagacgaaaagatagtcttacttgcgccttcgggttcgctcatcacagcgaagacgaaaaggctgattgatgctgaaggcggatgtgtcatgcctggaggtgtcgactgtcatgtccatcttcaagagccgagtatgtttggcaagggaacttccgccgacagctacgaatcaggaacacgatccgccatcgcaggtggaacaacgacaatcgtagctttcgcaccgcagcagaaaagtctcgattcggtactaacggcccttgagaatacacacaagctagcgaaagataatagctactgcgactatggcttccacgtcttggtagcgaatccttgcgccaaagcactctcagaattcgaacagctctcgtccgagggtgtcacgtctctgaagatctatatgacatacgaagcacttcagctacgcgataatgagattctgtcggtcctactcgcagcacgaaagaatcacatactcaccatgatccatgctgagaatggcgatgttttggcatggctcaccgaacagctcgaaggtgcaaagctctttgctccgaaatatcacggtcactcgcatgcaccgatacttgaatccgaggcgacaaaccgcgctatcgctttgagccagcttgtggctgacactcccatcttattagtgcatgtcagtgagcctacggcggcattacgaattagggccgcacagactgcaggacaacctatattcgcggagacctgcccccagtacctgttcctaactcgagacgatcttgatcagcccgggttcgaaggtgcgaaatgtgtctgcgcgccgccgcctcgcaacatcgaagatcaaaaggcgatatggcgtggtctacgcaatggcacattcgccatgctgaactctgatcattgcccattccgatttgacgatgccgaaactggaaaaaagacgtgtatatcagaagagtatcccgtcggccgattcagacacatcccgaacggaataccaggcattgaaactcgtctaccgttaacattttccacgcgtaagttggagctgacgaagtttgtcgaggtgacatccaccaacgccgcgaagttgtatggtctatatccacggaagggaggattgatacctggactctcagatgccgacctggttgtctggtggtacgtatag

SEQ ID NO: 177 - protein, 413 aa, Muscodor strobelii
  misc_feature: SGI Peptide ID NO. 559619
  misc_feature (55)..(411): Pfam Id: PF01979 Pfam Desc: Amidohydrolase family
  misc_feature (55)..(409): Pfam Id: PF07969 Pfam Desc: Amidohydrolase family
  misc_feature (55)..(104): Pfam Id: PF01979 Pfam Desc: Amidohydrolase family
  misc_feature (4)..(411): NCBI GI: 67522733 Blast Desc: AN1823.2 [Aspergillus nidulans FGSC A4] gi|40745832|gb|EAA64988.1| AN1823.2 [Aspergillus nidulans FGSC A4] gi|259487171|tpe|CBF85631.1| TPA: conserved [Aspergillus FGSC
  misc_feature (4)..(411): NCBI GI: 212541775 Blast Desc: aminohydrolase, [Penicillium marneffei ATCC 18224] gi|210065949|gb|EEA20042.1| aminohydrolase, [Penicillium marneffei ATCC 18224]
  misc_feature (4)..(411): NCBI GI: 242770587 Blast Desc: allantoinase, [Talaromyces stipitatus ATCC 10500] gi|218725207|gb|EED24624.1| allantoinase, [Talaromyces stipitatus ATCC 10500]
  misc_feature (3)..(411): NCBI GI: 189195292 Blast Desc: D-hydantoinase [Pyrenophora tritici-repentis Pt-1C-BFP] gi|187979863|gb|EDU46489.1| D-hydantoinase [Pyrenophora tritici-repentis Pt-1C-BFP]
  misc_feature (5)..(411): NCBI GI: 121717216 Blast Desc: aminohydrolase [Aspergillus clavatus NRRL 1] gi|119404200|gb|EAW14617.1| aminohydrolase [Aspergillus clavatus NRRL 1]
  misc_feature (3)..(411): NCBI GI: 169596757 Blast Desc: SNOG_01148 [Phaeosphaeria nodorum SN15] gi|111069677|gb|EAT90797.1| SNOG_01148 [Phaeosphaeria nodorum SN15]
  misc_feature (5)..(411): NCBI GI: 115398682 Blast Desc: ATEG_05752 [Aspergillus terreus NIH2624] gi|114191813|gb|EAU33513.1| ATEG_05752 [Aspergillus terreus NIH2624]
  misc_feature (4)..(411): NCBI GI: 145240131 Blast Desc: An08g05950 [Aspergillus niger] gi|134077226|emb|CAK45567.1| protein product [Aspergillus niger]
  misc_feature (3)..(411): NCBI GI: 255950404 Blast Desc: Pc22g20690 [Penicillium chrysogenum Wisconsin 54-1255] gi|211592986|emb|CAP99357.1| Pc22g20690 [Penicillium chrysogenum Wisconsin 54-1255]
  misc_feature (3)..(410): NCBI GI: 239817246 Blast Desc: dihydropyrimidinase [Variovorax paradoxus S110] gi|239803823|gb|ACS20890.1| dihydropyrimidinase [Variovorax paradoxus S110]
  misc_feature (1)..(411): SWISSPROT Homolog: EC 3.5.2.2 Dihydropyrimidinase
  misc_feature: Useful for introducing or modulating the production of volatile compounds
MDEYDLVITNGVCVTAADVAPYDVAIKDEKIVLLAPSGSLITAKTKRLIDAEGGCVMPGGVDCHVHLQEPSMFGKGTSADSYESGTRSAIAGGTTTIVAFAPQQKSLDSVLTALENTHKLAKDNSYCDYGFHVLVANPCAKALSEFEQLSSEGVTSLKIYMTYEALQLRDNEILSVLLAARKNHILTMIHAENGDVLAWLTEQLEGAKLFAPKYHGHSHAPILESEATNRAIALSQLVADTPILLVHVSEPTAALRIRAAQTAGQPIFAETCPQYLFLTRDDLDQPGFEGAKCVCAPPPRNIEDQKAIWRGLRNGTFAMLNSDHCPFRFDDAETGKKTCISEEYPVGRFRHIPNGIPGIETRLPLTFSTRKLELTKFVEVTSTNAAKLYGLYPRKGGLIPGLSDADLVVWWYV

SEQ ID NO: 178 - DNA, 1334 bp, Muscodor strobelii
  misc_feature: SGI EST ID NO. CUFF.448.0
  misc_feature: Variant of the nucleotide sequence at SEQ ID NO 176
ccaaaatccttcgcagtgccctaaacattcgcgaggctgcaggcaaaatggatgagtacgatcttgtgatcacgaatggtgtttgtgtgacagcggccgatgttgcgccgtacgatgttgcgatcaaagacgaaaagatagtcttacttgcgccttcgggttcgctcatcacagcgaagacgaaaaggctgattgatgctgaaggcggatgtgtcatgcctggaggtgtcgactgtcatgtccatcttcaagagccgagtatgtttggcaagggaacttccgccgacagctacgaatcaggaacacgatccgccatcgcaggtggaacaacgacaatcgtagctttcgcaccgcagcagaaaagtctcgattcggtactaacggcccttgagaatacacacaagctagcgaaagataatagctactgcgactatggcttccacgtcttggtagcgaatccttgcgccaaagcactctcagaattcgaacagctctcgtccgagggtgtcacgtctctgaagatctatatgacatacgaagcacttcagctacgcgataatgagattctgtcggtcctactcgcagcacgaaagaatcacatactcaccatgatccatgctgagaatggcgatgttttggcatggctcaccgaacagctcgaaggtgcaaagctctttgctccgaaatatcacggtcactcgcatgcaccgatacttgaatccgaggcgacaaaccgcgctatcgctttgagccagcttgtggctgacactcccatcttattagtgcatgtcagtgagcctacggcggcattacgaattagggccgcacagactgcaggacaacctatattcgcggagacctgcccccagtacctgttcctaactcgagacgatcttgatcagcccgggttcgaaggtgcgaaatgtgtctgcgcgccgccgcctcgcaacatcgaagatcaaaaggcgatatggcgtggtctacgcaatggcacattcgccatgctgaactctgatcattgcccattccgatttgacgatgccgaaactggaaaaaagacgtgtatatcagaagagtatcccgtcggccgattcagacacatcccgaacggaataccaggcattgaaactcgtctaccgttaacattttccacgcgtaagttggagctgacgaagtttgtcgaggtgacatccaccaacgccgcgaagttgtatggtctatatccacggaagggaggattgatacctggactctcagatgccgacctggttgtctggtggtacgtatagaaagaccccactaagtgacccagcctgtcaactatcagaaactag

SEQ ID NO: 179 - DNA, 399 bp, Muscodor strobelii
  misc_feature: SGI cDNA ID NO. 559620
  misc_feature: Encodes the peptide sequence at SEQ ID NO 180
atgaagggcctgaagagctcccggcgaacgcttggcctgtacggagtctctgtcttcgccatctgcctcaccatcttcctcgccactgctgattacagctctcgggctcgtattattggtgcgtggaccaccgtcagcgccattagctcttccaaacgaactgctgccattggtcttctcatgttgttcgattctgtccgcggtagttccaacggttccaacgtctatcttgccgagcaggcatctgtctatccgtcgggcttcgggttctcggtcggtgctaccgttctcggcgcaatgatacctactaacagtcgttgctacctgacgcgtagggataataagcgtcatgaccagatggatgaagcccagacacatacgaaatatactccagcgtag

SEQ ID NO: 180 - protein, 132 aa, Muscodor strobelii
  misc_feature: SGI Peptide ID NO. 559620
  misc_feature (13)..(130): NCBI GI: 212544512 Blast Desc: high-affinity nicotinic acid transporter, [Penicillium marneffei ATCC 18224] gi|210065379|gb|EEA19473.1| high-affinity nicotinic acid transporter, [Penicillium marneffei ATCC 18224]
  misc_feature (15)..(131): NCBI GI: 256721740 Blast Desc: NECHADRAFT_88674 [Nectria haematococca mpVI 77-13-4]
  misc_feature (15)..(130): NCBI GI: 261359560 Blast Desc: high-affinity nicotinic acid transporter [Verticillium albo-atrum VaMs.102]
  misc_feature (7)..(130): NCBI GI: 242772822 Blast Desc: pantothenate transporter, [Talaromyces stipitatus ATCC 10500] gi|218721735|gb|EED21153.1| pantothenate transporter, [Talaromyces stipitatus ATCC 10500]
  misc_feature (41)..(130): NCBI GI: 256730402 Blast Desc: NECHADRAFT_82863 [Nectria haematococca mpVI 77-13-4]
  misc_feature (17)..(130): NCBI GI: 39943266 Blast Desc: MGG_03713 [Magnaporthe grisea 70-15] gi|145009690|gb|EDJ94346.1| MGG_03713 [Magnaporthe grisea 70-15]
MKGLKSSRRTLGLYGVSVFAICLTIFLATADYSSRARIIGAWTTVSAISSSKRTAAIGLLMLFDSVRGSSNGSNVYLAEQASVYPSGFGFSVGATVLGAMIPTNSRCYLTRRDNKRHDQMDEAQTHTKYTPA

SEQ ID NO: 181 - DNA, 296 bp, Muscodor strobelii
  misc_feature: SGI EST ID NO. CUFF.456.0
  misc_feature: Variant of the nucleotide sequence at SEQ ID NO 179
gcgagattcgagcgcaatagaaatacgatcgttcaagctacgctgtcgctcatgtggcacaatgaagggcctgaagagctcccggcgaacgcttggcctgtacggagtctctgtcttcgccatctgcctcaccatcttcctcgccactgctgattacagctctcgggctcgtattattggtgcgtggaccaccgtcagcgccattagctcttccaaacgaactgctgccattggtcttctcatgttgttcgattctgtccgcggtagttccaacggttccaacgtctatcttgccg

SEQ ID NO: 182 - DNA, 702 bp, Muscodor strobelii
  misc_feature: SGI cDNA ID NO. 559621
  misc_feature: Encodes the peptide sequence at SEQ ID NO 183
atgctgaaggttggtgtcgctaaagatcaggttgtctctaatcccccgttagaatggcataatgagccattatccaacttcgttggacatcagtttaaaaagacacgaacaatgaatggtttcgtgagacttcaaaggacctttaatgcctggagcatcaaaatgataggcgggttaggtcttgagttcacagacaatatcgccgatcatctgcgtctagtcgacgacgatagaactgttctgatattccatcacgcgtctttcctggaataccagaagaattctttgtttccacgcggatttgttgacgaaacgcttcggactctcgcacttctcttcccacaatcagagtttggtcccttccgaccgcgtagtaaaaagagagattggctccagagattgtgccttgggtccaactactggcccatcgatgagcgacttgcactttgcggtgatctgaaagcggatgaaaggcagattgaacggtttgagttctggggcgagcgccttgccgtcctcaaacaggtgtacgacgatacaagacccagcactcttcagcaatggtggcatgacagacgcaatggggaaagatgggctacattttgggttgcaatattggttctcataattacgacgacacttggtttgattcaagctatcgagagtgcgctgcaagtgtataaggcatacaaccctacttga

SEQ ID NO: 183 - protein, 233 aa, Muscodor strobelii
  misc_feature: SGI Peptide ID NO. 559621
  misc_feature (1)..(233): NCBI GI: 116202897 Blast Desc: CHGG_09333 [Chaetomium globosum CBS 148.51] gi|88177851|gb|EAQ85319.1| CHGG_09333 [Chaetomium globosum CBS 148.51]
  misc_feature (15)..(233): NCBI GI: 256734970 Blast Desc: NECHADRAFT_75762 [Nectria haematococca mpVI 77-13-4]
  misc_feature (1)..(233): NCBI GI: 171682634 Blast Desc: protein product [Podospora anserina] gi|170941276|emb|CAP66926.1| protein product [Podospora anserina]
  misc_feature (17)..(230): NCBI GI: 189199848 Blast Desc: conserved [Pyrenophora tritici-repentis Pt-1C-BFP] gi|187983360|gb|EDU48848.1| conserved [Pyrenophora tritici-repentis Pt-1C-BFP]
  misc_feature (32)..(231): NCBI GI: 156033223 Blast Desc: SS1G_13687 [Sclerotinia sclerotiorum 1980] gi|154699090|gb|EDN98828.1| SS1G_13687 [Sclerotinia sclerotiorum 1980]
  misc_feature (1)..(233): NCBI GI: 169601684 Blast Desc: SNOG_03713 [Phaeosphaeria nodorum SN15] gi|160705991|gb|EAT88918.2| SNOG_03713 [Phaeosphaeria nodorum SN15]
  misc_feature (1)..(232): NCBI GI: 238508650 Blast Desc: conserved [Aspergillus flavus NRRL3357] gi|220688404|gb|EED44757.1| conserved [Aspergillus flavus NRRL3357]
  misc_feature (17)..(230): NCBI GI: 46109538 Blast Desc: FG01651.1 [Gibberella zeae PH-1]
  misc_feature (96)..(233): NCBI GI: 169615955 Blast Desc: SNOG_11144 [Phaeosphaeria nodorum SN15] gi|111060523|gb|EAT81643.1| SNOG_11144 [Phaeosphaeria nodorum SN15]
  misc_feature (16)..(185): NCBI GI: 212536244 Blast Desc: conserved [Penicillium marneffei ATCC 18224] gi|210070677|gb|EEA24767.1| conserved [Penicillium marneffei ATCC 18224]
MLKVGVAKDQVVSNPPLEWHNEPLSNFVGHQFKKTRTMNGFVRLQRTFNAWSIKMIGGLGLEFTDNIADHLRLVDDDRTVLIFHHASFLEYQKNSLFPRGFVDETLRTLALLFPQSEFGPFRPRSKKRDWLQRLCLGSNYWPIDERLALCGDLKADERQIERFEFWGERLAVLKQVYDDTRPSTLQQWWHDRRNGERWATFWVAILVLIITTTLGLIQAIESALQVYKAYNPT

SEQ ID NO: 184 - DNA, 4047 bp, Muscodor strobelii
  misc_feature: SGI EST ID NO. CUFF.517.1
  misc_feature: Variant of the nucleotide sequence at SEQ ID NO 182
ccatccttcgctcgcgattcacaggctctaaaaattcgtgatagtgtgaaaacttatagtcccgcaagcggcttatcatattacctcagcgatcagcactgattcaaaacagaagcagcgtgtgtaagctcaaagctttggccggggagttcataccccttggtacactacgtccctaacttggtacattttcagcacttggtccattacatcgaagcaatctgtattcaaactttgagcgtatctaagccgatgggacatcgtgtctccttcatgagaacccgatacgtctctagaactgaaacagtagacagagcaaaagtactcctagcagacagatttagtcaggctccaaacactagtctttagttcgcttatcccttgtccgatgtctttcttcctcgcgagtactggtgtattggtattgttgactgcgttcttgtcttctttgcaagtcaaaaagtatggcgttatgcgcatagagccatggtcctcccgcgacttcggacgttcgatgcacatagttatatgcattcactgagatcaactcggagtcattgagatggacattgagatgatggtccggtctcatttggtcaattgtcttcccttcattaagaatatggtcgcgaatatgccgcattcgattttcgaaattagtacggcgatccccccgagcatatttatctttgtaatcaaagacgtaatcgtcgcaaaaccaacagattgccttcttaggaagtcgagcctgcagatgggccatcactatatgctcgatccagctatcgacatcgtccaggtcaaaaaatcatcacattcaccataaccgatgaactcgcagggcaggcttctccagacagaaggcgtgccttgatatgtagcggacgttgagccggatggtgccatcaagacgtaagacgaagtaattgaggaattataagatgaaagatggccaggagttgcgacaaccacagagcctgatcttttgatcttaatatcttcaaagatggaagtcgctgctaccatgtagccgatatgtgtatgtggaactcccataacaagatgaccatataaacatccggtttcccgatccaatacaggagatccgcagtcgccttccgaaaggtagtgagtaaaatgaacttgaacttgatacaactcttcaaagcttgcaagctctgagcgccacagtgcgaccgagccaggccagacgaatcctgagaagacaccggaggagctaatgatcacaacttttcgctgttctgtgccaatttcagcgattctttcgacccgccgaggttctgtctgtggaagtctattgatgttggagccaatttccattattgcataatgtgggataggtaagagagcgtagtcaagcgtcgacgagccagatccattattctcatacacagatccaatatcaatcagcttggaatgatttgaataattcgcttgtgtagtgagttgggcggaggctagtgcttccgtggtcggcacaggcatgatggacggttcactgagactcatctgagaaaactcatcggaattgctgcgtaagatcgacggccttgtagaggccacggaagagtcttgttcttgttcttgttcttcttcttcttcttcttcgagggtcagagtcagactgccgcgaccatttgtatcatcctcgtcacgttcatagtcatcgtcatcttcgtatttcccatcaaaattacaaccaaaaaggtccaccgatagcatttcgtgatcagcattggcgagatctgcctcaaataaatgacccgcagtcatctgatagaagtagctgccgactttggtgatgacaccgccagtagccggacgatggacatgttggtcatctttgttcgagatgaagatgagcctaccgatttctggtaccgttgaataagcatatactttgactggtttcttcgttgggtggatcgacgaggatggcgacaagtcagagtggtgtgaagttggtcggcatggctccgtcgtccctccgccaacaagacgacgaacgggggctgaatgttccagtggtagcgctgctgtccctaagcgaaagccctggtgtctaaacagtagcccgctggcgcggataatagtctctgcctcatctctcgctcgcttgtttgtacagcaaagaattataacaggattagtgttttccggtttttgccctatcatatataatctaacgaagagttcggaatgacccatgtcgaccccctggaggagatgcccgatttccggcttaataacattctggaaaatttcgtacgcaggacctttagaccgccacactttctttctgccaattctggatgaaggaatttctcggtccaaggactcttgaggattaggccacgaaggcggtgactttggaaatggcatttgttcaattctaaggggacacgactgccaatgaacagtcttggagtggctatgacgatgtatagagaaaaagatacgttgttctagcaataagagcatgagaaattcgccgatttgtgcccaaatctgcactttcaattattatggttgcatcctcagcctaagcgataggggctgagcagaggagcaaaccccgcaatgcgccgagtgaacgtgcatcaccgagaacattaccgctaggcgtagctgaagaggatttacttctgggttggtatcgtatttatgagacttttcataatcgttcccggcatggagtgttgaacctccgcaatgcttgcctcactgagatggcgtcccttttaagacacacagctgccacccaaaccgcgtcaggtttcccaccaattaaagagatcgccacagctctatggagcccactggacagagactcgcaattatgcaatggtcaaccaactgagcgcctggatgacctcccagcctatgccgggtactttcggcggcaatgcgaattgatggcaggaggcatagatgaaagctggataacagagcgaaaagtgggaaatatctatcatattgcacagaatttatccgagggaaaacttcgagatcaaatattgtctgaaatgaagcaagataatcattcggaaactgacgaagcatgcgaaagcttgatagatcttacgattcgagtgttactaatgctgaaggttggtgtcgctaaagatcaggttgtctctaatcccccgttagaatggcataatgagccattatccaacttcgttggacatcagtttaaaaagacacgaacaatgaatggtttcgtgagacttcaaaggacctttaatgcctggagcatcaaaatgataggcgggttaggtcttgagttcacagacaatatcgccgatcatctgcgtctagtcgacgacgatagaactgttctgatattccatcacgcgtctttcctggaataccagaagaattctttgtttccacgcggatttgttgacgaaacgcttcggactctcgcacttctcttcccacaatcagagtttggtcccttccgaccgcgtagtaaaaagagagattggctccagagattgtgccttgggtccaactactggcccatcgatgagcgacttgcactttgcggtgatctgaaagcggatgaaaggcagattgaacggtttgagttctggggcgagcgccttgccgtcctcaaacaggtgtacgacgatacaagacccagcactcttcagcaatggtggcatgacagacgcaatggggaaagatgggctacattttgggttgcaatattggttctcataattacgacgacacttggtttgattcaagctatcgagagtgcgctgcaagtgtataaggcatacaaccctacttgaattgacgtaatcactagaattggcattcgattagtttaaattacacttctgccaatttccggtccatcaagacccaaattacgaccttccaatgcttatgatccgcaatacgatgtcctacaaggtgcatctgaacagaggcgagctcttacccagctacgctggagtatatttcgtatgtgtctgggcttcatccatctggtcatgacgcttattatcccta

SEQ ID NO: 185 - DNA, 1527 bp, Muscodor strobelii
  misc_feature: SGI cDNA ID NO. 559622
  misc_feature: Elevated expression when VOC is produced
  misc_feature: Encodes the peptide sequence at SEQ ID NO 186
atggctgctggtcccagacaagtatcagggcgatcaacacgacgctcgggcagtttcggcaacgaccaaagtgatcggtcactgtatcgccagctgaaatcaagcgttgtcaaccagacgatatcgaaagataccataaaatccaagctgtcgtggaagtcttcaatcacaagcccatcactgtctcaacacatattcgagagagcgaaaagggtttttgcgatactgagcctttgccaagaagaatcgagcatagaaactgtcttcaaagaggggctcaccgatgatcatcttccactttcgagatcgccaaagagtggatcctataatgtcctagtctcccctcgaggcaccgtgttccattcatttgcgaagttcaagaaagatgtaacggtcgatgactttcttcgggcacagtggcaacttcttgcccctgtattcaagtttccgggcgagcacctcatggttgaacaagagaccccaatgcccttcttcgacattaaaaagatatccaccaccgatatgagtacggtttacactgggaaactccacgcagcccatcatacatcagaagttgatggagacatgcgcattgctatcaaggagttcccaagagaggaagactttgaaaaggaaaggggcaatttggacatgattcgaaatctcactcatccaaacctcatcaaacacatcgctacctgtcaacaaggaaacgtctgttttgttctgttcccatgggcggatggaggcaatctcttcgacctctggaaaagctcctcgaaagcctcgcgattgcgaaacgccgactttttccagtggtcgtttgaacagatgtttggaattgttgatgctatcagggctttacacgaagagaactgtcgccatggcgacttaaaacccgagaacattcttcactttactggctcggaggattcgaggtccagaaacgaccagctaggatacttggtcgtagcggatgtcggtgtatccaagatccatcatcaggtcacagaacttcggcatgaaggtacagatacgaaggccacaacgccgtcatacgaagctccagaagtagagttcaatcgacagacccctagaggacgtcgatatgatatgtggtcaattggctgcatgtatcttgaatttgtcatttggttattgtatggcttcgaggctatcattgcattccgagagttacgacgaccaagtcatgatccgttccctcagaaggctgctttctatcgtcgcacggaagcaggagagccagagattcaccccgccgtcacagaggtctttcatgcactcagaaatgatcctcgatgtgcccaaggaacaggcttggtagatctgatccaaatcattgagcgtgacctacttcggatcgatttgaaggagcgagtagaagcgcaagaattgagaaacaaatttgaacggattttaaccaaggctggaaacgatatagaatacctagtcaaacgggttgagccatctccttatattcctgagacattcactcaaaggcattga

SEQ ID NO: 186 - protein, 508 aa, Muscodor strobelii
  misc_feature: SGI Peptide ID NO. 559622
  misc_feature (175)..(383): Pfam Id: PF00069 Pfam Desc: Protein kinase domain
  misc_feature (80)..(505): NCBI GI: 256730245 Blast Desc: NECHADRAFT_82545 [Nectria haematococca mpVI 77-13-4]
  misc_feature (36)..(495): NCBI GI: 256722402 Blast Desc: NECHADRAFT_82208 [Nectria haematococca mpVI 77-13-4]
  misc_feature (46)..(506): NCBI GI: 256723878 Blast Desc: [Nectria haematococca mpVI 77-13-4]
  misc_feature (278)..(504): NCBI GI: 171694814 Blast Desc: protein product [Podospora anserina] gi|170947649|emb|CAP59811.1| protein product [Podospora anserina]
  misc_feature (45)..(490): NCBI GI: 256723898 Blast Desc: NECHADRAFT_78374 [Nectria haematococca mpVI 77-13-4]
  misc_feature (28)..(486): NCBI GI: 256723790 Blast Desc: NECHADRAFT_78344 [Nectria haematococca mpVI 77-13-4]
  misc_feature (37)..(466): NCBI GI: 256721865 Blast Desc: NECHADRAFT_88069 [Nectria haematococca mpVI 77-13-4]
  misc_feature (48)..(452): NCBI GI: 256722363 Blast Desc: NECHADRAFT_82209 [Nectria haematococca mpVI 77-13-4]
  misc_feature (60)..(463): NCBI GI: 256722820 Blast Desc: NECHADRAFT_87137 [Nectria haematococca mpVI 77-13-4]
  misc_feature (58)..(483): NCBI GI: 256729997 Blast Desc: NECHADRAFT_82546 [Nectria haematococca mpVI 77-13-4]
  misc_feature: Useful for introducing or modulating the production of volatile compounds
MAAGPRQVSGRSTRRSGSFGNDQSDRSLYRQLKSSVVNQTISKDTIKSKLSWKSSITSPSLSQHIFERAKRVFAILSLCQEESSIETVFKEGLTDDHLPLSRSPKSGSYNVLVSPRGTVFHSFAKFKKDVTVDDFLRAQWQLLAPVFKFPGEHLMVEQETPMPFFDIKKISTTDMSTVYTGKLHAAHHTSEVDGDMRIAIKEFPREEDFEKERGNLDMIRNLTHPNLIKHIATCQQGNVCFVLFPWADGGNLFDLWKSSSKASRLRNADFFQWSFEQMFGIVDAIRALHEENCRHGDLKPENILHFTGSEDSRSRNDQLGYLVVADVGVSKIHHQVTELRHEGTDTKATTPSYEAPEVEFNRQTPRGRRYDMWSIGCMYLEFVIWLLYGFEAIIAFRELRRPSHDPFPQKAAFYRRTEAGEPEIHPAVTEVFHALRNDPRCAQGTGLVDLIQIIERDLLRIDLKERVEAQELRNKFERILTKAGNDIEYLVKRVEPSPYIPETFTQRH

SEQ ID NO: 187 - DNA, 1833 bp, Muscodor strobelii
  misc_feature: SGI EST ID NO. CUFF.469.0
  misc_feature: Variant of the nucleotide sequence at SEQ ID NO 185
tgcgaagtcgcgtagtcatgtcatacgcggatgattctatgagtaactaacgaacctcggttttcaaattgttgtctctctctattgttccacctttatcgaaatttgagtgaatttcacaattgttagtatggctgctggtcccagacaagtatcagggcgatcaacacgacgctcgggcagtttcggcaacgaccaaagtgatcggtcactgtatcgccagctgaaatcaaggttggttgagtgtgatacgagcaatgggacccatacattttctaaatctccattcttgcccctcagcgttgtcaaccagacgatatcgaaagataccataaaatccaagctgtcgtggaagtcttcaatcacaagcccatcactgtctcaacacatattcgagagagcgaaaagggtttttgcgatactgagcctttgccaagaagaatcgagcatagaaactgtcttcaaagaggggctcaccgatgatcatcttccactttcgagatcgccaaagagtggatcctataatgtcctagtctcccctcgaggcaccgtgttccattcatttgcgaagttcaagaaagatgtaacggtcgatgactttcttcgggcacagtggcaacttcttgcccctgtattcaagtttccgggcgagcacctcatggttgaacaagagaccccaatgcccttcttcgacattaaaaagatatccaccaccgatatgagtacggtttacactgggaaactccacgcagcccatcatacatcagaagttgatggagacatgcgcattgctatcaaggagttcccaagagaggaagactttgaaaaggaaaggggcaatttggacatgattcgaaatctcactcatccaaacctcatcaaacacatcgctacctgtcaacaaggaaacgtctgttttgttctgttcccatgggcggatggaggcaatctcttcgacctctggaaaagctcctcgaaagcctcgcgattgcgaaacgccgactttttccagtggtcgtttgaacagatgtttggaattgttgatgctatcagggctttacacgaagagaactgtcgccatggcgacttaaaacccgagaacattcttcactttactggctcggaggattcgaggtccagaaacgaccagctaggatacttggtcgtagcggatgtcggtgtatccaagatccatcatcaggtcacagaacttcggcatgaaggtacagatacgaaggccacaacgccgtcatacgaagctccagaagtagagttcaatcgacagacccctagaggacgtcgatatgatatgtggtcaattggctgcatgtatcttgaatttgtcatttggttattgtatggcttcgaggctatcattgcattccgagagttacgacgaccaagtcatgatccgttccctcagaaggctgctttctatcgtcgcacggaagcaggagagccagagattcaccccgccgtcacagaggtctttcatgcactcagaaatgatcctcgatgtgcccaaggaacaggcttggtagatctgatccaaatcattgagcgtgacctacttcggatcgatttgaaggagcgagtagaagcgcaagaattgagaaacaaatttgaacggattttaaccaaggctggaaacgatatagaatacctagtcaaacgggttgagccatctccttatattcctgagacattcactcaaaggcattgatatacgtcaggaggttttcaaaatgtaatagatagattagcgttctcttatatttctcacattcaccttcgatgtacgtagatcaaatattatatacccttcaatgagtt

SEQ ID NO: 188 - DNA, 1890 bp, Muscodor strobelii
  misc_feature: SGI cDNA ID NO. 559623
  misc_feature: Elevated expression when VOC is produced
  misc_feature: Encodes the peptide sequence at SEQ ID NO 189
atggggcacaggcccaagccccgaagtcgcaacagtgcaggccacttcaaagcgtttcaaataagagttgactctgctcttgttacaagtgcctttgaaatcgggaagagattcctgccagaaaggcatatcatatcattggttcaggaggctaacttggaactcatgttgccgggtgcatcagagtctttgctcagcttcatccgctatgaggctccgagactattcttgagtgtggtcatgtcccgtattgtcgataaagagactgatctgctctcggtgttgaaacaatttcaggaagaaggacttactgatgagagcctgccagtcgaagacattacccaaggtgggaggtgtcaagacggaaatattaatcctatcgacgattctcccacaaaatgttctcatcacgaaagcttagcagcattccacatggatccttgggattgtattagctttccagcattctatagggcgcagtggatgttcacagcaccgatgtttcataagcgagatggtacatcttctcaggctgaacttccacacgacacgattttacctttcacttggaaagctcccaaaggtcaatcaggccatttcagtgaagtatatcatgctcttctacatgctgaccatcaaaaagaattcaaagtgaagccccgggacgaagttatcaacgttgctgtcaaaaaactcaagaactccatttcggacgaacctggccatgatgtggaggccgcctggcacggtgaagtgaccactctcaatgaacttagcgggcttccaaatgctcatctgatccgtcgcattgatgcattcaaatggcgatccgatcgctatatcatattcgaatgggctagcggcggtaccctcaggcaattttggaagaagaatcacgtagggttgagcggccaaacaatcattgaattcctgcagcagctgtgcggtattgcaggtgcacttaatagtctacaccaaaccaatactcataccgcaaccggcctagccgaagctaataagcatcggagatcatcgaagtttctcggccctaggaagactaccttcaaagcgaacaaatatccagatattgttcttccagctgacgataacggcgccgcaaatattgctcagcactggcgtcatggagacctgaaacctgacaacatactcgtcttcagtgacgggtcgtggcttgggacattgaagatagcggatcttggcttagcaaagaaacacaattttgctacggagtttcgtcctgatccaacatctacgagccacactaccctgcattatgaagctcccgaagtcgttttgaacacgagaagagaaccaagatctcgtcgttacgacatatggtcgatgggatgtatcattcttgagtctatcatatggctgctctatggcaatgatggattggatatgttctatgctgagggcttgcgcatcaagaatcgatcacagcaaactctctatttcacaactaggagcaccgacggtggctcttcgttcactgccgacgtgagcgagatcgctactcggtggatcgggcatatcctagacaatgatccggaatgcaggcaatcgacagtcatccgggatttattagagctagtgagagacaagttacttgttgtagcacttcccaggtcttcgcagaggggtaccacccccgttcgcactaatgcgcaggatctgtataaaagattagatgctatccggaaggtggcgctgcaagatcaaggatatctatgtactgaagcaagccgaagatatgtcgagatacctcaaccccttgctatcaataccttgcaggtattgccttacagaccaaatcctcagggcctcaatgtaggcatgcagaagctccgtgatcacgcgcctaactaa

SEQ ID NO: 189 - protein, 629 aa, Muscodor strobelii
  misc_feature: SGI Peptide ID NO. 559623
  misc_feature (381)..(461): Pfam Id: PF00069 Pfam Desc: Protein kinase domain
  misc_feature (4)..(601): NCBI GI: 171694812 Blast Desc: protein product [Podospora anserina] gi|170947648|emb|CAP59810.1| protein product [Podospora anserina]
  misc_feature (19)..(590): NCBI GI: 256729997 Blast Desc: NECHADRAFT_82546 [Nectria haematococca mpVI 77-13-4]
  misc_feature (57)..(551): NCBI GI: 46110541 Blast Desc: FG02152.1 [Gibberella zeae PH-1]
  misc_feature (39)..(557): NCBI GI: 256723898 Blast Desc: NECHADRAFT_78374 [Nectria haematococca mpVI 77-13-4]
  misc_feature (36)..(573): NCBI GI: 256722820 Blast Desc: NECHADRAFT_87137 [Nectria haematococca mpVI 77-13-4]
  misc_feature (135)..(596): NCBI GI: 156059598 Blast Desc: SS1G_03811 [Sclerotinia sclerotiorum 1980] gi|154701598|gb|EDO01337.1| SS1G_03811 [Sclerotinia sclerotiorum 1980]
  misc_feature (258)..(594): NCBI GI: 170940328 Blast Desc: protein product [Podospora anserina]
  misc_feature (20)..(549): NCBI GI: 256724988 Blast Desc: [Nectria haematococca mpVI 77-13-4]
  misc_feature (17)..(548): NCBI GI: 164425000 Blast Desc: NCU06583 [Neurospora crassa OR74A] gi|157070747|gb|EAA32707.2| NCU06583 [Neurospora crassa OR74A]
  misc_feature (35)..(584): NCBI GI: 256722402 Blast Desc: NECHADRAFT_82208 [Nectria haematococca mpVI 77-13-4]
  misc_feature: Useful for introducing or modulating the production of volatile compounds
MGHRPKPRSRNSAGHFKAFQIRVDSALVTSAFEIGKRFLPERHIISLVQEANLELMLPGASESLLSFIRYEAPRLFLSVVMSRIVDKETDLLSVLKQFQEEGLTDESLPVEDITQGGRCQDGNINPIDDSPTKCSHHESLAAFHMDPWDCISFPAFYRAQWMFTAPMFHKRDGTSSQAELPHDTILPFTWKAPKGQSGHFSEVYHALLHADHQKEFKVKPRDEVINVAVKKLKNSISDEPGHDVEAAWHGEVTTLNELSGLPNAHLIRRIDAFKWRSDRYIIFEWASGGTLRQFWKKNHVGLSGQTIIEFLQQLCGIAGALNSLHQTNTHTATGLAEANKHRRSSKFLGPRKTTFKANKYPDIVLPADDNGAANIAQHWRHGDLKPDNILVFSDGSWLGTLKIADLGLAKKHNFATEFRPDPTSTSHTTLHYEAPEVVLNTRREPRSRRYDIWSMGCIILESIIWLLYGNDGLDMFYAEGLRIKNRSQQTLYFTTRSTDGGSSFTADVSEIATRWIGHILDNDPECRQSTVIRDLLELVRDKLLVVALPRSSQRGTTPVRTNAQDLYKRLDAIRKVALQDQGYLCTEASRRYVEIPQPLAINTLQVLPYRPNPQGLNVGMQKLRDHAPN

SEQ ID NO: 190 - DNA, 1978 bp, Muscodor strobelii
  misc_feature: SGI EST ID NO. CUFF.477.0
  misc_feature: Variant of the nucleotide sequence at SEQ ID NO 188
caataaacgagtatatgtcccagatactgatgagcaaggtttttgaactgcccaagtctacattacaatcaatcatggggcacaggcccaagccccgaagtcgcaacagtgcaggccacttcaaagcgtttcaaataagagttgactctgctcttgttacaagtgcctttgaaatcgggaagagattcctgccagaaaggcatatcatatcattggttcaggaggctaacttggaactcatgttgccgggtgcatcagagtctttgctcagcttcatccgctatgaggctccgagactattcttgagtgtggtcatgtcccgtattgtcgataaagagactgatctgctctcggtgttgaaacaatttcaggaagaaggacttactgatgagagcctgccagtcgaagacattacccaaggtgggaggtgtcaagacggaaatattaatcctatcgacgattctcccacaaaatgttctcatcacgaaagcttagcagcattccacatggatccttgggattgtattagctttccagcattctatagggcgcagtggatgttcacagcaccgatgtttcataagcgagatggtacatcttctcaggctgaacttccacacgacacgattttacctttcacttggaaagctcccaaaggtcaatcaggccatttcagtgaagtatatcatgctcttctacatgctgaccatcaaaaagaattcaaagtgaagccccgggacgaagttatcaacgttgctgtcaaaaaactcaagaactccatttcggacgaacctggccatgatgtggaggccgcctggcacggtgaagtgaccactctcaatgaacttagcgggcttccaaatgctcatctgatccgtcgcattgatgcattcaaatggcgatccgatcgctatatcatattcgaatgggctagcggcggtaccctcaggcaattttggaagaagaatcacgtagggttgagcggccaaacaatcattgaattcctgcagcagctgtgcggtattgcaggtgcacttaatagtctacaccaaaccaatactcataccgcaaccggcctagccgaagctaataagcatcggagatcatcgaagtttctcggccctaggaagactaccttcaaagcgaacaaatatccagatattgttcttccagctgacgataacggcgccgcaaatattgctcagcactggcgtcatggagacctgaaacctgacaacatactcgtcttcagtgacgggtcgtggcttgggacattgaagatagcggatcttggcttagcaaagaaacacaattttgctacggagtttcgtcctgatccaacatctacgagccacactaccctgcattatgaagctcccgaagtcgttttgaacacgagaagagaaccaagatctcgtcgttacgacatatggtcgatgggatgtatcattcttgagtctatcatatggctgctctatggcaatgatggattggatatgttctatgctgagggcttgcgcatcaagaatcgatcacagcaaactctctatttcacaactaggagcaccgacggtggctcttcgttcactgccgacgtgagcgagatcgctactcggtggatcgggcatatcctagacaatgatccggaatgcaggcaatcgacagtcatccgggatttattagagctagtgagagacaagttacttgttgtagcacttcccaggtcttcgcagaggggtaccacccccgttcgcactaatgcgcaggatctgtataaaagattagatgctatccggaaggtggcgctgcaagatcaaggatatctatgtactgaagcaagccgaagatatgtcgagatacctcaaccccttgctatcaataccttgcaggtattgccttacagaccaaatcctcagggcctcaatgtaggcatgcagaagctccgtgatcacgcgcctaactaatcgtcctcccagac

SEQ ID NO: 191 - DNA, 2550 bp, Muscodor strobelii
  misc_feature: SGI cDNA ID NO. 559624
  misc_feature: Elevated expression when VOC is produced
  misc_feature: Encodes the peptide sequence at SEQ ID NO 192
atgagtattattgtaccacaaggcaaaatattgaagatcatgaacgagggagatggtagcgactttgacgaagaggcaaaacatatggaaacgatcttctcatcggcatactgtgtcattgctgcaagccgggcaacaggaatgcgcagcgggttcctgcatcctcgaaaacaaaggaaggtagtcagagccgatagacctaaaaagaacccagtctacgtttgtgaagctatcgatgacttccagcatgacgtaattgaaggttctctgaacaggagaggatgggttctgcaggaaagagccttagcacggcgaacaatctactttgctgagagacaaacatattgggaatgtggcgaaggagttcgctgcgagactatgacgagaatgacaaataatcaggctgctttactcggcgaccccaaattccccaagttcgcaactgagtcgacaaaaggcggtcaaattcgcatttacgagcttctatacaagttatactcccgtctacaattcacaaacaactacgacagaccattggcgatcgctggcatcgagcaacgattgatacgtgcattcaacacccaaggtggatacggcgtcttcaatctatactttggtcgtagcttgctgtggaaacgcgatggtgcctttgggacgcaagctatgaagccaatccagtttccgcagaggcataaatatagtgtaccatcgtggtcgtggatggcatatgaaggagccatcactttcatggatatacccttcaaggaagtcatctgggaacagaaagagatacagtcaccttgggcttcccgggggcaagtcgcattcgatatctcaccctcgtcttcacagacggactctttgcccagcacggcatggcatacagccaatggagatgagaggtctgatttgacagctgttgcgagagatttttcgaccgtcggtgatcagtcccttacttatgacgcaggcagacgtccgagcgatcgtgcagtaaaatgcgttatcgttggcagaaagaagctggtgccgatggctgacgctacaaagcaaacgaattatgtgcttgtcgtcggaaagatgccgggaacagaaaaaggaaacaatccacttctatcttgtgctcgttgcgaggggggcaagaaggtgttcaagacgagaacgaaagatcctcctaatgaaacagtcgaactaccaagcgaaaccgatcgtaggccgaacacaatagcatatatcgttggcgatgaggcaaagatcatcgatcctatcatcgagagacgggtgttgaggaaaatcgacatctttctaatgccggcaatggtcctaggttatggcttggtctactacgacaaagctattctagggagtgcagccctcttcggcatcacgtctgatttaaaactagccgtagtcaactcagctgggcagacagacacttcgagactgagctgggccacgtctattttctattttgggcagcttgccggatcatacccattgacatatctattgcagcacttgaatatgcgcttcttcctcggaccagccgtcatggtttgggccataatttgcgcggcgacggctggtgtcacgacttggcaaggtcttttagtgcagaggttcttcctgggcttcaccgaatcggtgattccaacgggattcatgatgattgtaagcggctattatacgcagtctgagcaggctttaagacaaacttggtggttctccggcactggttggttcaccatcatcggcggcgcactgaactatggatttgcacaaatacagggcggagctctcaaatcttggcagtatatatatgttctcgctggcgcgctgacattcatattcggtatttggtgtttcttcttgccgaactcgcccttgcaggcgtggtttttaaccccggaagaacgaatcattgctatcgaacgccttcgtgccggtcagactggcgtacgtaaccaagaaatcaagcttgtgcaggtgaaagaagctgcccttgacgcgaaggtatggcttgtggcactcattatggcatctgcctatacagtgaatggcgctatctctggatttggacctttgatcgtttcgacctttggattttcgtcactggaagcaatactgctacaattcccgcttggcgcaatctgcacaatcggcatacccttggctggttggatctgctccaagtaccgcaatatcagaatcataactctacttctttgttgtcttccagttattgccggcttcgtcatcatttggaagtcgagctggggacaccgcccggcagcgccagtcattggctactctatcatcgggttcttcggccctgttgtgggattgaccgttggccttggagcgagcaatgtggcaggggagactaaaaagagtttcatggcttctgcagtctttgtcgcatattgtgtgggtaacatcatcggacctcagcttatccgcagtcagacgaaatcccaacactatcccgttttatggactggcttgatcatcagttacatcatcaccatagtctcttcatcagctctctaa

SEQ ID NO: 192 - protein, 849 aa, Muscodor strobelii
  misc_feature: SGI Peptide ID NO. 559624
  misc_feature (440)..(816): Pfam Id: PF07690 Pfam Desc: Major Facilitator Superfamily
  misc_feature (18)..(99): Pfam Id: PF06985 Pfam Desc: Heterokaryon incompatibility protein (HET)
  misc_feature (399)..(849): NCBI GI: 67541541 Blast Desc: AN6934.2 [Aspergillus nidulans FGSC A4] gi|40738499|gb|EAA57689.1| AN6934.2 [Aspergillus nidulans FGSC A4] gi|259480543|tpe|CBF71773.1| TPA: MFS transporter, nidulans
  misc_feature (413)..(849): NCBI GI: 242764852 Blast Desc: MFS transporter, [Talaromyces stipitatus ATCC 10500] gi|218724051|gb|EED23468.1| MFS transporter, [Talaromyces stipitatus ATCC 10500]
  misc_feature (413)..(849): NCBI GI: 212528982 Blast Desc: MFS transporter, [Penicillium marneffei ATCC 18224] gi|210074046|gb|EEA28133.1| MFS transporter, [Penicillium marneffei ATCC 18224]
  misc_feature (391)..(849): NCBI GI: 39969435 Blast Desc: MGG_10328 [Magnaporthe grisea 70-15] gi|149211297|ref|XP_001523023.1| MGCH7_ch7g1106 [Magnaporthe grisea 70-15] gi|86197061|gb|EAQ71699.1| MGCH7_ch7g1106 grisea
  misc_feature (392)..(849): NCBI GI: 238503732 Blast Desc: MFS transporter, [Aspergillus flavus NRRL3357] gi|220690569|gb|EED46918.1| MFS transporter, [Aspergillus flavus NRRL3357]
  misc_feature (412)..(849): NCBI GI: 255939742 Blast Desc: Pc16g02680 [Penicillium chrysogenum Wisconsin 54-1255] gi|211585263|emb|CAP92938.1| Pc16g02680 [Penicillium chrysogenum Wisconsin 54-1255]
  misc_feature (392)..(849): NCBI GI: 169764991 Blast Desc: [Aspergillus oryzae RIB40] gi|83764821|dbj|BAE54965.1| protein product [Aspergillus oryzae]
  misc_feature (396)..(849): NCBI GI: 121704192 Blast Desc: MFS transporter, [Aspergillus clavatus NRRL 1] gi|119398504|gb|EAW08934.1| MFS transporter, [Aspergillus clavatus NRRL 1]
  misc_feature (388)..(849): NCBI GI: 70984777 Blast Desc: MFS transporter [Aspergillus fumigatus Af293] gi|66845522|gb|EAL85857.1| MFS transporter, [Aspergillus fumigatus Af293]
  misc_feature (388)..(849): NCBI GI: 159122679 Blast Desc: MFS transporter, [Aspergillus fumigatus A1163]
  misc_feature: Useful for introducing or modulating the production of volatile compounds
MSIIVPQGKILKIMNEGDGSDFDEEAKHMETIFSSAYCVIAASRATGMRSGFLHPRKQRKVVRADRPKKNPVYVCEAIDDFQHDVIEGSLNRRGWVLQERALARRTIYFAERQTYWECGEGVRCETMTRMTNNQAALLGDPKFPKFATESTKGGQIRIYELLYKLYSRLQFTNNYDRPLAIAGIEQRLIRAFNTQGGYGVFNLYFGRSLLWKRDGAFGTQAMKPIQFPQRHKYSVPSWSWMAYEGAITFMDIPFKEVIWEQKEIQSPWASRGQVAFDISPSSSQTDSLPSTAWHTANGDERSDLTAVARDFSTVGDQSLTYDAGRRPSDRAVKCVIVGRKKLVPMADATKQTNYVLVVGKMPGTEKGNNPLLSCARCEGGKKVFKTRTKDPPNETVELPSETDRRPNTIAYIVGDEAKIIDPIIERRVLRKIDIFLMPAMVLGYGLVYYDKAILGSAALFGITSDLKLAVVNSAGQTDTSRLSWATSIFYFGQLAGSYPLTYLLQHLNMRFFLGPAVMVWAIICAATAGVTTWQGLLVQRFFLGFTESVIPTGFMMIVSGYYTQSEQALRQTWWFSGTGWFTIIGGALNYGFAQIQGGALKSWQYIYVLAGALTFIFGIWCFFLPNSPLQAWFLTPEERIIAIERLRAGQTGVRNQEIKLVQVKEAALDAKVWLVALIMASAYTVNGAISGFGPLIVSTFGFSSLEAILLQFPLGAICTIGIPLAGWICSKYRNIRIITLLLCCLPVIAGFVIIWKSSWGHRPAAPVIGYSIIGFFGPVVGLTVGLGASNVAGETKKSFMASAVFVAYCVGNIIGPQLIRSQTKSQHYPVLWTGLIISYIITIVSSSAL

SEQ ID NO: 193 - DNA, 1660 bp, Muscodor strobelii
  misc_feature: SGI EST ID NO. CUFF.486.0
  misc_feature: Variant of the nucleotide sequence at SEQ ID NO 191
gacagattcaacactatcggtcatgccatgcgatctgagaaattctaagttggtacgcttccgagtgtagcttcaaacctccaaagaaaggcatatcttgtggtcaatccgattactctagtcataattgattgcctttgtcgagtcagtccacttctatcttgtgctcgttgcgaggggggcaagaaggtgttcaagacgagaacgaaagatcctcctaatgaaacagtcgaactaccaagcgaaaccgatcgtaggccgaacacaatagcatatatcgttggcgatgaggcaaagatcatcgatcctatcatcgagagacgggtgttgaggaaaatcgacatctttctaatgccggcaatggtcctaggttatggcttggtctactacgacaaagctattctagggagtgcagccctcttcggcatcacgtctgatttaaaactagccgtagtcaactcagctgggcagacagacacttcgagactgagctgggccacgtctattttctattttgggcagcttgccggatcatacccattgacatatctattgcagcacttgaatatgcgcttcttcctcggaccagccgtcatggtttgggccataatttgcgcggcgacggctggtgtcacgacttggcaaggtcttttagtgcagaggttcttcctgggcttcaccgaatcggtgattccaacgggattcatgatgattgtaagcggctattatacgcagtctgagcaggctttaagacaaacttggtggttctccggcactggttggttcaccatcatcggcggcgcactgaactatggatttgcacaaatacagggcggagctctcaaatcttggcagtatatatatgttctcgctggcgcgctgacattcatattcggtatttggtgtttcttcttgccgaactcgcccttgcaggcgtggtttttaaccccggaagaacgaatcattgctatcgaacgccttcgtgccggtcagactggcgtacgtaaccaagaaatcaagcttgtgcaggtgaaagaagctgcccttgacgcgaaggtatggcttgtggcactcattatggcatctgcctatacagtgaatggcgctatctctggatttggacctttgatcgtttcgacctttggattttcgtcactggaagcaatactgctacaattcccgcttggcgcaatctgcacaatcggcatacccttggctggttggatctgctccaagtaccgcaatatcagaatcataactctacttctttgttgtcttccagttattgccggcttcgtcatcatttggaagtcgagctggggacaccgcccggcagcgccagtcattggctactctatcatcgggttcttcggccctgttgtgggattgaccgttggccttggagcgagcaatgtggcaggggagactaaaaagagtttcatggcttctgcagtctttgtcgcatattgtgtgggtaacatcatcggacctcagcttatccgcagtcagacgaaatcccaacactatcccgttttatggactggcttgatcatcagttacatcatcaccatagtctcttcatcagctctctaaaataactaacccccttacgggccacccccttacgggctaccgcgtaccgcgttacccctgcaaccac

SEQ ID NO: 194 - DNA, 753 bp, Muscodor strobelii
  misc_feature: SGI cDNA ID NO. 559625
  misc_feature: Encodes the peptide sequence at SEQ ID NO 195
atgacgcttcgtaatgctcttattctagccccgtttgccgctttggcgttcgcagatacgaacccggacgcgcaaggcgcttgtgaacccactcaaggtggtagtaatgcatgcggtccaaacggttctgaagaatggttgaacactggtatcaccgacgagagcaccggctggaacccacctttcctcgacatcaatggcattagccatatcagcttagacgaatactatcagggagtaggagcctcttgccagcagtacgatgatgctttccaagcaagtggagcgaaatatggtatcgatcccgctatacttgcctttatcgccatgcaggagagcagttgtaatgccgatgcgggtggccctacaccaggactgatgcaatgtgatccctctaattgccagaatggccagtcttcatgtcagtacccgatagaggacaacacagactgtggcgcatgggtactccagcaaggtctcaattcgaccgatggaaatgctattcgtgctcttggagcctacaacggttggtttacggcggacgactacgctgcctcacaaaacaacggcaagggacttaccacagactacccttgtggccttggtacaaactacggcagtccccaaaacttgaactacatccatgagatactcaatggatggttccaaggttatgacatttatggagatgactcgggtctcgccggatcctacgattgctccggcgcatgcggaagtggtaacatctgctaa

SEQ ID NO: 195 - protein, 250 aa, Muscodor strobelii
  misc_feature: SGI Peptide ID NO. 559625
  misc_feature (89)..(197): Pfam Id: PF01464 Pfam Desc: Transglycosylase SLT domain
  misc_feature (89)..(176): Pfam Id: PF01464 Pfam Desc: Transglycosylase SLT domain
  misc_feature (2)..(233): NCBI GI: 256730266 Blast Desc: NECHADRAFT_106250 [Nectria haematococca mpVI 77-13-4]
  misc_feature (21)..(250): NCBI GI: 70986242 Blast Desc: extracellular soluble lytic transglycosylase [Aspergillus fumigatus Af293] gi|66846244|gb|EAL86577.1| extracellular soluble lytic transglycosylase, [Aspergillus Af293]
  misc_feature (21)..(250): NCBI GI: 119474273 Blast Desc: transglycosylase SLT domain protein [Neosartorya fischeri NRRL 181] gi|119407165|gb|EAW17115.1| transglycosylase SLT domain protein [Neosartorya fischeri NRRL 181]
  misc_feature (35)..(228): NCBI GI: 58260320 Blast Desc: CNJ02900 [Cryptococcus neoformans var. neoformans JEC21] gi|134116228|ref|XP_773285.1| CNBJ0630 [Cryptococcus neoformans var. neoformans B-3501A] gi|50255907|gb|EAL18638.1|
  misc_feature (34)..(244): NCBI GI: 71024271 Blast Desc: UM06218.1 [Ustilago maydis 521] gi|46101823|gb|EAK87056.1| UM06218.1 [Ustilago maydis 521]
  misc_feature (23)..(192): NCBI GI: 242210368 Blast Desc: [Postia placenta Mad-698-R] gi|220729929|gb|EED83795.1| [Postia placenta Mad-698-R]
  misc_feature (31)..(239): NCBI GI: 170093147 Blast Desc: glycoside hydrolase family 23 protein [Laccaria bicolor S238N-H82] gi|164647654|gb|EDR11898.1| glycoside hydrolase family 23 protein [Laccaria bicolor S238N-H82]
  misc_feature (23)..(177): NCBI GI: 242220142 Blast Desc: [Postia placenta Mad-698-R] gi|220724944|gb|EED78956.1| [Postia placenta Mad-698-R]
  misc_feature (23)..(223): NCBI GI: 169847261 Blast Desc: CC1G_01978 [Coprinopsis cinerea okayama7#130] gi|116508594|gb|EAU91489.1| CC1G_01978 [Coprinopsis cinerea okayama7#130]
  misc_feature (88)..(176): NCBI GI: 118444907 Blast Desc: lytic murein transglycosylase, [Clostridium novyi NT] gi|118135363|gb|ABK62407.1| lytic murein transglycosylase, [Clostridium novyi NT]
MTLRNALILAPFAALAFADTNPDAQGACEPTQGGSNACGPNGSEEWLNTGITDESTGWNPPFLDINGISHISLDEYYQGVGASCQQYDDAFQASGAKYGIDPAILAFIAMQESSCNADAGGPTPGLMQCDPSNCQNGQSSCQYPIEDNTDCGAWVLQQGLNSTDGNAIRALGAYNGWFTADDYAASQNNGKGLTTDYPCGLGTNYGSPQNLNYIHEILNGWFQGYDIYGDDSGLAGSYDCSGACGSGNIC

SEQ ID NO: 196 - DNA, 822 bp, Muscodor strobelii
  misc_feature: SGI cDNA ID NO. 559626
  misc_feature: Elevated expression when VOC is produced
  misc_feature: Encodes the peptide sequence at SEQ ID NO 197
atggcaaaccaccaagtcccatttgttaccgagacacgagatgaagagaaggggttgcatcgaacaaacacgggcgtgacgatgtcgccagagcttttcgagaagctttacctaacccctaaggtgcctcatgctggtgactacaacaagagattcgctaatccaaccgcgcttggatttattggttttgtcatctcagcatcgactttcgcaatgatcatcatgggatggggaggagcggtcagtctatcaccagtagctggtattttcttctttgtcggaccagttacgatgcttctcgcccttgtcttcgaatggatactcggaaatttcttctctatgatggttatggggttgtttgccgtattctggttatctttcggtcttctccagattccggctctgcagctcggtagcgctttcgcaactgcagatgaccctacagggacgatgtcgaaagaattcaatgccgccatcggattatttctcatcgtctatgggtttgcgttcttgacatttttcgtctttacactcaagatcaataccgtcttggcaacgatcttcgctttgactacgacagcgacttggatcttggcaggagcatatttcaagttgtccttaggcgagttagagactgcaggaaagcttcagaaggctggtgggggaattatattcttcgtggcaatgctcggttggtatatgtgtttcatcatcatggcaggcgagatgagattcaccttcagcctgccggttggtgatctaagccatctctggccaagaacggatgtggagttggcgacaccgcgtgaacatagtgattga

SEQ ID NO: 197 - protein, 273 aa, Muscodor strobelii
  misc_feature: SGI Peptide ID NO. 559626
  misc_feature (14)..(272): NCBI GI: 116193981 Blast Desc: CHGG_06708 [Chaetomium globosum CBS 148.51] gi|88182621|gb|EAQ90089.1| CHGG_06708 [Chaetomium globosum CBS 148.51]
  misc_feature (14)..(244): NCBI GI: 171683171 Blast Desc: protein product [Podospora anserina] gi|170941545|emb|CAP67197.1| protein product [Podospora anserina]
  misc_feature (4)..(265): NCBI GI: 189192568 Blast Desc: plasma membrane ammonium transporter (Ato3) [Pyrenophora tritici-repentis Pt-1C-BFP] gi|187974229|gb|EDU41728.1| plasma membrane ammonium transporter
  misc_feature (14)..(266): NCBI GI: 169625228 Blast Desc: SNOG_15881 [Phaeosphaeria nodorum SN15] gi|111055599|gb|EAT76719.1| SNOG_15881 [Phaeosphaeria nodorum SN15]
  misc_feature (14)..(103): NCBI GI: 224775783 Blast Desc: TPA: TPA_inf: GPR1/FUN34/YaaH-class plasma membrane protein [Chaetomium globosum]
  misc_feature (1)..(255): NCBI GI: 224775803 Blast Desc: TPA: TPA_inf: GPR1/FUN34/YaaH-class plasma membrane protein [Phaeosphaeria nodorum]
  misc_feature (13)..(255): NCBI GI: 46109396 Blast Desc: FG01580.1 [Gibberella zeae PH-1] gi|224775787|tpg|DAA06465.1| TPA_inf: GPR1/FUN34/YaaH-class plasma membrane protein [Gibberella zeae]
  misc_feature (11)..(262): NCBI GI: 256724975 Blast Desc: NECHADRAFT_34587 [Nectria haematococca mpVI 77-13-4]
  misc_feature (1)..(255): NCBI GI: 169618990 Blast Desc: SNOG_12687 [Phaeosphaeria nodorum SN15] gi|160703723|gb|EAT79985.2| SNOG_12687 [Phaeosphaeria nodorum SN15]
  misc_feature (1)..(257): NCBI GI: 224775813 Blast Desc: TPA: TPA_inf: GPR1/FUN34/YaaH-class plasma membrane protein [Hypocrea jecorina]
  misc_feature: Useful for introducing or modulating the production of volatile compounds
MANHQVPFVTETRDEEKGLHRTNTGVTMSPELFEKLYLTPKVPHAGDYNKRFANPTALGFIGFVISASTFAMIIMGWGGAVSLSPVAGIFFFVGPVTMLLALVFEWILGNFFSMMVMGLFAVFWLSFGLLQIPALQLGSAFATADDPTGTMSKEFNAAIGLFLIVYGFAFLTFFVFTLKINTVLATIFALTTTATWILAGAYFKLSLGELETAGKLQKAGGGIIFFVAMLGWYMCFIIMAGEMRFTFSLPVGDLSHLWPRTDVELATPREHSD

SEQ ID NO: 198 - DNA, 1322 bp, Muscodor strobelii
  misc_feature: SGI EST ID NO. CUFF.504.0
  misc_feature: Variant of the nucleotide sequence at SEQ ID NO 196
tggacaatgaaatggttttctcgggtggatgggcgagaacgaggctcgctacataaatattgttagtcaacagtcacgctgcttactcttgtctgttcaacacacgtagtgcgtatccaaaatggcaaaccaccaagtcccatttgttaccgagacacgagatgaagagaaggggttgcatcgaacaaacacgggcgtgacgatgtcgccagagcttttcgagaagctttacctaacccctaaggtgcctcatgctggtgactacaacaagagattcgctaatccaaccgcgcttggatttattggttttgtcatctcagcatcgactttcgcaatgatcatcatgggatggggaggagcggtcagtctatcaccagtagctggtattttcttctttgtcggaccagttacgatgcttctcgcccttgtcttcgaatggatactcggaaatttcttctctatgatggttatggggttgtttgccgtattctggttatctttcggtcttctccagattccggctctgcagctcggtagcgctttcgcaactgcagatgaccctacagggacgatgtcgaaagaattcaatgccgccatcggattatttctcatcgtctatgggtttgcgttcttgacatttttcgtctttacactcaagatcaataccgtcttggcaacgatcttcgctttgactacgacagcgacttggatcttggcaggagcatatttcaagttgtccttaggcgagttagagactgcaggaaagcttcagaaggctggtgggggaattatattcttcgtggcaatgctcggttggtatatgtgtttcatcatcatggcaggcgagatgagattcaccttcagcctgccggttggtgatctaagccatctctggccaagaacggatgtggagttggcgacaccgcgtgaacatagtgattgataagtgatccgatcacttggcaagcgagtctgatatcggctagtttgcagggttttcaagacaacgtgttgtacagatatcggtcaataattgaaaaacgtttgaaatgtgcatcttatgtcaaatctaccaagcacctccttgcaccaccatatgtaggaatggtaagtacgctgaatgcgacatgccatcgagcttcgaacatacctagccttgccctgtcaatatactagagaaatcatttcaggcattatgaaaggaggatttctttttgcagtcccattgcatcacatttccccacatcctcctcctcgaagtgactttcccatcctgggccataatatctgcttgttgaagcgatcgcgcttggttgtgcacg

SEQ ID NO: 199 - DNA, 1497 bp, Muscodor strobelii
  misc_feature: SGI cDNA ID NO. 559627
  misc_feature: Encodes the peptide sequence at SEQ ID NO 200
atggggacgtctctcggcacgtttcgagccgtttatctggtcgccctttgctgtactggcagtttcctcttcgcctatgacacgggtgttgttggtggagtacttagtctaccatcatttcagaaagacttccatatcactgcggccaataagtctaccgttggtggcaatgcaaccagcttattacaagccggagcttttttctcatgtttcttcgtatggccattcaccacgagatacgggcgtcgatggtccattgttcttgcctcgttaatctttaatatcggtgcaattatccaagtcatcaatacgcgctcgctagcagccttttatgtcgcacgagtgattagtggtgtcggtgtcggtatggcgacggttatcattccaatgtacagcgcagagatggctccaaaagaaatccggggtcagcttggcagcatgttccaattcttcttcactcttggtgtaatgacaagttattggattgactacggcgttacccttcatctccctgcgacgacacggcaatggcagatcccgatcggactacaacttgtgcctggcggtatcttaggactcggcatgctcttgacaaaagagagcactcgatggctcgctaaaactggaaaacatgagagagcgctggaatccctgatctgggttcgtggtggtgacaccactgaagtgcaagaggaatttgctgagatccttgctggaatacgcgaggaagaacacgttacagagggactaacatggaaagagtgtttgcttcctgtgaatcgattccggtttttcctcgtgattactcttcagatcggtgttcagttaaccggcaacacgagtttggcatactttgctcctcaaattttccaagccatcggagctggaagccaatcccttctcttcagcggcttctttggggtcgtgaaagttgttgcatgcttgttcttcttgttgttcctcgtagacaggattggacgtcgctggtcgctcctcataggagctttcttgatgggatctctgcaccttatcatcgccttgctgaccgcgacacatccaccaaaaccaaatggcccagtaacgagcaccggtgccgcagctattgctgtcgtatatcttgaggctatggcatacaacatgtcctgggggccggtaccatggctttatcagagcgaaatttttccgaacagactacgcgaagccggtgtagcagtcggtacggctacacaatggttattcaatttcacattttcgcagatcacgccccatgctatctataacattggatggaagacattcctaatatttgctatacttaactgggctctcgtgttctatacgtggttcatcattaaagagactaaaggaaagtcgctggaggagatggaagagttgtttggctcttcagagactgccatcaacgtggaaaaggtccacgaagaggcaagggagaaggccgaagcctcgccaaatgtcaaagacacgcaagagaattag

SEQ ID NO: 200 - protein, 498 aa, Muscodor strobelii
  misc_feature: SGI Peptide ID NO. 559627
  misc_feature (17)..(418): Pfam Id: PF07690 Pfam Desc: Major Facilitator Superfamily
  misc_feature (13)..(466): Pfam Id: PF00083 Pfam Desc: Sugar (and other) transporter
  misc_feature (3)..(495): NCBI GI: 242790022 Blast Desc: MFS sugar transporter, [Talaromyces stipitatus ATCC 10500] gi|218718069|gb|EED17489.1| MFS sugar transporter, [Talaromyces stipitatus ATCC 10500]
  misc_feature (1)..(497): NCBI GI: 169763550 Blast Desc: [Aspergillus oryzae RIB40] gi|83770703|dbj|BAE60836.1| protein product [Aspergillus oryzae]
  misc_feature (1)..(489): NCBI GI: 115443156 Blast Desc: conserved [Aspergillus terreus NIH2624] gi|114188254|gb|EAU29954.1| conserved [Aspergillus terreus NIH2624]
  misc_feature (4)..(491): NCBI GI: 115388952 Blast Desc: conserved [Aspergillus terreus NIH2624] gi|114194377|gb|EAU36077.1| conserved [Aspergillus terreus NIH2624]
  misc_feature (66)..(463): NCBI GI: 256731551 Blast Desc: NECHADRAFT_48911 [Nectria haematococca mpVI 77-13-4]
  misc_feature (1)..(464): NCBI GI: 238489481 Blast Desc: sugar transporter, [Aspergillus flavus NRRL3357] gi|220698366|gb|EED54706.1| sugar transporter, [Aspergillus flavus NRRL3357]
  misc_feature (66)..(491): NCBI GI: 67902194 Blast Desc: AN8084.2 [Aspergillus nidulans FGSC A4] gi|40740516|gb|EAA59706.1| AN8084.2 [Aspergillus nidulans FGSC A4] gi|259480843|tpe|CBF73852.1| TPA: conserved [Aspergillus FGSC
  misc_feature (1)..(498): NCBI GI: 115399272 Blast Desc: conserved [Aspergillus terreus NIH2624] gi|114192108|gb|EAU33808.1| conserved [Aspergillus terreus NIH2624]
  misc_feature (1)..(490): NCBI GI: 169769989 Blast Desc: [Aspergillus oryzae RIB40] gi|83767323|dbj|BAE57462.1| protein product [Aspergillus oryzae]
  misc_feature (1)..(468): NCBI GI: 67522817 Blast Desc: AN1865.2 [Aspergillus nidulans FGSC A4] gi|40745874|gb|EAA65030.1| AN1865.2 [Aspergillus nidulans FGSC A4] gi|259487218|tpe|CBF85717.1| TPA: MFS sugar transporter, FGSC
MGTSLGTFRAVYLVALCCTGSFLFAYDTGVVGGVLSLPSFQKDFHITAANKSTVGGNATSLLQAGAFFSCFFVWPFTTRYGRRWSIVLASLIFNIGAIIQVINTRSLAAFYVARVISGVGVGMATVIIPMYSAEMAPKEIRGQLGSMFQFFFTLGVMTSYWIDYGVTLHLPATTRQWQIPIGLQLVPGGILGLGMLLTKESTRWLAKTGKHERALESLIWVRGGDTTEVQEEFAEILAGIREEEHVTEGLTWKECLLPVNRFRFFLVITLQIGVQLTGNTSLAYFAPQIFQAIGAGSQSLLFSGFFGVVKVVACLFFLLFLVDRIGRRWSLLIGAFLMGSLHLIIALLTATHPPKPNGPVTSTGAAAIAVVYLEAMAYNMSWGPVPWLYQSEIFPNRLREAGVAVGTATQWLFNFTFSQITPHAIYNIGWKTFLIFAILNWALVFYTWFIIKETKGKSLEEMEELFGSSETAINVEKVHEEAREKAEASPNVKDTQEN

SEQ ID NO: 201 - DNA, 1977 bp, Muscodor strobelii
  misc_feature: SGI EST ID NO. CUFF.508.0
  misc_feature: Variant of the nucleotide sequence at SEQ ID NO 199
aacccaacctatatcttcttgcctcacgcgatgcagcacgttgagaccattttgactttgttaccattattctccttttgacagtaggctgttcaaccttagctgttatcgaatacaggacggcaagagtgcgcgatagttcacttgcctcacgacaaacaaggacggctaagcattggcaacaccaaaccccgacaagatggggacgtctctcggcacgtttcgagccgtttatctggtcgccctttgctgtactggcagtttcctcttcgcctatgacacgggtgttgttggtggagtacttagtctaccatcatttcagaaagacttccatatcactgcggccaataagtctaccgttggtggcaatgcaaccagcttattacaagccggagcttttttctcatgtttcttcgtatggccattcaccacgagatacgggcgtcgatggtccattgttcttgcctcgttaatctttaatatcggtgcaattatccaagtcatcaatacgcgctcgctagcagccttttatgtcgcacgagtgattagtggtgtcggtgtcggtatggcgacggttatcattccaatgtacagcgcagagatggctccaaaagaaatccggggtcagcttggcagcatgttccaattcttcttcactcttggtgtaatgacaagttattggattgactacggcgttacccttcatctccctgcgacgacacggcaatggcagatcccgatcggactacaacttgtgcctggcggtatcttaggactcggcatgctcttgacaaaagagagcactcgatggctcgctaaaactggaaaacatgagagagcgctggaatccctgatctgggttcgtggtggtgacaccactgaagtgcaagaggaatttgctgagatccttgctggaatacgcgaggaagaacacgttacagagggactaacatggaaagagtgtttgcttcctgtgaatcgattccggtttttcctcgtgattactcttcagatcggtgttcagttaaccggcaacacgagtttggcatactttgctcctcaaattttccaagccatcggagctggaagccaatcccttctcttcagcggcttctttggggtcgtgaaagttgttgcatgcttgttcttcttgttgttcctcgtagacaggattggacgtcgctggtcgctcctcataggagctttcttgatgggatctctgcaccttatcatcgccttgctgaccgcgacacatccaccaaaaccaaatggcccagtaacgagcaccggtgccgcagctattgctgtcgtatatcttgaggctatggcatacaacatgtcctgggggccggtaccatggctttatcagagcgaaatttttccgaacagactacgcgaagccggtgtagcagtcggtacggctacacaatggttattcaatttcacattttcgcagatcacgccccatgctatctataacattggatggaagacattcctaatatttgctatacttaactgggctctcgtgttctatacgtggttcatcattaaagagactaaaggaaagtcgctggaggagatggaagagttgtttggctcttcagagactgccatcaacgtggaaaaggtccacgaagaggcaagggagaaggccgaagcctcgccaaatgtcaaagacacgcaagagaattagtagagacttgatcgagttacaaaggttcatcttcatcggaccggatgaactttttcgaggtctgcgcacaaaggaaatttctctgcctttccgatttgagatgtttccggtatcgctggagacaaggtgacttgtatttagctttttgtgaccgtggatgtccagcatctttgtctcatggatttattaagataccaacatttgcaagtaaaagtctcccatattctggtactaaaaagtccgaactacatggacagtcagcctgttcttgtatcctgtgc

SEQ ID NO: 202 - DNA, 1500 bp, Muscodor strobelii
  misc_feature: SGI cDNA ID NO. 559628
  misc_feature: Encodes the peptide sequence at SEQ ID NO 203
atggggacgtctctcggcacgtttcgagccgtttatctggtcgccctttgctgtactggcagtttcctcttcgcctatgacacgggtgttgttggtggagtacttagtctaccatcatttcagaaagacttccatatcactgcggccaataagtctaccgttggtggcaatgcaaccagcttattacaagccggagcttttttctcatgtttcttcgtatggccattcaccacgagatacgggcgtcgatggtccattgttcttgcctcgttaatctttaatatcggtgcaattatccaagtcatcaatacgcgctcgctagcagccttttatgtcgcacgagtgattagtggtgtcggtgtcggtatggcgacggttatcattccaatgtacagcgcagagatggctccaaaagaaatccggggtcagcttggcagcatgttccaattcttcttcactcttggtgtaatgacaagttattggattgactacggcgttacccttcatctccctgcgacgacacggcaatggcagatcccgatcggactacaacttgtgcctggcggtatcttaggactcggcatgctcttgacaaaagagagcactcgatggctcgctaaaactggaaaacatgagagagcgctggaatccctgatctgggttcgtggtggtgacaccactgaagtgcaagaggaatttgctgagatccttgctggaatacgcgaggaagaacacgttacagagggactaacatggaaagagtgtttgcttcctgtgaatcgattccggtttttcctcgtgattactcttcagatcggtgttcagttaaccggcaacacgagtttggcatactttgctcctcaaattttccaagccatcggagctggaagccaatcccttctcttcagcggcttctttggggtcgtgaaagttgttgcatgcttgttcttcttgttgttcctcgtagacaggattggacgtcgctggtcgctcctcataggagctttcttgatgggatctctgcaccttatcatcgccttgctgaccgcgacacatccaccaaaaccaaatggcccagtaacgagcaccggtgccgcagctattgctgtcgtatatcttgaggctatggcatacaacatgtcctgggggccggtaccatggctttatcagagcgaaatttttccgaacagactacgcgaagccggtgtagcagtagtcggtacggctacacaatggttattcaatttcacattttcgcagatcacgccccatgctatctataacattggatggaagacattcctaatatttgctatacttaactgggctctcgtgttctatacgtggttcatcattaaagagactaaaggaaagtcgctggaggagatggaagagttgtttggctcttcagagactgccatcaacgtggaaaaggtccacgaagaggcaagggagaaggccgaagcctcgccaaatgtcaaagacacgcaagagaattag

SEQ ID NO: 203 - protein, 499 aa, Muscodor strobelii
  misc_feature: SGI Peptide ID NO. 559628
  misc_feature (17)..(418): Pfam Id: PF07690 Pfam Desc: Major Facilitator Superfamily
  misc_feature (13)..(467): Pfam Id: PF00083 Pfam Desc: Sugar (and other) transporter
  misc_feature (3)..(496): NCBI GI: 242790022 Blast Desc: MFS sugar transporter, [Talaromyces stipitatus ATCC 10500] gi|218718069|gb|EED17489.1| MFS sugar transporter, [Talaromyces stipitatus ATCC 10500]
  misc_feature (1)..(498): NCBI GI: 169763550 Blast Desc: [Aspergillus oryzae RIB40] gi|83770703|dbj|BAE60836.1| protein product [Aspergillus oryzae]
  misc_feature (1)..(490): NCBI GI: 115443156 Blast Desc: conserved [Aspergillus terreus NIH2624] gi|114188254|gb|EAU29954.1| conserved [Aspergillus terreus NIH2624]
  misc_feature (4)..(492): NCBI GI: 115388952 Blast Desc: conserved [Aspergillus terreus NIH2624] gi|114194377|gb|EAU36077.1| conserved [Aspergillus terreus NIH2624]
  misc_feature (66)..(464): NCBI GI: 256731551 Blast Desc: NECHADRAFT_48911 [Nectria haematococca mpVI 77-13-4]
  misc_feature (1)..(465): NCBI GI: 238489481 Blast Desc: sugar transporter, [Aspergillus flavus NRRL3357] gi|220698366|gb|EED54706.1| sugar transporter, [Aspergillus flavus NRRL3357]
  misc_feature (66)..(492): NCBI GI: 67902194 Blast Desc: AN8084.2 [Aspergillus nidulans FGSC A4] gi|40740516|gb|EAA59706.1| AN8084.2 [Aspergillus nidulans FGSC A4] gi|259480843|tpe|CBF73852.1| TPA: conserved [Aspergillus FGSC
  misc_feature (1)..(499): NCBI GI: 115399272 Blast Desc: conserved [Aspergillus terreus NIH2624] gi|114192108|gb|EAU33808.1| conserved [Aspergillus terreus NIH2624]
  misc_feature (1)..(491): NCBI GI: 169769989 Blast Desc: [Aspergillus oryzae RIB40] gi|83767323|dbj|BAE57462.1| protein product [Aspergillus oryzae]
  misc_feature (1)..(469): NCBI GI: 67522817 Blast Desc: AN1865.2 [Aspergillus nidulans FGSC A4] gi|40745874|gb|EAA65030.1| AN1865.2 [Aspergillus nidulans FGSC A4] gi|259487218|tpe|CBF85717.1| TPA: MFS sugar transporter, FGSC
MGTSLGTFRAVYLVALCCTGSFLFAYDTGVVGGVLSLPSFQKDFHITAANKSTVGGNATSLLQAGAFFSCFFVWPFTTRYGRRWSIVLASLIFNIGAIIQVINTRSLAAFYVARVISGVGVGMATVIIPMYSAEMAPKEIRGQLGSMFQFFFTLGVMTSYWIDYGVTLHLPATTRQWQIPIGLQLVPGGILGLGMLLTKESTRWLAKTGKHERALESLIWVRGGDTTEVQEEFAEILAGIREEEHVTEGLTWKECLLPVNRFRFFLVITLQIGVQLTGNTSLAYFAPQIFQAIGAGSQSLLFSGFFGVVKVVACLFFLLFLVDRIGRRWSLLIGAFLMGSLHLIIALLTATHPPKPNGPVTSTGAAAIAVVYLEAMAYNMSWGPVPWLYQSEIFPNRLREAGVAVVGTATQWLFNFTFSQITPHAIYNIGWKTFLIFAILNWALVFYTWFIIKETKGKSLEEMEELFGSSETAINVEKVHEEAREKAEASPNVKDTQEN

SEQ ID NO: 204 - DNA, 1977 bp, Muscodor strobelii; identical to SEQ ID NO: 201
  misc_feature: SGI EST ID NO. CUFF.508.0
  misc_feature: Variant of the nucleotide sequence at SEQ ID NO 202

SEQ ID NO: 205 - DNA, 2400 bp, Muscodor strobelii
  misc_feature: SGI cDNA ID NO. 559629
  misc_feature: Encodes the peptide sequence at SEQ ID NO 206
atgtatctcctgatacgaacatctggtcgaatcttccctcagaagcgtctctattttgaagacgatcacaacacaccgacccgtggtaatgggtcgcaggaatcaatgactgatagcggacttcgacctctacgtccctcgcaggtctctggcggtgccaaggacgaagacgaacgcacaaacagcagcgacggagcaagacaaacgccaccagccgcgtccggacccattttgagctcgcagcctttgctttcccagaagaaacgtgccacctgctcgcaatgcagaatacgcaaggtacgatgtgacggtagagaaggcctttgtcgaaactgtgatcgtcttggcttcgagtgttctttccagcaatcaccaggcaggacacctggcaactatgctctaaagctccccgagcgcaggagacgtatgcaagcatgcgtccagtgccatctgaagaaaacgcgatgtcacggggagctaccgagttgttctagctgtgtccgcaagggcctagactgcaactacccgccggcgacgaggagaaacggcacccccggaccggggtcggccaccggacatagctctagtcgggttgacccaccgtcgccagatcaagatgtcggtatggctgaggctgacgaagcaagccttttggatgatcagacggcaatgggacagatagaagattattttgcccatttgcatcctttgccttccttcgcattccttcataggccgacagtcgtccgtcgatgcaaagacggtaccatcaacgaacccctaaagctcgctatctgtgcgatcacttctttgcatctggagcgtactgctctttgccacgacctctgggtacaacaagctgagcaacttattctacaacagatcggccagccgtcaatattccatttgcaagctctactactcatcgttcgctatcggatcgagagtggtgagtttcccacggcttttatgctcgcagcgcttgcggctcggacggcagttgcgctacgtctcaactacgagcgatccgagctgacgttcgttgcacaggaagcacggcgtcgtctatattgggcattgtatcttcttgacgattacttctgcgtggggttacgagaatttgaactctgccctgaagagactatatatctccaattaccatgtcgcgaagatatctttgaggcaggacagcaatgccaaactgggatacttcgccctagtcctgcggataatgtgtcagctatgggacttcctggcatattcatgcgtcttacatctgcaagacgcgcaataatgcggtttaacagacgagtgggtctcggcgaagaatcatcctcgacgataagtgctcgtatacaacaaatagagcatgatctttctgccctctactcagcgatcagcccgcaaaaccagtactcagtcgcaaatcttgcattatgtaaattccaggcacagttcgttatgctccatatgtcctatcaccaatgccattgcgatctttatcgaatgttcctgaacggttacagcgaggcggctccaaacacccttctgtcactaatacctcctcaagaccgcatatctatgcagacaaaatgtctagagcacgccgaggatatcttgaagatcctttcagactttataagccgtatctcaaacctttctcccattcccgttgcctctaatgctcattcacccgctcgctctatcttactggagcgcgatgcagcagtatgtgccttcgaatccgcgcgccttgtgctcttcggctctcggctcccaatctcaacatgtactcttggagttgcactgcaaaaagcacgttctatttccctatatctaataactactttctttccatactccgcaagcaccaagcccctacgcaccgatctcgaacacctgatccaatcgtactctattcgtctcgcgactcagccgactacacgaggactaagcgaaggactatctgagcccgccgttcccagagcagcgtccaaggtctcacagtacgccagttcgcgacaacggctcagcgtccaaagtttgctcttgcaaagtgatttcgcagatgatagccaagagattgcagcaggtggtcccgagcccacgtcagcaaggacaccatccacggctattcctgctagaaagggagccggacaaactcagagagatgggcgcgattcgtccgctagcagtgcgacaatgccagactacgtcaacggaaatagtgccacaagccaagcacataatgctacttcttctgcaacatcgacacaccctgcgactattgatgctgggcaggaggatgcagggctaatatttaacccgtggatgggttttacgggaagcgaggatgtctacgggatgggactgcctgggcgtctagataatgactattga

SEQ ID NO: 206 - protein, 799 aa, Muscodor strobelii
  misc_feature: SGI Peptide ID NO. 559629
  misc_feature (144)..(182): Pfam Id: PF00172 Pfam Desc: Fungal Zn(2)-Cys(6) binuclear cluster domain
  misc_feature (90)..(128): Pfam Id: PF00172 Pfam Desc: Fungal Zn(2)-Cys(6) binuclear cluster domain
  misc_feature (299)..(391): Pfam Id: PF04082 Pfam Desc: Fungal specific transcription factor domain
  misc_feature (299)..(371): Pfam Id: PF04082 Pfam Desc: Fungal specific transcription factor domain
  misc_feature (153)..(710): NCBI GI: 256731150 Blast Desc: NECHADRAFT_49581 [Nectria haematococca mpVI 77-13-4]
  misc_feature (89)..(786): NCBI GI: 242790016 Blast Desc: conserved [Talaromyces stipitatus ATCC 10500] gi|218718068|gb|EED17488.1| conserved [Talaromyces stipitatus ATCC 10500]
  misc_feature (227)..(694): NCBI GI: 46123097 Blast Desc: FG05926.1 [Gibberella zeae PH-1]
  misc_feature (84)..(694): NCBI GI: 255931035 Blast Desc: Pc12g01790 [Penicillium chrysogenum Wisconsin 54-1255] gi|211581693|emb|CAP79806.1| Pc12g01790 [Penicillium chrysogenum Wisconsin 54-1255]
  misc_feature (220)..(691): NCBI GI: 256720235 Blast Desc: NECHADRAFT_56257 [Nectria haematococca mpVI 77-13-4]
  misc_feature (72)..(714): NCBI GI: 46123095 Blast Desc: FG05925.1 [Gibberella zeae PH-1]
  misc_feature (227)..(793): NCBI GI: 261355873 Blast Desc: conserved [Verticillium albo-atrum VaMs.102]
  misc_feature (68)..(635): NCBI GI: 256731152 Blast Desc: [Nectria haematococca mpVI 77-13-4]
  misc_feature (78)..(635): NCBI GI: 171676370 Blast Desc: protein product [Podospora anserina] gi|170936251|emb|CAP60910.1| protein product [Podospora anserina]
  misc_feature (84)..(681): NCBI GI: 116200486 Blast Desc: CHGG_10788 [Chaetomium globosum CBS 148.51] gi|88175502|gb|EAQ82970.1| CHGG_10788 [Chaetomium globosum CBS 148.51]
MYLLIRTSGRIFPQKRLYFEDDHNTPTRGNGSQESMTDSGLRPLRPSQVSGGAKDEDERTNSSDGARQTPPAASGPILSSQPLLSQKKRATCSQCRIRKVRCDGREGLCRNCDRLGFECSFQQSPGRTPGNYALKLPERRRRMQACVQCHLKKTRCHGELPSCSSCVRKGLDCNYPPATRRNGTPGPGSATGHSSSRVDPPSPDQDVGMAEADEASLLDDQTAMGQIEDYFAHLHPLPSFAFLHRPTVVRRCKDGTINEPLKLAICAITSLHLERTALCHDLWVQQAEQLILQQIGQPSIFHLQALLLIVRYRIESGEFPTAFMLAALAARTAVALRLNYERSELTFVAQEARRRLYWALYLLDDYFCVGLREFELCPEETIYLQLPCREDIFEAGQQCQTGILRPSPADNVSAMGLPGIFMRLTSARRAIMRFNRRVGLGEESSSTISARIQQIEHDLSALYSAISPQNQYSVANLALCKFQAQFVMLHMSYHQCHCDLYRMFLNGYSEAAPNTLLSLIPPQDRISMQTKCLEHAEDILKILSDFISRISNLSPIPVASNAHSPARSILLERDAAVCAFESARLVLFGSRLPISTCTLGVALQKARSISLYLITTFFPYSASTKPLRTDLEHLIQSYSIRLATQPTTRGLSEGLSEPAVPRAASKVSQYASSRQRLSVQSLLLQSDFADDSQEIAAGGPEPTSARTPSTAIPARKGAGQTQRDGRDSSASSATMPDYVNGNSATSQAHNATSSATSTHPATIDAGQEDAGLIFNPWMGFTGSEDVYGMGLPGRLDNDY

SEQ ID NO: 207 - DNA, 3117 bp, Muscodor strobelii
  misc_feature: SGI EST ID NO. CUFF.510.0
  misc_feature: Variant of the nucleotide sequence at SEQ ID NO 205
tgacactgagccatcgcctcggatccgggttcttttcttttaaatatggcaatgagagagcaaaatctaagtacaacctctcacagactaagagcactaccccagacctttccccatctcgcttccagatctttcagcggcctccccgctcctgttcgcaggtattctccgtaggtcgcgtggtattcccagcgggcgatttgagaagaatgtccaaccacgctaggggtggagtagatgcgcgcagggttgcgatggcaatcggtcaggtcgaagtgtcattggcgatacatcctggttctgttggggtgggccaagaatccaagctggcgtgcaaaccaacggcctagatcgagctaggttcgaattatctacacaaatgacgacagccgaagggacatcaaatcctcaaattcaacattgacatgtatctcctgatacgaacatctggtcgaatgtatcttcgccaattgggattgatcagtgaacgtgagagaggagagcttgagattcgaaggactctccgtcccggctaaacgggaaaacagcttccctcagaagcgtctctattttgaagacgatcacaacacaccgacccgtggtaatgggtcgcaggaatcaatgactgatagcggacttcgacctctacgtccctcgcaggtctctggcggtgccaaggacgaagacgaacgcacaaacagcagcgacggagcaagacaaacgccaccagccgcgtccggacccattttgagctcgcagcctttgctttcccagaagaaacgtgccacctgctcgcaatgcagaatacgcaaggtacgatgtgacggtagagaaggcctttgtcgaaactgtgatcgtcttggcttcgagtgttctttccagcaatcaccaggcaggacacctggcaactatgctctaaagctccccgagcgcaggagacgtatgcaagcatgcgtccagtgccatctgaagaaaacgcgatgtcacggggagctaccgagttgttctagctgtgtccgcaagggcctagactgcaactacccgccggcgacgaggagaaacggcacccccggaccggggtcggccaccggacatagctctagtcgggttgacccaccgtcgccagatcaagatgtcggtatggctgaggctgacgaagcaagccttttggatgatcagacggcaatgggacagatagaagattattttgcccatttgcatcctttgccttccttcgcattccttcataggccgacagtcgtccgtcgatgcaaagacggtaccatcaacgaacccctaaagctcgctatctgtgcgatcacttctttgcatctggagcgtactgctctttgccacgacctctgggtacaacaagctgagcaacttattctacaacagatcggccagccgtcaatattccatttgcaagctctactactcatcgttcgctatcggatcgagagtggtgagtttcccacggcttttatgctcgcagcgcttgcggctcggacggcagttgcgctacgtctcaactacgagcgatccgagctgacgttcgttgcacaggaagcacggcgtcgtctatattgggcattgtatcttcttgacgattacttctgcgtggggttacgagaatttgaactctgccctgaagagactatatatctccaattaccatgtcgcgaagatatctttgaggcaggacagcaatgccaaactgggatacttcgccctagtcctgcggataatgtgtcagctatgggacttcctggcatattcatgcgtcttacatctgcaagacgcgcaataatgcggtttaacagacgagtgggtctcggcgaagaatcatcctcgacgataagtgctcgtatacaacaaatagagcatgatctttctgccctctactcagcgatcagcccgcaaaaccagtactcagtcgcaaatcttgcattatgtaaattccaggcacagttcgttatgctccatatgtcctatcaccaatgccattgcgatctttatcgaatgttcctgaacggttacagcgaggcggctccaaacacccttctgtcactaatacctcctcaagaccgcatatctatgcagacaaaatgtctagagcacgccgaggatatcttgaagatcctttcagactttataagccgtatctcaaacctttctcccattcccgttgcctctaatgctcattcacccgctcgctctatcttactggagcgcgatgcagcagtatgtgccttcgaatccgcgcgccttgtgctcttcggctctcggctcccaatctcaacatgtactcttggagttgcactgcaaaaagcacgttctatttccctatatctaataactactttctttccatactccgcaagcaccaagcccctacgcaccgatctcgaacacctgatccaatcgtactctattcgtctcgcgactcagccgactacacgaggactaagcgaaggactatctgagcccgccgttcccagagcagcgtccaaggtctcacagtacgccagttcgcgacaacggctcagcgtccaaagtttgctcttgcaaagtgatttcgcagatgatagccaagagattgcagcaggtggtcccgagcccacgtcagcaaggacaccatccacggctattcctgctagaaagggagccggacaaactcagagagatgggcgcgattcgtccgctagcagtgcgacaatgccagactacgtcaacggaaatagtgccacaagccaagcacataatgctacttcttctgcaacatcgacacaccctgcgactattgatgctgggcaggaggatgcagggctaatatttaacccgtggatgggttttacgggaagcgaggatgtctacgggatgggactgcctgggcgtctagataatgactattgatgaaataattcgacctcgctctgtttgagcccagcataggctactttgcacgtaattaacgctttttgatgtttatcttcttcaggcggtaaaagctacacatacaaaggcaaggagagctcttacgacgtttgcccaccgcaataccgcgagaacctgtaaaaaactgagccaaatatttgaagagattagttattcgct

SEQ ID NO: 208 - DNA, 852 bp, Muscodor strobelii
  misc_feature: SGI cDNA ID NO. 559630
  misc_feature: Elevated expression when VOC is produced
  misc_feature: Encodes the peptide sequence at SEQ ID NO 209
atgtcacgctcgcccgcattgtggctttcaggcggcgaaagcaagtatctacatgtcgtcctcgccctcgcgcctgttctcatacccgcagcctacgtagcatacactctacatagaagcgcacgtcgcacgacggcatctacaagtatctcaccaccggactcactatccaacgagaaaacagaggcatttcttcggcttacgcgggcatctgaaaaggaatcggatttcgtttcgaaacacgatacatcagccatcccgcgcactatcctcgcgaataaggatcagtacgtcatttcacgcgagcgcatcgtgtcggagccggtatcaatcacctcgtttcccttcgggctccagcctagcaaggagcaacatggcgagaatggggagaggaacagacgactcttagaagcatatctcagtactacgatgcaaacattcacatggaccccacaagcctatatcatgaaatcaatggtttctcgacttactcaaggcacggaatatgcggctaccttttcagtgccatatctcacttcgtgtcgtttcgaacagcaagacagagtttgcggtgtttacgtggtccgggaacgagtcagtccagggagagtgcttctcgacctgagtccccctccaggctggagaggacccgtcgtggctggagtgctcgattgtggatttattgttgaagaggaacaaatgtccatacgatttgtgaatgagacggtcatgtggaggcggaaagatcaaacacccacgatgctcgaaggttcaattgggagatggtttcacgggttgatggttaaatggatggtggtacgaggcgttgaatctgtgaaacagagagtctga

SEQ ID NO: 209 - protein, 283 aa, Muscodor strobelii
  misc_feature: SGI Peptide ID NO. 559630
  misc_feature (14)..(282): NCBI GI: 116198699 Blast Desc: CHGG_07505 [Chaetomium globosum CBS 148.51] gi|88178784|gb|EAQ86252.1| CHGG_07505 [Chaetomium globosum CBS 148.51]
  misc_feature (97)..(279): NCBI GI: 240277931 Blast Desc: conserved [Ajellomyces capsulatus H143]
  misc_feature (97)..(279): NCBI GI: 225561219 Blast Desc: conserved [Ajellomyces capsulatus G186AR]
  misc_feature (139)..(279): NCBI GI: 154274508 Blast Desc: [Ajellomyces capsulatus NAm1] gi|150414545|gb|EDN09907.1| [Ajellomyces capsulatus NAm1]
  misc_feature (86)..(279): NCBI GI: 119484988 Blast Desc: NFIA_098690 [Neosartorya fischeri NRRL 181] gi|119410292|gb|EAW20239.1| conserved [Neosartorya fischeri NRRL 181]
  misc_feature (135)..(277): NCBI GI: 70983737 Blast Desc: conserved [Aspergillus fumigatus Af293] gi|66845021|gb|EAL85357.1| conserved [Aspergillus fumigatus Af293]
  misc_feature (135)..(277): NCBI GI: 159123600 Blast Desc: conserved [Aspergillus fumigatus A1163]
  misc_feature (75)..(276): NCBI GI: 121719996 Blast Desc: conserved [Aspergillus clavatus NRRL 1] gi|119404908|gb|EAW15270.1| conserved [Aspergillus clavatus NRRL 1]
  misc_feature (134)..(276): NCBI GI: 259486827 Blast Desc: TPA: conserved [Aspergillus nidulans FGSC A4]
  misc_feature (134)..(276): NCBI GI: 67522094 Blast Desc: AN1504.2 [Aspergillus nidulans FGSC A4] gi|40744661|gb|EAA63817.1| AN1504.2 [Aspergillus nidulans FGSC A4]
  misc_feature: Useful for introducing or modulating the production of volatile compounds
MSRSPALWLSGGESKYLHVVLALAPVLIPAAYVAYTLHRSARRTTASTSISPPDSLSNEKTEAFLRLTRASEKESDFVSKHDTSAIPRTILANKDQYVISRERIVSEPVSITSFPFGLQPSKEQHGENGERNRRLLEAYLSTTMQTFTWTPQAYIMKSMVSRLTQGTEYAATFSVPYLTSCRFEQQDRVCGVYVVRERVSPGRVLLDLSPPPGWRGPVVAGVLDCGFIVEEEQMSIRFVNETVMWRRKDQTPTMLEGSIGRWFHGLMVKWMVVRGVESVKQRV

SEQ ID NO: 210 - DNA, 1291 bp, Muscodor strobelii
  misc_feature: SGI EST ID NO. CUFF.513.0
  misc_feature: Variant of the nucleotide sequence at SEQ ID NO 208
caaaaatgcagaaacaaatgtgtgaaagattgcaacaccatttatcttccaatttatttcacaattgattcgccatgtcacgctcgcccgcattgtggctttcaggcggcgaaagcaagtatctacatgtcgtcctcgccctcgcgcctgttctcatacccgcagcctacgtagcatacactctacatagaagcgcacgtcgcacgacggcatctacaagtatctcaccaccggactcactatccaacgagaaaacagaggcatttcttcggcttacgcgggcatctgaaaaggaatcggatttcgtttcgaaacacgatacatcagccatcccgcgcactatcctcgcgaataaggatcagtacgtcatttcacgcgagcgcatcgtgtcggagccggtatcaatcacctcgtttcccttcgggctccagcctagcaaggagcaacatggcgagaatggggagaggaacagacgactcttagaagcatatctcagtactacgatgcaaacattcacatggaccccacaagcctatatcatgaaatcaatggtttctcgacttactcaaggcacggaatatgcggctaccttttcagtgccatatctcacttcgtgtcgtttcgaacagcaagacagagtttgcggtgtttacgtggtccgggaacgagtcagtccagggagagtgcttctcgacctgagtccccctccaggctggagaggacccgtcgtggctggagtgctcgattgtggatttattgttgaagaggaacaaatgtccatacgatttgtgaatgagacggtcatgtggaggcggaaagatcaaacacccacgatgctcgaaggttcaattgggagatggtttcacgggttgatggttaaatggatggtggtacgaggcgttgaatctgtgaaacagagagtctgattcaatccaggtcctttggcatttcaagacctatctcaaaaagctaagatagccgatgcatttgatatttcagcgctcacgccatctcccctctattatctatttagacatcgagacatcgaccaattcagtgtctttcgaacaaggcatatgccgattcgattgattttcacggctctcaatgactgattgaagaacaaaaaagtaactgctcaatagcacttgcgtaaactagaagcaaaagtaattctatgctcggaatgtttagaaaaatagattggacaaacggggaattgaaccccggacctttcccatacgatgtagattcttaggaatcaatgcgaagggaaaatcatacccctaga

SEQ ID NO: 211 - DNA, 2847 bp, Muscodor strobelii
  misc_feature: SGI cDNA ID NO. 559631
  misc_feature: Encodes the peptide sequence at SEQ ID NO 212
atggcctcagacagtggtccgcagctgacagctgtgtggttttttagcttctttcctttggctatcatactctttgcaacgacattcgctgataaaccagccccgactctcgtctttctttttgctcctgataacgggtgcctcagcgtttctcgccagtttcttctcaaaatggcttccaggtgccgatggacggtttggtataattcggatgccgtccttaaatcatctccgtcctccctgccgccacgaccgcgtcgtttttacgtcccgtgtattgttgttctcattgtacttcgtcttgaaattgtgcataacgtattgtacgattttcagtgctcagccttgggtgtcgaggcttttctaccgctcctcttcgcagcttatagatttatctcctatcgtgcaccgtccgtagagattgacgaggatgacccatggggcaaccctctcgacgatctcaagaattggcttttggggtcacctctcatgctactccttagcaccggtttcctcagttatggtgcctactcagccgctaatctgaccacaaggtctacttacttctgcgctccttttatcgatgaaggcccatctgtagctttctttcaatgggttggcttattcatggacgccgccatcattatacttgcatggagagttctgtcatgggcacgaactactaagggtaggctacgaacgctcggcggtatcatgtcgagtacagcagtcgcatcttgcattccattatttgtcagtcgtttatatcagcagcaaagcatcgtcagctaccaagcatttcgaggcatagggtcactctacattttcgatactttgagtactggcatcctggtggccatatttgttatatcgtcagctttgatgatatgcaacccatcaccgctcgagccggccgctatcgctactttcgtttccgcacttcttgcgagtctaggcaacgtaggcctcgtcggtacctatcaacaaacctctacagctcggccgttaattgttcaaacaatcattagcgtggcattttccgtctttgtctatactggcgatatgcgttatgtcgcattcatccggcgcgtggttgtactactattactcatcacgacattgggcatttctatccccgtcgcgctccacaaatcaacagcttggaagcgtcatccggtggatgaacttgtctacaataaccgggtagaagcagatcgttggctgcggcatgccacagttagcacgactctcaagcttgctgtcgccgaatataaagatagacaccatgggcgagaccctcctcctaaatttgacacatggtttggctttgcgctggagaggaagtcagtcgttatcgacagatttgatcagattgaacgagacatactaccgttctggggtctcaaaccggaacaaattcgagagcgaatggaaatcatcaagggtcaacccaatgtaggcatcatttacattaatgacggtcgagctgctcatagcaggacaacaaatgacgagcaccaagaaatcctagacgacattgtggcgctcatctcaccgttcgtagagcacttgccctccatgatgatacctattaatctacaagagcgacctagggttctggttccgtggcatgatgtgcatcaactaaggctggctgccacgaagcctgggttccaaattgtgtccgggcggctggggaaacgtgcagagtccgattcttccccgcccgaaaacgtcgagaatacagcccaattggcgaaagataagcctcagccattcgtttccgccaaggcatttcgacaacttgaggctttggcgtgtcctccggggtcaccgacgcgtgctggcgtacattgggatgtccgagacttctgtggatcatgcgttgtgcctcattccaaggaacagttcctccaagactggcagatgtcactggacccctgtcatcaacccgatatcctcaatctccatgagtttcacacgacgcctcatcgattcgacttgtatcaggacttgcttccgctcttcagtgcatccaaaacgaccagcttcaatgatattctggttccttttttgcgacctggctcaaaggtgaggcaggatagaaaggactttgatcacaaggaagatagaatcatgtggggaagtgatgttgaagatatgccgcaagccacacacgagtctgtacacggaagccagcggttgcgtctagcttatatggcggagcacgcaaaagtcagcgacactatcccgatgcttctggggttcggtgctgagcagaacagtcggttccgctacgaggacacgcccattatcgaggctaacaacatcttgccctggaacatgtctctgaccaatccgtcagaagtgtgtcatgacaagaactgcgcgctgctacgggataacttccgattggaaatgccaaccccggagacggatagtcgttacgttatgctgctggacggtagcgatggtccggcacctagcatgctgagtgtgctgcattcccacagtgtcctggtggtgtcgacgatattccagcagtggtacacggagcgactgatgccatgggtgcatttcataccgatcgaccttcgtttccatggtctgcacagcacaatggcatactttttgggtctagagggccgtggtactctcaatgggcgggagcaagtaacaccgccccggacggaagatgcgaagtggattgcagagcaagggcgcaagtgggcgctgaaggcccttcgaaaagaagacatggaagtgtatatgtttagactactattagaatggggccgggttattgatgataaacgggacagcatcgggtttgcgctcaaggaatag

SEQ ID NO: 212 - protein, 948 aa, Muscodor strobelii
  misc_feature: SGI Peptide ID NO. 559631
  misc_feature (70)..(945): NCBI GI: 256730854 Blast Desc: NECHADRAFT_89837 [Nectria haematococca mpVI 77-13-4]
  misc_feature (97)..(948): NCBI GI: 85111268 Blast Desc: NCU02119 [Neurospora crassa OR74A] gi|28925598|gb|EAA34620.1| [Neurospora crassa OR74A]
  misc_feature (71)..(943): NCBI GI: 46109060 Blast Desc: FG01412.1 [Gibberella zeae PH-1]
  misc_feature (152)..(946): NCBI GI: 171695028 Blast Desc: protein product [Podospora anserina] gi|170947756|emb|CAP59919.1| protein product [Podospora anserina]
  misc_feature (75)..(793): NCBI GI: 261358630 Blast Desc: conserved [Verticillium albo-atrum VaMs.102]
  misc_feature (94)..(945): NCBI GI: 238843445 Blast Desc: conserved [Microsporum canis CBS 113480]
  misc_feature (391)..(947): NCBI GI: 258565961 Blast Desc: conserved [Uncinocarpus reesii 1704] gi|237907426|gb|EEP81827.1| conserved [Uncinocarpus reesii 1704]
  misc_feature (90)..(946): NCBI GI: 121702737 Blast Desc: conserved [Aspergillus clavatus NRRL 1] gi|119397776|gb|EAW08207.1| conserved [Aspergillus clavatus NRRL 1]
  misc_feature (69)..(946): NCBI GI: 145229153 Blast Desc: An01g04570 [Aspergillus niger] gi|134054985|emb|CAK36993.1| protein product [Aspergillus niger]
  misc_feature (94)..(944): NCBI GI: 261188438 Blast Desc: capsular associated protein [Ajellomyces dermatitidis SLH14081] gi|239593234|gb|EEQ75815.1| capsular associated protein [Ajellomyces dermatitidis SLH14081]
MASDSGPQLTAVWFFSFFPLAIILFATTFADKPAPTLVFLFAPDNGCLSVSRQFLLKMASRCRWTVWYNSDAVLKSSPSSLPPRPRRFYVPCIVVLIVLRLEIVHNVLYDFQCSALGVEAFLPLLFAAYRFISYRAPSVEIDEDDPWGNPLDDLKNWLLGSPLMLLLSTGFLSYGAYSAANLTTRSTYFCAPFIDEGPSVAFFQWVGLFMDAAIIILAWRVLSWARTTKGRLRTLGGIMSSTAVASCIPLFVSRLYQQQSIVSYQAFRGIGSLYIFDTLSTGILVAIFVISSALMICNPSPLEPAAIATFVSALLASLGNVGLVGTYQQTSTARPLIVQTIISVAFSVFVYTGDMRYVAFIRRVVVLLLLITTLGISIPVALHKSTAWKRHPVDELVYNNRVEADRWLRHATVSTTLKLAVAEYKDRHHGRDPPPKFDTWFGFALERKSVVIDRFDQIERDILPFWGLKPEQIRERMEIIKGQPNVGIIYINDGRAAHSRTTNDEHQEILDDIVALISPFVEHLPSMMIPINLQERPRVLVPWHDVHQLRLAATKPGFQIVSGRLGKRAESDSSPPENVENTAQLAKDKPQPFVSAKAFRQLEALACPPGSPTRAGVHWDVRDFCGSCVVPHSKEQFLQDWQMSLDPCHQPDILNLHEFHTTPHRFDLYQDLLPLFSASKTTSFNDILVPFLRPGSKVRQDRKDFDHKEDRIMWGSDVEDMPQATHESVHGSQRLRLAYMAEHAKVSDTIPMLLGFGAEQNSRFRYEDTPIIEANNILPWNMSLTNPSEVCHDKNCALLRDNFRLEMPTPETDSRYVMLLDGSDGPAPSMLSVLHSHSVLVVSTIFQQWYTERLMPWVHFIPIDLRFHGLHSTMAYFLGLEGRGTLNGREQVTPPRTEDAKWIAEQGRKWALKALRKEDMEVYMFRLLLEWGRVIDDKRDSIGFALKE

SEQ ID NO: 213 - DNA, 2916 bp, Muscodor strobelii
  misc_feature: SGI EST ID NO. CUFF.546.1
  misc_feature: Variant of the nucleotide sequence at SEQ ID NO 211
gttttttagcttctttcctttggctatcatactctttgcaacgacattcgctgataaaccagccccgactctcgtctttctttttgctcctgataacgggtgcctcagcgtttctcgccagtttcttctcaaaatggcttccaggtgccgatggacggtttgattcggatgccgtccttaaatcatctccgtcctccctgccgccacgaccgcgtcgtttttacgtcccgtgtattgttgttctcattgtacttcgtcttgaaattgtgcataacgtattgtacgattttcagtgctcagccttgggtgtcgaggcttttctaccgctcctcttcgcagcttatagatttatctcctatcgtgcaccgtccgtagagattgacgaggatgacccatggggcaaccctctcgacgatctcaagaattggcttttggggtcacctctcatgctactccttagcaccggtttcctcagttatggtgcctactcagccgctaatctgaccacaaggtctacttacttctgcgctccttttatcgatgaaggcccatctgtagctttctttcaatgggttggcttattcatggacgccgccatcattatacttgcatggagagttctgtcatgggcacgaactactaagggtaggctacgaacgctcggcggtatcatgtcgagtacagcagtcgcatcttgcattccattatttgtcagtcgtttatatcagcagcaaagcatcgtcagctaccaagcatttcgaggcatagggtcactctacattttcgatactttgagtactggcatcctggtggccatatttgttatatcgtcagctttgatgatatgcaacccatcaccgctcgagccggccgctatcgctactttcgtttccgcacttcttgcgagtctaggcaacgtaggcctcgtcggtacctatcaacaaacctctacagctcggccgttaattgttcaaacaatcattagcgtggcattttccgtctttgtctatactggcgatatgcgttatgtcgcattcatccggcgcgtggttgtactactattactcatcacgacattgggcatttctatccccgtcgcgctccacaaatcaacagcttggaagcgtcatccggtggatgaacttgtctacaataaccgggtagaagcagatcgttggctgcggcatgccacagttagcacgactctcaagcttgctgtcgccgaatataaagatagacaccatgggcgagaccctcctcctaaatttgacacatggtttggctttgcgctggagaggaagtcagtcgttatcgacagatttgatcagattgaacgagacatactaccgttctggggtctcaaaccggaacaaattcgagagcgaatggaaatcatcaagggtcaacccaatgtaggcatcatttacattaatgacggtcgagctgctcatagcaggacaacaaatgacgagcaccaagaaatcctagacgacattgtggcgctcatctcaccgttcgtagagcacttgccctccatgatgatacctattaatctacaagagcgacctagggttctggttccgtggcatgatgtgcatcaactaaggctggctgccacgaagcctgggttccaaattgtgtccgggcggctggggaaacgtgcagagtccgattcttccccgcccgaaaacgtcgagaatacagcccaattggcgaaagataagcctcagccattcgtttccgccaaggcatttcgacaacttgaggctttggcgtgtcctccggggtcaccgacgcgtgctggcgtacattgggatgtccgagacttctgtggatcatgcgttgtgcctcattccaaggaacagttcctccaagactggcagatgtcactggacccctgtcatcaacccgatatcctcaatctccatgagtttcacacgacgcctcatcgattcgacttgtatcaggacttgcttccgctcttcagtgcatccaaaacgaccagcttcaatgatattctggttccttttttgcgacctggctcaaaggtgaggcaggatagaaaggactttgatcacaaggaagatagaatcatgtggggaagtgatgttgaagatatgccgcaagccacacacgagtctgtacacggaagccagcggttgcgtctagcttatatggcggagcacgcaaaagtcagcgacactatcccgatgcttctggggttcggtgctgagcagaacagtcggttccgctacgaggacacgcccattatcgaggctaacaacatcttgccctggaacatgtctctgaccaatccgtcagaagtgtgtcatgacaagaactgcgcgctgctacgggataacttccgattggaaatgccaaccccggagacggatagtcgttacgttatgctgctggacggtagcgatggtccggcacctagcatgctgagtgtgctgcattcccacagtgtcctggtggtgtcgacgatattccagcagtggtacacggagcgactgatgccatgggtgcatttcataccgatcgaccttcgtttccatggtctgcacagcacaatggcatactttttgggtctagagggccgtggtactctcaatgggcgggagcaagtaacaccgccccggacggaagatgcgaagtggattgcagagcaagggcgcaagtgggcgctgaaggcccttcgaaaagaagacatggaagtgtatatgtttagactactattagaatggggccgggttattgatgataaacgggacagcatcgggtttgcgctcaaggaatagcatgcctcaacagggaggtctgtgttcgggttattgtgtatacaattcatgtttgttgtagataggtattgtaggagtaaaaggaatgttggaactgcagcaaacatgtctc

SEQ ID NO: 214 - DNA, 1515 bp, Muscodor strobelii
  misc_feature: SGI cDNA ID NO. 559632
  misc_feature: Encodes the peptide sequence at SEQ ID NO 215
atggccgaagagtccaaaccgtcgaatcgcaagggcaaggagaaggagaaggcggctaagaagctacacaaggccatcgacggcctctcggacgagcaggtcacgcagctgctcgacctcaacccggcgctggcctcagagctggccaacgcgtccgacgacagccccgacgccgccgccgaggccctgcgcaggctcaacctgcaggacatcatgaccggcctggcctcgagcggcaagaacgtcaaggacatgggcgcctacaagttctgggccacccagcccgtgcccaagttcggcgaggagccgtccgacaagccgcacgacgagggccccatcaagctgcagaccgtcgacgagatccccaaggaccccccgcccatgctcgacggcttcgagtgggccaccctcgacctgctcgacgaggcccagctgaaggaggtctgggagctgctcaacggccactacgtcgaggacgacgaggccatgttccgcttcaactactcgtccagcatcctcaagtgggccatgatgccgcccggctggaagaagcagtggcaccgcggtgtacgagcaaccgcttccaagaggctcgtcgccttcatcgccgccatccccgtcgagctccgcgtccgagacaagaccatcaaggcctccgaggtcaacttcctctgcatacacaagaagctgcgctccaagcgcctcgcccccgtgctcatcaaagagatcacccgcctttgcaacttagagggggtcttccaggccatctacaccggtggcatcgtcctccccaagcccgtcagcacctgtcgctactatcaccgtgccatcaactggcagaagctatatgacgtcggcttcagccccttgccgcccaacagcaagcccgccttccagatcagaaaatacgccgtcaacgacaataccaagatcaggggcatcagggagatgcagaagaaagatgtcccagccgtcctagagctgctcacccggtacctcacgaaatacgatctagccgccacattcgataagcacgaggtggaacactggttgttacacgacaagaaggccactgcggccgaagagcaagttgtgtggacatatgtggttgaggatgagcacaagaagatcactgacttcgtctccttttactgtcttgaatcatccgtcatcaatcattccaagcactcgaatgtgagagcggcctatttgttctattatgcaagcgagacgggcctttccacaccagtcgacaaggatgctctcaaggtgcggctcaatgctctcgtctccgacgctctagtctactgcaagcaatataagtttgatgtatgcaacgctctatccctgatggacaacggcctgtttctcgaggaccagaaattcggccccggtgacggccagctacactactaccttttcaattaccgagcgaaccccatagctggtggtgtggataagagaaaccgattagatacggacaacttgagcggcatcgggaaaactcaaatttga

SEQ ID NO: 215 - protein, 504 aa, Muscodor strobelii
  misc_feature: SGI Peptide ID NO. 559632
  misc_feature (110)..(270): Pfam Id: PF01233 Pfam Desc: Myristoyl-CoA:protein N-myristoyltransferase, N-terminal domain
  misc_feature (284)..(503): Pfam Id: PF02799 Pfam Desc: Myristoyl-CoA:protein N-myristoyltransferase, C-terminal domain
  misc_feature (284)..(500): Pfam Id: PF02799 Pfam Desc: Myristoyl-CoA:protein N-myristoyltransferase, C-terminal domain
  misc_feature (22)..(500): NCBI GI: 46135763 Blast Desc: FG09397.1 [Gibberella zeae PH-1] gi|85541755|sp|Q4I061.1|NMT_GIBZE RecName: Full=Glycylpeptide N-tetradecanoyltransferase; AltName: Full=Peptide AltName:
  misc_feature (25)..(500): NCBI GI: 85092191 Blast Desc: glycylpeptide N-tetradecanoyltransferase [Neurospora crassa OR74A] gi|28920675|gb|EAA30036.1| glycylpeptide N-tetradecanoyltransferase [Neurospora crassa OR74A]
  misc_feature (9)..(500): NCBI GI: 116203861 Blast Desc: CHGG_09814 [Chaetomium globosum CBS 148.51] gi|88175942|gb|EAQ83410.1| CHGG_09814 [Chaetomium globosum CBS 148.51]
  misc_feature (20)..(500): NCBI GI: 261355394 Blast Desc: glycylpeptide N-tetradecanoyltransferase [Verticillium albo-atrum VaMs.102]
  misc_feature (8)..(500): NCBI GI: 156056619 Blast Desc: SS1G_04040 [Sclerotinia sclerotiorum 1980] gi|154701826|gb|EDO01565.1| SS1G_04040 [Sclerotinia sclerotiorum 1980]
  misc_feature (24)..(500): NCBI GI: 39971827 Blast Desc: MGG_07229 [Magnaporthe grisea 70-15] gi|145019725|gb|EDK03953.1| MGG_07229 [Magnaporthe grisea 70-15]
  misc_feature (8)..(500): NCBI GI: 154296198 Blast Desc: BC1G_12926 [Botryotinia fuckeliana B05.10] gi|150843490|gb|EDN18683.1| BC1G_12926 [Botryotinia fuckeliana B05.10]
  misc_feature (24)..(500): NCBI GI: 171681531 Blast Desc: protein product [Podospora anserina] gi|170940724|emb|CAP65952.1| protein product [Podospora anserina]
  misc_feature (5)..(500): NCBI GI: 145257115 Blast Desc: An04g02500 [Aspergillus niger] gi|134058528|emb|CAL00737.1| protein product [Aspergillus niger]
  misc_feature (4)..(500): NCBI GI: 121706997 Blast Desc: peptide N-myristoyl transferase (Nmt1) [Aspergillus clavatus NRRL 1] gi|119399848|gb|EAW10274.1| peptide N-myristoyl transferase (Nmt1) [Aspergillus clavatus NRRL 1]
  misc_feature (26)..(500): SWISSPROT Homolog: EC 2.3.1.97 Glycylpeptide N-tetradecanoyltransferase
MAEESKPSNRKGKEKEKAAKKLHKAIDGLSDEQVTQLLDLNPALASELANASDDSPDAAAEALRRLNLQDIMTGLASSGKNVKDMGAYKFWATQPVPKFGEEPSDKPHDEGPIKLQTVDEIPKDPPPMLDGFEWATLDLLDEAQLKEVWELLNGHYVEDDEAMFRFNYSSSILKWAMMPPGWKKQWHRGVRATASKRLVAFIAAIPVELRVRDKTIKASEVNFLCIHKKLRSKRLAPVLIKEITRLCNLEGVFQAIYTGGIVLPKPVSTCRYYHRAINWQKLYDVGFSPLPPNSKPAFQIRKYAVNDNTKIRGIREMQKKDVPAVLELLTRYLTKYDLAATFDKHEVEHWLLHDKKATAAEEQVVWTYVVEDEHKKITDFVSFYCLESSVINHSKHSNVRAAYLFYYASETGLSTPVDKDALKVRLNALVSDALVYCKQYKFDVCNALSLMDNGLFLEDQKFGPGDGQLHYYLFNYRANPIAGGVDKRNRLDTDNLSGIGKTQI

SEQ ID NO: 216 - DNA, 2337 bp, Muscodor strobelii
  misc_feature: SGI EST ID NO. CUFF.522.0
  misc_feature: Variant of the nucleotide sequence at SEQ ID NO 214
gccagttgcaggcagctctatcagcgcccgccatagtgacacatgtcttcctatcgatccatacctaggagcatccccatcagcgacctcgttcgctctcacacacacgttagtatcacgttgaatatctacaatcagacctagaaactgcagagccgtacgacttgacctcgcccacaccttgcgaccttgccgcctcctctgccccgccgccgccgtcccgccgtcctcagcaagagctgctgccgccatggccgaagagtccaaaccgtcgaatcgcaagggcaaggagaaggagaaggcggctaagaagctacacaaggccatcgacggcctctcggacgagcaggtcacgcagctgctcgacctcaacccggcgctggcctcagagctggccaacgcgtccgacgacagccccgacgccgccgccgaggccctgcgcaggctcaacctgcaggacatcatgaccggcctggcctcgagcggcaagaacgtcaaggacatgggcgcctacaagttctgggccacccagcccgtgcccaagttcggcgaggagccgtccgacaagccgcacgacgagggccccatcaagctgcagaccgtcgacgagatccccaaggaccccccgcccatgctcgacggcttcgagtgggccaccctcgacctgctcgacgaggcccagctgaaggaggtctgggagctgctcaacggccactacgtcgaggacgacgaggccatgttccgcttcaactactcgtccagcatcctcaagtgggccatgatgccgcccggctggaagaagcagtggcaccgcggtgtacgagcaaccgcttccaagaggctcgtcgccttcatcgccgccatccccgtcgagctccgcgtccgagacaagaccatcaaggcctccgaggtcaacttcctctgcatacacaagaagctgcgctccaagcgcctcgcccccgtgctcatcaaagagatcacccgcctttgcaacttagagggggtcttccaggccatctacaccggtggcatcgtcctccccaagcccgtcagcacctgtcgctactatcaccgtgccatcaactggcagaagctatatgacgtcggcttcagccccttgccgcccaacagcaagcccgccttccagatcagaaaatacgccgtcaacgacaataccaagatcaggggcatcagggagatgcagaagaaagatgtcccagccgtcctagagctgctcacccggtacctcacgaaatacgatctagccgccacattcgataagcacgaggtggaacactggttgttacacgacaagaaggccactgcggccgaagagcaagttgtgtggacatatgtggttgaggatgagcacaagaagatcactgacttcgtctccttttactgtcttgaatcatccgtcatcaatcattccaagcactcgaatgtgagagcggcctatttgttctattatgcaagcgagacgggcctttccacaccagtcgacaaggatgctctcaaggtgcggctcaatgctctcgtctccgacgctctagtctactgcaagcaatataagtttgatgtatgcaacgctctatccctgatggacaacggcctgtttctcgaggaccagaaattcggccccggtgacggccagctacactactaccttttcaattaccgagcgaaccccatagctggtggtgtggataagagaaaccgattagatacggacaacttgagcggcatcgggaaaactcaaatttgatctgctgcagcttggcggcatggcaggcgctgtccatccccgcaaccccgtttacatccgttgataaagcaggctcggcaggagcccttgtgcttaccttgtacaggcagagaggcaagggcaaccaactaatcaagggagctccggatgcacttactcttgcttcttgtcgctccgtagagaatgctggtggatactagagccactaacttctatttactgggagacgggctcatgcacgttggcggcaaggcaagcagctgatattggcttgttcgtttgcaggaacaccattctaaatagatgccacttatgggattttccataatgccatccgctctgttcggcggtgggcattccgaggcggcatgtggttccacctcgtctatcgctgggtgtaacactttggattccgccaggccaataggggcccgtatttggtccttctccgtatgcagatgcgcgaaagcccgggatccgatgcagctcatatgtcgccatctggatgcatagctagtcaatagaagcattcccattacttcatagtagagtttctatgtgtcgcgcatttt

SEQ ID NO: 217 - DNA, 1056 bp, Muscodor strobelii
  misc_feature: SGI cDNA ID NO. 559633
  misc_feature: Elevated expression when VOC is produced
  misc_feature: Encodes the peptide sequence at SEQ ID NO 218
atgcgaaggagtattaaagatatacgcaatacgacgcttggtttcgagaagatctttgtggtcaatatgccctcccgcactgatcgtcgggacagcacaattttggctgcagcgttaagtgacatggagatcgagttcgtcgatggcgttaatggtggcgcaatccctgataaggctttggcgaaaacctttgatcatcgtcgtctagatgatccgacccttggagcatggcgtggtcatattaatgctattcaagaagtggttcgaagaaatctgtcttcagctttgatcatggaagacgacggtgattgggatgtgaggatacgagatcagttacagaacttcgcactagcatcctacgccctcacgcagcctcttgtcaactcaaatggaaacaaatatgccgataccacatatccaaaatctccgatcgattctgtaatgtcagttccggatcttgacttcgcaaatcttcccgccaccatcgctccgaccacgtcgccatatggcgatgagtgggatgtgctatggctttgtcactgtggaatgcgatttccgtttgcagataaatacgtgataccgaaaggacgtgtcgcacattttgatgagaccgtccccgaacgtcgctatctttggacaatcacaaacccaaacgacttgaaggaacaatatcttgatcatataagaatcactcatcatgtccaagaaggtcgctgttccttggcatacgccgtaacgcagaattcggcccgcaagcttttatatgaggtcggcatgaaagacccaaccgatccgttcgatattatgctcagctggttctgtgaaggtgttggtagacctaaccggggataccataattgtttgacagccactccctcgccatttcagatccacttgaccgcgggacccaagagttacgccagcgatatcgcagatcacggcgacggttatcaaggggacgggaccaccttgatcagaacgagtgtcaagatgaatgccgcagccttgatagacggccgaaaggatctgccggatgcgtatccagattcgaattga

SEQ ID NO: 218 - protein, 351 aa, Muscodor strobelii
  misc_feature: SGI Peptide ID NO. 559633
  misc_feature (15)..(270): Pfam Id: PF01755 Pfam Desc: Glycosyltransferase family 25 (LPS biosynthesis protein)
  misc_feature (15)..(348): NCBI GI: 116208356 Blast Desc: CHGG_03471 [Chaetomium globosum CBS 148.51] gi|88184068|gb|EAQ91536.1| CHGG_03471 [Chaetomium globosum CBS 148.51]
  misc_feature (42)..(351): NCBI GI: 116193081 Blast Desc: CHGG_06258 [Chaetomium globosum CBS 148.51] gi|88182171|gb|EAQ89639.1| CHGG_06258 [Chaetomium globosum CBS 148.51]
  misc_feature (5)..(351): NCBI GI: 238843367 Blast Desc: conserved [Microsporum canis CBS 113480]
  misc_feature (37)..(349): NCBI GI: 212530252 Blast Desc: conserved [Penicillium marneffei ATCC 18224] gi|210074681|gb|EEA28768.1| conserved [Penicillium marneffei ATCC 18224]
  misc_feature (37)..(349): NCBI GI: 242819198 Blast Desc: conserved [Talaromyces stipitatus ATCC 10500] gi|218713733|gb|EED13157.1| conserved [Talaromyces stipitatus ATCC 10500]
  misc_feature (3)..(349): NCBI GI: 85080981 Blast Desc: NCU05138 [Neurospora crassa OR74A] gi|28881428|emb|CAD70545.1| [Neurospora crassa] gi|28917708|gb|EAA27400.1| [Neurospora crassa OR74A]
  misc_feature (3)..(351): NCBI GI: 171677827 Blast Desc: protein product [Podospora anserina] gi|170936982|emb|CAP61640.1| protein product [Podospora anserina]
  misc_feature (8)..(348): NCBI GI: 145602931 Blast Desc: MGG_13779 [Magnaporthe grisea 70-15] gi|145011279|gb|EDJ95935.1| MGG_13779 [Magnaporthe grisea 70-15]
  misc_feature (7)..(336): NCBI GI: 116201385 Blast Desc: CHGG_08577 [Chaetomium globosum CBS 148.51] gi|88177095|gb|EAQ84563.1| CHGG_08577 [Chaetomium globosum CBS 148.51]
  misc_feature (7)..(341): NCBI GI: 154290384 Blast Desc: BC1G_15746 [Botryotinia fuckeliana B05.10] gi|150847768|gb|EDN22961.1| BC1G_15746 [Botryotinia fuckeliana B05.10]
  misc_feature: Useful for introducing or modulating the production of volatile compounds
MRRSIKDIRNTTLGFEKIFVVNMPSRTDRRDSTILAAALSDMEIEFVDGVNGGAIPDKALAKTFDHRRLDDPTLGAWRGHINAIQEVVRRNLSSALIMEDDGDWDVRIRDQLQNFALASYALTQPLVNSNGNKYADTTYPKSPIDSVMSVPDLDFANLPATIAPTTSPYGDEWDVLWLCHCGMRFPFADKYVIPKGRVAHFDETVPERRYLWTITNPNDLKEQYLDHIRITHHVQEGRCSLAYAVTQNSARKLLYEVGMKDPTDPFDIMLSWFCEGVGRPNRGYHNCLTATPSPFQIHLTAGPKSYASDIADHGDGYQGDGTTLIRTSVKMNAAALIDGRKDLPDAYPDSN

SEQ ID NO: 219 - DNA, 2062 bp, Muscodor strobelii
  misc_feature: SGI EST ID NO. CUFF.532.0
  misc_feature: Variant of the nucleotide sequence at SEQ ID NO 217
tgctagttatcaggggttgtagctcaagaaaacgagggagaaagtcgttgttagattcgtcctcgctcttcatcatgcaatgtaacaggtggttgaggcgaccattaagacctacccaggctctatcacaaacattcgagggggaaaacggcacctcgtttatgacttgcttgatcttaattttatgttatctttactatcgcatacctaattcgcgcggcctcataaacgcgcccatacctctatctcctcatttcatgtcttttatttcccatgtcagtaattgttaactggacagacccacgttatcttcctagtaacttcttaacagcatgaagggcgagttatctgatcacttaagtctgttgcatctcaatcttgctgccttcaatggtggcagtatgctgcgtcgcccgtctaagcctatttatctggggagtggtgctttaatcgcactctttctagtctaccaatggatataccctcaattttggttacacgatagtactagcgtcagtgtcataagcgatccggttatgcgaaggagtattaaagatatacgcaatacgacgcttggtttcgagaagatctttgtggtcaatatgccctcccgcactgatcgtcgggacagcacaattttggctgcagcgttaagtgacatggagatcgagttcgtcgatggcgttaatggtggcgcaatccctgataaggctttggcgaaaacctttgatcatcgtcgtctagatgatccgacccttggagcatggcgtggtcatattaatgctattcaagaagtggttcgaagaaatctgtcttcagctttgatcatggaagacgacggtgattgggatgtgaggatacgagatcagttacagaacttcgcactagcatcctacgccctcacgcagcctcttgtcaactcaaatggaaacaaatatgccgataccacatatccaaaatctccgatcgattctgtaatgtcagttccggatcttgacttcgcaaatcttcccgccaccatcgctccgaccacgtcgccatatggcgatgagtgggatgtgctatggctttgtcactgtggaatgcgatttccgtttgcagataaatacgtgataccgaaaggacgtgtcgcacattttgatgagaccgtccccgaacgtcgctatctttggacaatcacaaacccaaacgacttgaaggaacaatatcttgatcatataagaatcactcatcatgtccaagaaggtcgctgttccttggcatacgccgtaacgcagaattcggcccgcaagcttttatatgaggtcggcatgaaagacccaaccgatccgttcgatattatgctcagctggttctgtgaaggtgttggtagacctaaccggggataccataattgtttgacagccactccctcgccatttcagatccacttgaccgcgggacccaagagttacgccagcgatatcgcagatcacggcgacggttatcaaggggacgggaccaccttgatcagaacgagtgtcaagatgaatgccgcagccttgatagacggccgaaaggatctgccggatgcgtatccagattcgaattgagtttaagataacgcacaaaagaggaaatattgaaccgcttcattattttccatattgcatagcaacttggcattatgagccggcatgtggcgtctgatcttaaaatacggacataccatgataactaacatttagactggaggtggaacgcatgtgaagtcagtcaatatctttgcactccgaatgcttcaccattgccttgtacttagatatctagtacagacaagcaagagctgcgcaaaaccgccacctctcagatatacactccatcctaatggaccggatcttatagttctgaacatcactacttgcacagaagaaggcatctgtcagaaagtccgccgcagcacgaacgcataccaaagagttctactgccagcagggttaatatgcctacttttgtggagagttctcatccagctaaaattgtatggcgcacgaagaataaaagcctagcatgctgatcatcc

SEQ ID NO: 220 - DNA, 675 bp, Muscodor strobelii
  misc_feature: SGI cDNA ID NO. 559634
  misc_feature: Encodes the peptide sequence at SEQ ID NO 221
atggcctccgaccctcgtcccgctcctctccgcctcggcactgtcgcccccaacttccaggccgacaccaccaacggccccattgacttccacgagttcgttggcgacaagtgggttgtcttcttctcccaccctgaggactacacacctgtctgcaccaccgagctcggtgcctttgccaagctcgagcccgagttcaccaagcgtggcgtcaagctgatcggtctgtctgccaacaccctcggcagccatgagggctggatcaaggacatcagcgaggtgacgggcggcaatgtctccttccccatcatcgccgacaaggagcgcaaggttgcctatctctacgacatgcttgactaccaagacaccaccaacgtcgatgagaagggcattgctttcacaatccgctccgtcttcgtcatcgaccctagcaagaagatccgcactatcctctcttaccctgcttccactggtcgcaactctgccgaggttctgcgtatcgtcgactccctccagaccggggacaagcacaagatcaccacccccatcaactgggttcccggcgacgatgtcattgtcgctcccagcgtcaagaacgagcaggccgagcagctcttccccggtttccgcaccgtcaagccttacctccgattcactactctgcccaagaactag

SEQ ID NO: 221 - protein, 224 aa, Muscodor strobelii
  misc_feature: SGI Peptide ID NO. 559634
  misc_feature (11)..(171): Pfam Id: PF08534 Pfam Desc: Redoxin
  misc_feature (12)..(150): Pfam Id: PF00578 Pfam Desc: AhpC/TSA family
  misc_feature (3)..(223): NCBI GI: 261358569 Blast Desc: mitochondrial peroxiredoxin PRX1 [Verticillium albo-atrum VaMs.102]
  misc_feature (1)..(223): NCBI GI: 145613040 Blast Desc: conserved [Magnaporthe grisea 70-15] gi|145020105|gb|EDK04333.1| conserved [Magnaporthe grisea 70-15]
  misc_feature (1)..(224): NCBI GI: 85093072 Blast Desc: mitochondrial peroxiredoxin PRX1 [Neurospora crassa OR74A] gi|28921066|gb|EAA30385.1| mitochondrial peroxiredoxin PRX1 [Neurospora crassa OR74A]
  misc_feature (1)..(224): NCBI GI: 116200704 Blast Desc: conserved [Chaetomium globosum CBS 148.51] gi|88175611|gb|EAQ83079.1| conserved [Chaetomium globosum CBS 148.51]
  misc_feature (3)..(223): NCBI GI: 156057945 Blast Desc: mitochondrial peroxiredoxin PRX1 [Sclerotinia sclerotiorum 1980] gi|154702489|gb|EDO02228.1| mitochondrial peroxiredoxin PRX1 [Sclerotinia sclerotiorum 1980]
  misc_feature (3)..(224): NCBI GI: 154323320 Blast Desc: conserved [Botryotinia fuckeliana B05.10] gi|150842288|gb|EDN17481.1| conserved [Botryotinia fuckeliana B05.10]
  misc_feature (1)..(223): NCBI GI: 171680759 Blast Desc: protein product [Podospora anserina] gi|170940007|emb|CAP65233.1| protein product [Podospora anserina]
  misc_feature (7)..(223): NCBI GI: 46126317 Blast Desc: FG07536.1 [Gibberella zeae PH-1]
  misc_feature (6)..(223): NCBI GI: 189202520 Blast Desc: peroxiredoxin-6 [Pyrenophora tritici-repentis Pt-1C-BFP] gi|187984695|gb|EDU50183.1| peroxiredoxin-6 [Pyrenophora tritici-repentis Pt-1C-BFP]
  misc_feature (7)..(223): NCBI GI: 256724664 Blast Desc: [Nectria haematococca mpVI 77-13-4]
  misc_feature (10)..(219): SWISSPROT Homolog: EC 1.11.1.15 Peroxiredoxin
MASDPRPAPLRLGTVAPNFQADTTNGPIDFHEFVGDKWVVFFSHPEDYTPVCTTELGAFAKLEPEFTKRGVKLIGLSANTLGSHEGWIKDISEVTGGNVSFPIIADKERKVAYLYDMLDYQDTTNVDEKGIAFTIRSVFVIDPSKKIRTILSYPASTGRNSAEVLRIVDSLQTGDKHKITTPINWVPGDDVIVAPSVKNEQAEQLFPGFRTVKPYLRFTTLPKN

SEQ ID NO: 222 - DNA, 3282 bp, Muscodor strobelii
  misc_feature: SGI EST ID NO. CUFF.753.0
  misc_feature: Variant of the nucleotide sequence at SEQ ID NO 220
ttgcgttgcagccactgtagaacgctgcgcagagcctgagtgatgctaccgataagcaatctctacattagatctatcaaaactgggtaatttatgtctgggacagcagagagcatcctcctcgtaaagggcgttcgagaccatagcgtatggtgaatagtcaagcagcgtagcctggatacaatttcgatacaacttgaagttcgcgacgaggccgacatccgtaagacggcacggagctggcgatgatgggtcagaagccggaggcagtcgggatgataccattgacgaacgaggatgacaacatcaggctacggctggggcgggaccaatcagtgatgatgcgcagcacgcaatttatagcgtctagactgatgaggcttagtgaggggctgtcattggaggggtcgtcagaatttggacgacccctttggacgttttggggttcgacatgctgctgggcaaatcaattttgctagacactgcagtgatagacttttggggattccggagatcataagtgtggcattcagctggatgcatgtgtgttggcctgtcacttggtgggatgtgatctgagcatgtactgtactgttggttatgaattggttgtgaaccgctatagagcttgcaaatatatctgcactgtcagcgatcgattacgtcgattagttgataccgctgtgtagaatctgccagacagaccttaacttgactacatgacagctccaaagtgcaaagtacttccacaggaggcgaacttattacgtctttagatcgtgctactagattttgattttgccgattgagtctacagatctcgtacatgggtgttcttcagacgtagaggttcggactgaatggatggtgactaccacccctcgtcccatatttataatcacgccgggaaatcgcgccatcacgaacaaacttacacgtatacgccatacccgtagatgtctccctgctaactgggcagataaatatctttgctattctacccctccttcacgactcgaccgcttcccctcatctttccgtgtgcctttaatcgttctgtgatacccattatacgctcgaactttagccgtttctagattcatcaccaccactaccaatattacaatggcctccgaccctcgtcccgctccgtaagtatcgtatcgtgcaatcacggcacatatgtcaagttataacaacgccttaaattatggcatttggataagcgagaactgacacgatatacctgccacttacagtctccgcctcggcactgtcgcccccaacttccaggccgacaccaccaacggccccattgacttccacgagttcgttggcgacaagtgggttgtcttcttctcccaccctgaggactacacacctgtctgcaccaccgagctcggtgcctttgccaagctcgagcccgagttcaccaagcgtggcgtcaagctgatcggtctgtctgccaacaccctcggcagccatgagggctggatcaaggacatcagcgaggtgacgggcggcaatgtctccttccccatcatcgccgacaaggagcgcaaggttgcctatctctacgacatgcttgactaccaagacaccaccaacgtcgatgagaagggcattgctttcacaatccgctccgtcttcgtcatcgaccctagcaagaagatccgcactatcctctcttaccctgcttccactggtcgcaactctgccgaggttctgcgtatcgtcgactccctccagaccggggacaagcacaagatcaccacccccatcaactgggttcccggcgacgatgtcattgtcgctcccagcgtcaagaacgagcaggccgagcagctcttccccggtttccgcaccgtcaagccttacctccgattcactactctgcccaagaactagatgcttgttgaatcaattgttgttttgtgagctgtaaaatgagggatggggcaactgggctaagacatgattaatgacactttagggtaaaccacgggttgatgcggtccgcaaaaggggctccgagccgcattatcaagtaatgaaatagaaggaataaaaaaactgataaaagcctattgcactgaaacctgcatccgatccctagccatagctcccgctgctaacgcttaagtggtcccggagacctgggtatgtctcgcctcggttcgtctgaagttctaaacaccttgtctggcgtcttggtccctcgtggcatctttgccctgatgtctataatagaactctattaagaacggttgaggataccgtttgatgagcagcttgacaagactggggtcagctagacgtgccaagctcaatgacgactccatgagagccgtataaacgcgcaaattacgacatatcgtcgcttctacccacgccccttggtggaattgtgcagtagcggcttcctataaccagacttctggaacaagggggtcgagttatctactatccctgccgcaattaagtacatctgacttccccgggcgctgacaactcataatgccaacccagacagagataatggggcagtattaaaataacatcatcacgggaagaggtataatagaagagactagtcgagcggatgacaagagatcttccgcggtgaatcgtgaaggcgcgccgccctggaaggatcccggccgagcgtgttgcgaaagacccatgccgaaaacgtggttaactcccgaccctggtgaaactgtgtcatggttttgcaggcctcggtgcaggctgcgggcgagcatgaagcgagatcacagcgggcgaatgaagctgagacggaacccctgattagcaattcaactccaccagcttgcctgtcaaaagatcagacgaaatgacggctctgcgcgggcataggtctatagggaaattattgcgtcgattcctgcagaagagagccgatagagataggcgtgcatgcatggagagaactggaggattctaagttgcatcctccagttctagactgggaacgcggaggtgttggagaagcgagcacctcccgttttgccctttctcaccaccgacggccgactcattaggactaagccatgcatcgatgcatcagacgcaggcagggagataggctagatagggactgatttacaggacaaatgaatacgaataattgacagcaatgccaccgtctacgatagacatcatgttatttgatgacggcccgcggacgatccatgctctctgctcttttcctatttgatacacacctacacgaattccactgttcaatgtgacggcaaa

SEQ ID NO: 223 - DNA, 3237 bp, Muscodor strobelii
  misc_feature: SGI cDNA ID NO. 559635
  misc_feature: Encodes the peptide sequence at SEQ ID NO 224
atgaacgtccctcttcttctcgttggcctggatggcacgcctctgaagcgacaggtcgagaaggagagaggcacaaccaagatgtctgactccgaactaacatggcgtgaaggaaggcgagacagctggcaggctgtcgacgactaccgacttgcgagtctccgggaccaggagcgtgccaacggagccaagtctccctccgatctgctctacggcgtctttcgcggcatcaagaaggccatccccacgcgcgaggactcagtccgagccgcacgagcaccctcgagactggccgcgagagcctttgcgccgaccccgtcctccacgccgcctccacaaccgacgtcgactgcaccgccagagttcccgttactgccggagcagcagcgccatgggcggcagctgagccttcaggatagtcttgagaagcctctgcccgcaccaccgccacccacgctctctcctattcgcgcactcacgcccgagattcgggcccacacgccggacatcttttcagcgtttcaacgggagcctgaaactgcggctaccgcaggccctacagaaactagaactcacgtaatggaatcaaacaactcgtatggtgcaaacatggacatgagcggaaaccaggccagcttttctggcacggccaggcataatggggattctcagaatgataatttgacacctcgaagcaatggaccgcactccgccggaccctcgccgaatgttgcatcgacaagtcggacgccggcgcttggaaacgctgttgggacgccctccacttcaggttcctcagcccacctatcgggcctgatgtgcaatgttcatcgcaccaccggcagggagccgcatccgttggtaggtgcaacaactacgatcctgggcgacaagctctatgttttcggtggccgcattctatcacgaagccggcctgcgcctcttacctcagacttgtatgagttggacctcattcggaggcactggaccaaggtcgagacctcgggcgacattccaccgccacgctactttcattccatgtgcgctctcggcgacacgaaaatggtttgctatggagggatgtcccccaccgccagccaagccgcgacggccgcccaggaccaacagcccgaggtgactgtcatgtctgatatacatatttacgacgtaaacacgaagaaatggactttcattccgtcccaagataccccccaaggccgatatgcgcattgcgcctgtatattaccctcgtcggccaccttttcctcgcacaaagctcctctctctgctctccagcataatccatctggtggcaaccctaatgaaggtcgaattggtatcaacattgatggctcgggaggagcggaaatggtcatcgtaggtggccaggacggagcgaaccactacatcgagcagatcagcgtgttcaatctgcgcagtctcaaatggacgtcgacccagccgctgggaaaatcatgtggtgcttaccgtagtgtagtcgcaccattgccaccgaccgtcaacgccaagcttggaagggccaatggatcagctttgcgccctgaaggcgggatcagccaggaggctcgggagcccggatcttcaatgttgatatattccaactacaacttcctcgatgttaaattggagctacagatccgagggtcagacggatcattgacagagagacctatgtcgggcacttactcaccaccaggactacgattccccaatggcggtgttatagatacatattttgtggtcagcggcacctatttgacgagttcaaaacaagagtatgctctctgggctttggacttgagaactctgacgtggtcacggattgatgcgggagctagtgtgttcagccagggaagctggaaccgaggcgtattgtggaatagaagaaacacgtttgtcattcttggcaaccgaaagaggagcctcgtcgacgactataatcaccgccgcattaatttctccaacgtatgcatggtcgagctcgaagcgttcggcttctacgataatccgcgcaaggcgacgcccatgtctggctttttgtccgccagcagtcctcacgtgggaccaggtctcagtctggcccggaaggccggttggacggcaggcggcagattccattcgcgggcagccgaagaactcggcgagaaagccttggcgatgcgggaattggcagatatggagattttgtgtatcggtggcgaaagaatacacattaactcaagggtcgtcggccgtcgatggggcccgtactttgtacagctgttgcgtgagggcgccgctacacaggacggcagcgatgcggcgactttaagaacgggtatgtctagccaggccggtacgaggatgtcaactatgaccatcacgcagacgaaccgaaatacgggcgacagtagcctgtccatggctaccactctgggcaactcggccgcgggcaccggaaaggcaggaggcacgtcgttctctagtggcagtagcactattgaccctaccagcatcaatgcggcccccacgccggcgtcgctgcctcccagctctcggccacgttgtttatacctaccgcatacctatttgacagtacaggcccttcttcacttcctttacacctcgtcactaccatcaccatcctcgcctctttgcactccgcagatcctctgctctctgctgcagattgcccgcccgtacaaaattgacggtctgctcgaggcagtcgtggaacgactccatgccttgcttgattctcgcaatgctgcagcagtgttcaatgccacggccatggcagcgggtggcggacgaggtatcgacggcagtatgaaccccaacttctttgggctggatcaaccattcggtggaatggacgggaatggacgatcgatgtctatatcccagagcagcatggatgaatcgatccgcggcgtggacggactgcgcatcaacacgagcgtaccgatcaaccgaccgggcagcgcagagctgagtgccagcacaagcgtctcaggtagcgaatggggcagcgaagtggaagatagcgaacgtggggcggtcaaggagatctggaacggagagctgagcagtgtcattggtctccagaaacgtggtctccgggggttgatggaaggacggcggatgagagcgacggtagatcgtgaacgggacggaagaggcgatagacaggcggcgttcggtccgcgtgtaggcctggggattgccagctcctag

SEQ ID NO: 224 - protein, 1078 aa, Muscodor strobelii
  misc_feature: SGI Peptide ID NO. 559635
  misc_feature (286)..(336): Pfam Id: PF01344 Pfam Desc: Kelch motif
  misc_feature (286)..(336): Pfam Id: PF07646 Pfam Desc: Kelch motif
  misc_feature (341)..(402): Pfam Id: PF01344 Pfam Desc: Kelch motif
  misc_feature (38)..(1059): NCBI GI: 39946512 Blast Desc: MGG_08255 [Magnaporthe grisea 70-15] gi|145020106|gb|EDK04334.1| MGG_08255 [Magnaporthe grisea 70-15]
  misc_feature (28)..(1050): NCBI GI: 171680757 Blast Desc: protein product [Podospora anserina] gi|170940006|emb|CAP65232.1| protein product [Podospora anserina]
  misc_feature (268)..(1050): NCBI GI: 256724666 Blast Desc: NECHADRAFT_11461 [Nectria haematococca mpVI 77-13-4]
  misc_feature (44)..(1078): NCBI GI: 261358568 Blast Desc: ral2 [Verticillium albo-atrum VaMs.102]
  misc_feature (53)..(1078): NCBI GI: 154323318 Blast Desc: BC1G_00058 [Botryotinia fuckeliana B05.10] gi|150842287|gb|EDN17480.1| BC1G_00058 [Botryotinia fuckeliana B05.10]
  misc_feature (188)..(1075): NCBI GI: 189202466 Blast Desc: regulatory protein ral2 [Pyrenophora tritici-repentis Pt-1C-BFP] gi|187984668|gb|EDU50156.1| regulatory protein ral2 [Pyrenophora tritici-repentis Pt-1C-BFP]
  misc_feature (334)..(1050): NCBI GI: 164425621 Blast Desc: NCU06030 [Neurospora crassa OR74A] gi|157070999|gb|EAA30384.2| conserved [Neurospora crassa OR74A]
  misc_feature (201)..(1075): NCBI GI: 169596070 Blast Desc: SNOG_00784 [Phaeosphaeria nodorum SN15] gi|111071159|gb|EAT92279.1| SNOG_00784 [Phaeosphaeria nodorum SN15]
  misc_feature (260)..(1050): NCBI GI: 169773499 Blast Desc: [Aspergillus oryzae RIB40] gi|83769079|dbj|BAE59216.1| protein product [Aspergillus oryzae]
  misc_feature (260)..(1050): NCBI GI: 238491486 Blast Desc: regulatory protein Ral2, [Aspergillus flavus NRRL3357] gi|220697393|gb|EED53734.1| regulatory protein Ral2, [Aspergillus flavus NRRL3357]
MNVPLLLVGLDGTPLKRQVEKERGTTKMSDSELTWREGRRDSWQAVDDYRLASLRDQERANGAKSPSDLLYGVFRGIKKAIPTREDSVRAARAPSRLAARAFAPTPSSTPPPQPTSTAPPEFPLLPEQQRHGRQLSLQDSLEKPLPAPPPPTLSPIRALTPEIRAHTPDIFSAFQREPETAATAGPTETRTHVMESNNSYGANMDMSGNQASFSGTARHNGDSQNDNLTPRSNGPHSAGPSPNVASTSRTPALGNAVGTPSTSGSSAHLSGLMCNVHRTTGREPHPLVGATTTILGDKLYVFGGRILSRSRPAPLTSDLYELDLIRRHWTKVETSGDIPPPRYFHSMCALGDTKMVCYGGMSPTASQAATAAQDQQPEVTVMSDIHIYDVNTKKWTFIPSQDTPQGRYAHCACILPSSATFSSHKAPLSALQHNPSGGNPNEGRIGINIDGSGGAEMVIVGGQDGANHYIEQISVFNLRSLKWTSTQPLGKSCGAYRSVVAPLPPTVNAKLGRANGSALRPEGGISQEAREPGSSMLIYSNYNFLDVKLELQIRGSDGSLTERPMSGTYSPPGLRFPNGGVIDTYFVVSGTYLTSSKQEYALWALDLRTLTWSRIDAGASVFSQGSWNRGVLWNRRNTFVILGNRKRSLVDDYNHRRINFSNVCMVELEAFGFYDNPRKATPMSGFLSASSPHVGPGLSLARKAGWTAGGRFHSRAAEELGEKALAMRELADMEILCIGGERIHINSRVVGRRWGPYFVQLLREGAATQDGSDAATLRTGMSSQAGTRMSTMTITQTNRNTGDSSLSMATTLGNSAAGTGKAGGTSFSSGSSTIDPTSINAAPTPASLPPSSRPRCLYLPHTYLTVQALLHFLYTSSLPSPSSPLCTPQILCSLLQIARPYKIDGLLEAVVERLHALLDSRNAAAVFNATAMAAGGGRGIDGSMNPNFFGLDQPFGGMDGNGRSMSISQSSMDESIRGVDGLRINTSVPINRPGSAELSASTSVSGSEWGSEVEDSERGAVKEIWNGELSSVIGLQKRGLRGLMEGRRMRATVDRERDGRGDRQAAFGPRVGLGIASS

SEQ ID NO: 225 - DNA, 6323 bp, Muscodor strobelii
  misc_feature: SGI EST ID NO. CUFF.898.1
  misc_feature: Variant of the nucleotide sequence at SEQ ID NO 223
aaagcggacacgttttgcccgtcaatcgcatgctagacaggccagctttctgacaggcctcgccctgtctgggtaggagggattgaccctcttgtgaaaacaatcccctattccgcccccctcactcgtgaagctagcgaatcagcaggccgtgacgacgcgggtcaactgcaactgagctgactgatcagatttgaggcatcaggaccgagccgaagcagagactcggacgcatactgcccgtccagtcttgcttgcttgtgttaagtcgtctcgaagggcagctcgagacttctggtttctgagaaaagaaagagcagctcgagacgaaggaagaattgctgtctgttcctttccatccctctgcgtctcattattgcccctcttcttgaggctgaatttagcggaattgtcacgagtcacgggtgagagcaattgagttgactacgttcatcctccgattcatcgtgataggtagcgtgccagcgtcgcagcgagacccagatcctcctccgtcgccgcccctctctgtgagcgcgttgctctcttgctgcctcgtgctgtgttcgcccccctggcctgccttcaacggtcgacggttcaaacctgatgtttgcgactctgcggtccactcacacagggatatccacaggcagccctcggactggccagcactagccctttcgcgaagttgggtatttgaaacataccagacgagggttcatgtgacttgctcgacatcgcgacagggaacaccaccgtcagcatccacccaatttcacattccctgccggccgccacgcttgcgtctcgagctcgacggagaactcagacacacagtacgcacatccgcgtctgcgctccatcagctcggacgggcagagagaccgctgaccaggacgagcgtcccaagcctcgcaccgcagccagcagcaccgaccgatcggaacgagagagcaaggaaggcgagacagctggcaggctgtcgacgactaccgacttgcgagtctccgggaccaggagcgtgccaacggagccaagtctccctccgatctgctctacggcgtctttcgcggcatcaagaaggccatccccacgcgcgaggactcagtccgagccgcacgagcaccctcgagactggccgcgagagcctttgcgccgaccccgtcctccacgccgcctccacaaccgacgtcgactgcaccgccagagttcccgttactgccggagcagcagcgccatgggcggcagctgagccttcaggatagtcttgagaagcctctgcccgcaccaccgccacccacgctctctcctattcgcgcactcacgcccgagattcgggcccacacgccggacatcttttcagcgtttcaacgggagcctgaaactgcggctaccgcaggccctacagaaactagaactcacgtaatggaatcaaacaactcgtatggtgcaaacatggacatgagcggaaaccaggccagcttttctggcacggccaggcataatggggattctcagaatgataatttgacacctcgaagcaatggaccgcactccgccggaccctcgccgaatgttgcatcgacaagtcggacgccggcgcttggaaacgctgttgggacgccctccacttcaggttcctcagcccacctatcgggcctgatgtgcaatgttcatcgcaccaccggcagggagccgcatccgttggtaggtgcaacaactacgatcctgggcgacaagctctatgttttcggtggccgcattctatcacgaagccggcctgcgcctcttacctcagacttgtatgagttggacctcattcggaggcactggaccaaggtcgagacctcgggcgacattccaccgccacgctactttcattccatgtgcgctctcggcgacacgaaaatggtttgctatggagggatgtcccccaccgccagccaagccgcgacggccgcccaggaccaacagcccgaggtgactgtcatgtctgatatacatatttacgacgtaaacacgaagaaatggactttcattccgtcccaagataccccccaaggccgatatgcgcattgcgcctgtatattaccctcgtcggccaccttttcctcgcacaaagctcctctctctgctctccagcataatccatctggtggcaaccctaatgaaggtcgaattggtatcaacattgatggctcgggaggagcggaaatggtcatcgtaggtggccaggacggagcgaaccactacatcgagcagatcagcgtgttcaatctgcgcagtctcaaatggacgtcgacccagccgctgggaaaatcatgtggtgcttaccgtagtgtagtcgcaccattgccaccgaccgtcaacgccaagcttggaagggccaatggatcagctttgcgccctgaaggcgggatcagccaggaggctcgggagcccggatcttcaatgttgatatattccaactacaacttcctcgatgttaaattggagctacagatccgagggtcagacggatcattgacagagagacctatgtcgggcacttactcaccaccaggactacgattccccaatggcggtgttatagatacatattttgtggtcagcggcacctatttgacgagttcaaaacaagagtatgctctctgggctttggacttgagaactctgacgtggtcacggattgatgcgggagctagtgtgttcagccagggaagctggaaccgaggcgtattgtggaatagaagaaacacgtttgtcattcttggcaaccgaaagaggagcctcgtcgacgactataatcaccgccgcattaatttctccaacgtatgcatggtcgagctcgaagcgttcggcttctacgataatccgcgcaaggcgacgcccatgtctggctttttgtccgccagcagtcctcacgtgggaccaggtctcagtctggcccggaaggccggttggacggcaggcggcagattccattcgcgggcagccgaagaactcggcgagaaagccttggcgatgcgggaattggcagatatggagattttgtgtatcggtggcgaaagaatacacattaactcaagggtcgtcggccgtcgatggggcccgtactttgtacagctgttgcgtgagggcgccgctacacaggacggcagcgatgcggcgactttaagaacgggtatgtctagccaggccggtacgaggatgtcaactatgaccatcacgcagacgaaccgaaatacgggcgacagtagcctgtccatggctaccactctgggcaactcggccgcgggcaccggaaaggcaggaggcacgtcgttctctagtggcagtagcactattgaccctaccagcatcaatgcggcccccacgccggcgtcgctgcctcccagctctcggccacgttgtttatacctaccgcatacctatttgacagtacaggcccttcttcacttcctttacacctcgtcactaccatcaccatcctcgcctctttgcactccgcagatcctctgctctctgctgcagattgcccgcccgtacaaaattgacggtctgctcgaggcagtcgtggaacgactccatgccttgcttgattctcgcaatgctgcagcagtgttcaatgccacggccatggcagcgggtggcggacgaggtatcgacggcagtatgaaccccaacttctttgggctggatcaaccattcggtggaatggacgggaatggacgatcgatgtctatatcccagagcagcatggatgaatcgatccgcggcgtggacggactgcgcatcaacacgagcgtaccgatcaaccgaccgggcagcgcagagctgagtgccagcacaagcgtctcaggtagcgaatggggcagcgaagtggaagatagcgaacgtggggcggtcaaggagatctggaacggagagctgagcagtgtcattggtctccagaaacgtggtctccgggggttgatggaaggacggcggatgagagcgacggtagatcgtgaacgggacggaagaggcgatagacaggcggcgttcggtccgcgtgtaggcctggggattgccagctcctaggaggagaacgaggcgtcccgtgctgcactgataacggaggaggacacacagagaggcgtcatgacgtctgtggaaagacaggacgaggttgaactgtctatcggtgaccgaaagctagtggagaagtacaagagaaagagcatgtgagttgagggaaaggggacaagtgacgatacatagtcttaacgaggctaacgacaccatgatacatacggccgggacacaaatcaccaacttagacgatatccaggactttacgaggaggacatttagctacctgcatgtgtggaggaaagggctgatttcatgggttgttggtcccgttacatggaggtttgaggcgtacgtaggaatcatttactaggcggcgtcttaccagtggaattatatatcatttcaacaattcatttcccctacgcgtgacatgacccgattttcatgtcagcattgtcaacttcggctttctcgataagcaagagacatttgacgatatgctgggcatctatgcgctagcctttgctaccaattaggtaatcggatgacgtatgctggttgtgtattagtctctggtgggtgtttcactgccctgctcgcctggtgtaataaacttgcgcgaacctcgggcatgtctctcgttcttctcttttgacctcggaagttatattgggttgcctagactgagggttgggcagggtgtaggtatcgtacctaaagttgttcgcgcacgcgccatgtagaagcatcccactttctcccgcatgtgcagttccctcccaatcatgctcccgaacccggacctgagcttcacgctcccaagtatccacgacgacacgaagcttgactgtcgagtttatcagccaagaaatcccgatgaaactacaagaggatggaatggcaatattgccgttgtggcgcatccgtatgcgccgcttggtggttgttatgatgaccacgtcgtcgatgtcgtagccggcactttattgggaaatgggtttttggttgctactttcaattttcgaggtgcaggtggatccgcaggccgcacgtcgtggacctcgaagcccgagcaagacgactacatctccgtcgctgggtttctggcatactacgcgcactacctacatgcgcctccccgcgagtcaaactcctctagctctaatcacactgccgaaagacctatacccacattcttattcgccggctactcatacggcggcataattgtcacccgactcccgcctgccgagctcgtcctctcccacttcgagacacccgttatacataccccggctgctgatatcaggctccgcgcgcagcacttggctgagcaacagagagatctcaaagccttctcgccgaactcaccaaggagtagcctaggaatgcgattcggcggggagggagactcgacccccagccacgatagacacgagaaagaagtgcatggcgaagagaagattaggagaggagtcaaggacctcttgcagagatccaagatcatccataggaaaagggggccgagtaaagaaaaaggtacagaagaaacggagcaatgtcttgagaaacttgagggcatggacttcagagctgcgtatctactcgtatcgccgcctgtgggtattgtttcgaatttggcgacgatgtcgtttggtaagtctggacaaggcgtattgggtggtatgtttggcgatttcgggagagacggggttgaggaaagagacgagaaatttgtgaggaatgatacgctgtgtatctatggagggcaggatgggtttatcagtaatcgcaagattagggactggagtaagaagttgacgggtagtggtgaggcgagtaggtggaaggctgtagaggttcctgaggcgggacacttttgggtcgaggtgggagctctggcacactgtgaggcttgactctgcttttcttgaaagagatatgctgacttggcgtttagtggaagaggccgtagatacatttacgagtgagatcgtcggatatggtgagttaaaactttgatctgccccatagccatgacaacacacaagatgacacgcgtttcggatgggttgccggaccattcacacgagctaccccgatagacatgaagtcacattgaaaatgaagactatggtagtgtctcaatttaatactgggcatacagctgtgtgaactactttgcttgggtcaccaagtacatgtacgcaattcataccataaccacaatacattgagactta

SEQ ID NO: 226 - DNA, 1185 bp, Muscodor strobelii
  misc_feature: SGI cDNA ID NO. 559636
  misc_feature: Reduced expression when VOC is produced
  misc_feature: Encodes the peptide sequence at SEQ ID NO 227
atgctcccgaacccggacctgagcttcacgctcccaagtatccacgacgacacgaagcttgactgtcgagtttatcagccaagaaatcccgatgaaactacaagaggatggaatggcaatattgccgttgtggcgcatccgtatgcgccgcttggtggttgttatgatgaccacgtcgtcgatgtcgtagccggcactttattgggaaatgggtttttggttgctactttcaattttcgaggtgcaggtggatccgcaggccgcacgtcgtggacctcgaagcccgagcaagacgactacatctccgtcgctgggtttctggcatactacgcgcactacctacatgcgcctccccgcgagtcaaactcctctagctctaatcacactgccgaaagacctatacccacattcttattcgccggctactcatacggcggcataattgtcacccgactcccgcctgccgagctcgtcctctcccacttcgagacacccgttatacataccccggctgctgatatcaggctccgcgcgcagcacttggctgagcaacagagagatctcaaagccttctcgccgaactcaccaaggagtagcctaggaatgcgattcggcggggagggagactcgacccccagccacgatagacacgagaaagaagtgcatggcgaagagaagattaggagaggagtcaaggacctcttgcagagatccaagatcatccataggaaaagggggccgagtaaagaaaaaggtacagaagaaacggagcaatgtcttgagaaacttgagggcatggacttcagagctgcgtatctactcgtatcgccgcctgtgggtattgtttcgaatttggcgacgatgtcgtttggtaagtctggacaaggcgtattgggtggtatgtttggcgatttcgggagagacggggttgaggaaagagacgagaaatttgtgaggaatgatacgctgtgtatctatggagggcaggatgggtttatcagtaatcgcaagattagggactggagtaagaagttgacgggtagtggtgaggcgagtaggtggaaggctgtagaggttcctgaggcgggacacttttgggtcgaggtgggagctctggcacacttggaagaggccgtagatacatttacgagtgagatcgtcggatatggtgagttaaaactttga

SEQ ID NO: 227 - protein, 394 aa, Muscodor strobelii
  misc_feature: SGI Peptide ID NO. 559636
  misc_feature (1)..(388): NCBI GI: 46126327 Blast Desc: FG07541.1 [Gibberella zeae PH-1]
  misc_feature (1)..(333): NCBI GI: 85091129 Blast Desc: NCU09408 [Neurospora crassa OR74A] gi|28920134|gb|EAA29515.1| [Neurospora crassa OR74A]
  misc_feature (1)..(388): NCBI GI: 171680779 Blast Desc: protein product [Podospora anserina] gi|170940017|emb|CAP65243.1| protein product [Podospora anserina]
  misc_feature (1)..(388): NCBI GI: 27764285 Blast Desc: protein product [Podospora anserina]
  misc_feature (1)..(387): NCBI GI: 116200732 Blast Desc: CHGG_10911 [Chaetomium globosum CBS 148.51] gi|88175625|gb|EAQ83093.1| CHGG_10911 [Chaetomium globosum CBS 148.51]
  misc_feature (1)..(389): NCBI GI: 156057669 Blast Desc: SS1G_04566 [Sclerotinia sclerotiorum 1980] gi|154702351|gb|EDO02090.1| SS1G_04566 [Sclerotinia sclerotiorum 1980]
  misc_feature (1)..(185): NCBI GI: 256724668 Blast Desc: NECHADRAFT_48364 [Nectria haematococca mpVI 77-13-4]
  misc_feature (3)..(386): NCBI GI: 189202436 Blast Desc: conserved [Pyrenophora tritici-repentis Pt-1C-BFP] gi|187984653|gb|EDU50141.1| conserved [Pyrenophora tritici-repentis Pt-1C-BFP]
  misc_feature (2)..(392): NCBI GI: 261206076 Blast Desc: conserved [Ajellomyces dermatitidis SLH14081] gi|239592834|gb|EEQ75415.1| conserved [Ajellomyces dermatitidis SLH14081]
  misc_feature (2)..(392): NCBI GI: 239611003 Blast Desc: conserved [Ajellomyces dermatitidis ER-3]
  misc_feature: Useful for introducing or modulating the production of volatile compounds
MLPNPDLSFTLPSIHDDTKLDCRVYQPRNPDETTRGWNGNIAVVAHPYAPLGGCYDDHVVDVVAGTLLGNGFLVATFNFRGAGGSAGRTSWTSKPEQDDYISVAGFLAYYAHYLHAPPRESNSSSSNHTAERPIPTFLFAGYSYGGIIVTRLPPAELVLSHFETPVIHTPAADIRLRAQHLAEQQRDLKAFSPNSPRSSLGMRFGGEGDSTPSHDRHEKEVHGEEKIRRGVKDLLQRSKIIHRKRGPSKEKGTEETEQCLEKLEGMDFRAAYLLVSPPVGIVSNLATMSFGKSGQGVLGGMFGDFGRDGVEERDEKFVRNDTLCIYGGQDGFISNRKIRDWSKKLTGSGEASRWKAVEVPEAGHFWVEVGALAHLEEAVDTFTSEIVGYGELKL

SEQ ID NO: 228 - DNA, 6323 bp, Muscodor strobelii; identical to SEQ ID NO: 225
  misc_feature: SGI EST ID NO. CUFF.898.1
  misc_feature: Variant of the nucleotide sequence at SEQ ID NO 226

SEQ ID NO: 229 - DNA, 2478 bp, Muscodor strobelii
  misc_feature: SGI cDNA ID NO. 559637
  misc_feature: Encodes the peptide sequence at SEQ ID NO 230
atggacatcttaccgcccgtcccctccattcttcccactcggcccaggccgacgtcgaatatcaaagggaagtctcacgggaagccctcacagcccgttctctcccttgcagcaccgctctcgagggcatacaatagcctgttatacctcaaagatggcatgaaccaccatgagcgcgaggagaagaagttccgcgaccagcgcagccagctcctgcgcgcccgcatgctcaatgccgagtgctttgcccaatgggatgccgccgcccacgagctcgacgtcctcgagggcaacgaggactggaaggtcgacacctccactggagactacaacccggatctgctcgaggaccgactacgcgagctcgatgaggcgcgtctgaactgcgacatgcgagccatgatgcatatcgtccgcacggctctgtcgcgcgacctcggcggtatgggcaatatcgatctatatcgacactcttattgcggcacaaagaagctgatagagcgatatgttgattcgaccctgaagaccatcaccaccctggtcgatacaagtgcgcaactagatccctattgtctacctgatgatctcgggccgagagacttgctcgattccatgctgtatgctcgtcaaagctttggccgcagcgcactgcttctctcgggtggcggtactttcggcatgtctcatatcggcgtcctaaaggcattgtatgaggccaagcttctaccgcgcattatctccggggcgtctgccggttctatcgtgtgcgccgtgttctgctccaagaccgatgatgaagttcctcagcttatccaagattttcccaatggagatttggcggtattcgaagaggaaggaaacgaggatggtctccttgatcatcttagaaggatgctcactgagggcaactggtctgatatcaaacacttgacgcgtgtcatgcgcgatctactaggcgacatcacgtttcaggaggcttacaaccggacgaggcgcatctgcaatatttgtgtctctacggcatctatctacgaactacctcggctcctcaactatgtcacggcacctaatgttatgatttggtctgccgtggcaacctcttgctccgttccgcttgtcttctcggccggcgcgttgctcgtcaagaacccgttgacgggagagcacagtccctggaacccgaccccacaggcatggatcgacggatcggtcgataatgacttgccaatgactcgactggccgagatgttcaacgtcaatcatttcatcgtttcgcaagtgaacccgcacgttgtgccgttcttggccaaggaggacaccgcaggtcccataatccgcgatcaccattctgtctacaaagaggagaccgattggttacataccatgacttcacttgccaagagtgaggccttgcatagaatgcaattaatggcagaaataggggtatttcccaacttagtcagcaagctcagatctatcctcagccagaaatattccggcgatatcaatatcttacccgcaataggagtacttgaccttcctaatatcctaaagaatccaaccatcgatttcatgacgcggtcgtgtctcctcggcgaacgagcaacgtggcccaagctatctcgcataagagatcgttgtgccatcgagctcgccctggaccgcgccgttcacgctcttcgagcgcgggtcgtcttcagcaagagccaggtcgaccttaggaggatggcgacgggctccttgacgtcggcacacagtaggggcagccatgaacccctggcatcaggaccgtcagccgtgcagcgcatctcatccaaggataagctcaaacaccggcaaagacgattgagcgccggcaatttgttaaacccacatatttacaatgtcgctcacgatgcgccgtacaaggtcacagacgacgacaccgacgacgaggaaaggctagagatgaccctgcgtcatcatcgtgggaagccgaaaatgaaattgaagaaacttccaaagagtaatggtacgccgagcggggccaagacgggaccgataatatcgtccacgtcgggaggagacgagtttgatttctctcagccgctcacgccgccgaatcgagaaaacgatagtgggcgcgagaagaaactttctacaccaggtgccctaggctctaggttgaagacagaatgttccgaacccatcaccggtacgacgtcctcggcgacttctccaccgtccgtaccgaccaaggacgtcgggttcgatacgagcgatacgcattcttcggatgctgatatcgagagtcatactgatgccgatatatctgatttcgcgatacggtcgcctatgcctagggatgaggagaattgggtgattcaggataaggccaagggagcgattgcagtcccgcttgtggatgacatgttctcgcttgcgaggaaggagaggagcggaaacggtgttgatgagggtgttgatccttggggctga

SEQ ID NO: 230 - protein, 825 aa, Muscodor strobelii
  misc_feature: SGI Peptide ID NO. 559637
  misc_feature (217)..(414): Pfam Id: PF01734 Pfam Desc: Patatin-like phospholipase
  misc_feature (11)..(774): NCBI GI: 256724662 Blast Desc: NECHADRAFT_48024 [Nectria haematococca mpVI 77-13-4]
  misc_feature (7)..(762): NCBI GI: 46126355 Blast Desc: FG07555.1 [Gibberella zeae PH-1]
  misc_feature (14)..(707): NCBI GI: 171680777 Blast Desc: protein product [Podospora anserina] gi|27764284|emb|CAD60564.1| protein product [Podospora anserina] gi|170940016|emb|CAP65242.1| protein product [Podospora anserina]
  misc_feature (17)..(713): NCBI GI: 261358578 Blast Desc: lipase [Verticillium albo-atrum VaMs.102]
  misc_feature (43)..(700): NCBI GI: 85091127 Blast Desc: NCU09407 [Neurospora crassa OR74A] gi|28920133|gb|EAA29514.1| conserved [Neurospora crassa OR74A]
  misc_feature (45)..(587): NCBI GI: 156057983 Blast Desc: SS1G_04723 [Sclerotinia sclerotiorum 1980] gi|154702508|gb|EDO02247.1| SS1G_04723 [Sclerotinia sclerotiorum 1980]
  misc_feature (85)..(579): NCBI GI: 154323358 Blast Desc: BC1G_00078 [Botryotinia fuckeliana B05.10] gi|150842307|gb|EDN17500.1| BC1G_00078 [Botryotinia fuckeliana B05.10]
  misc_feature (48)..(652): NCBI GI: 116200730 Blast Desc: CHGG_10910 [Chaetomium globosum CBS 148.51] gi|88175624|gb|EAQ83092.1| CHGG_10910 [Chaetomium globosum CBS 148.51]
  misc_feature (12)..(616): NCBI GI: 119500842 Blast Desc: Patatin family phospholipase, [Neosartorya fischeri NRRL 181] gi|119415343|gb|EAW25281.1| Patatin family phospholipase, [Neosartorya fischeri NRRL 181]
  misc_feature (12)..(588): NCBI GI: 70994310 Blast Desc: Patatin family phospholipase [Aspergillus fumigatus Af293] gi|66849616|gb|EAL89944.1| Patatin family phospholipase, [Aspergillus fumigatus Af293]
  misc_feature (79)..(569): SWISSPROT Homolog: EC 3.1.1.3 Triacylglycerol lipase
MDILPPVPSILPTRPRPTSNIKGKSHGKPSQPVLSLAAPLSRAYNSLLYLKDGMNHHEREEKKFRDQRSQLLRARMLNAECFAQWDAAAHELDVLEGNEDWKVDTSTGDYNPDLLEDRLRELDEARLNCDMRAMMHIVRTALSRDLGGMGNIDLYRHSYCGTKKLIERYVDSTLKTITTLVDTSAQLDPYCLPDDLGPRDLLDSMLYARQSFGRSALLLSGGGTFGMSHIGVLKALYEAKLLPRIISGASAGSIVCAVFCSKTDDEVPQLIQDFPNGDLAVFEEEGNEDGLLDHLRRMLTEGNWSDIKHLTRVMRDLLGDITFQEAYNRTRRICNICVSTASIYELPRLLNYVTAPNVMIWSAVATSCSVPLVFSAGALLVKNPLTGEHSPWNPTPQAWIDGSVDNDLPMTRLAEMFNVNHFIVSQVNPHVVPFLAKEDTAGPIIRDHHSVYKEETDWLHTMTSLAKSEALHRMQLMAEIGVFPNLVSKLRSILSQKYSGDINILPAIGVLDLPNILKNPTIDFMTRSCLLGERATWPKLSRIRDRCAIELALDRAVHALRARVVFSKSQVDLRRMATGSLTSAHSRGSHEPLASGPSAVQRISSKDKLKHRQRRLSAGNLLNPHIYNVAHDAPYKVTDDDTDDEERLEMTLRHHRGKPKMKLKKLPKSNGTPSGAKTGPIISSTSGGDEFDFSQPLTPPNRENDSGREKKLSTPGALGSRLKTECSEPITGTTSSATSPPSVPTKDVGFDTSDTHSSDADIESHTDADISDFAIRSPMPRDEENWVIQDKAKGAIAVPLVDDMFSLARKERSGNGVDEGVDPWG

SEQ ID NO: 231 - DNA, 3902 bp, Muscodor strobelii
  misc_feature: SGI EST ID NO. CUFF.549.0
  misc_feature: Variant of the nucleotide sequence at SEQ ID NO 229
cgggcatgcaagtcgtgggtttgggttgccagcttgccagattagaggctcgatcgggttgcacatgtcatttctgaagtgctgtttcgattctccagcggagaatagatgcccatcatgggcagacatgggctccgggtgacccctggagagccaggcctgacctgtctgatacttggtcagatggccgtgcaaccccacagctcccacaccccgcgcacgcggccacggcgggaatgcgggttattcatggccaccatgaccacctaacccaccaaaacttggttgatgtgtcgcgtgtgtggtcaccgtggcagctgttcacatgcactcgggaattttctgcaggagggaggccagtgattgattgacagaaaggatggggtagcgggggataatagggatagagcctgttgggcatgcacagggtgccagtgaccctcccacccgctcaggtccaagcctcacttattcaggtgctggcgcaggtctgacgtgttgtggtcggcgcattctaggtaatttctttcagcttcctaggtacgactccttcaactggcagacttactaggcccatatagacatatggacacatgacatgtgtctgacttcctcattcctcttttcaacgcctctctttttgtctgcatgtgtgagatcaaattgtattgtcagctatcttaactgaggtactcgctcgactgtcgagtatacatcactatcatcatcgatttcccggaatcacgtatctacttacgtatctaacggccgctaatcccaagatcgaccatctgggccgactcccgcttctagaacgtgtgtagcccagcgacgggctagattaccacgcatccggtatcgccagacgtcacctcaccgactggagcatttcatggtatacctgacaacctcccgccacaagaccaggcaagacatggggaatctcaacgacgtagatgactagggccggtcgcgacctgtctcacatcgccgctgcgtagcgtaggaacacgttgtatgctatgcgccggcgaccttggcctcggatggcacgaacgagagtgctgcagtcccgcatccccctctcacacgcgacactcacaatatgacattcctcatggacatcttaccgcccgtcccctccattcttcccactcggcccaggccgacgtcgaatatcaaagggaagtctcacgggaagccctcacagcccgttctctcccttgcagcaccgctctcgagggcatacaatagcctgttatacctcaaagatggcatgaaccaccatgagcgcgaggagaagaagttccgcgaccagcgcagccagctcctgcgcgcccgcatgctcaatgccgagtgctttgcccaatgggatgccgccgcccacgagctcgacgtcctcgagggcaacgaggactggaaggtcgacacctccactggagactacaacccggatctgctcgaggaccgactacgcgagctcgatgaggcgcgtctgaactgcgacatgcgagccatgatgcatatcgtccgcacggctctgtcgcgcgacctcggcggtatgggcaatatcgatctatatcgacactcttattgcggcacaaagaagctgatagagcgatatgttgattcgaccctgaagaccatcaccaccctggtcgatacaagtgcgcaactagatccctattgtctacctgatgatctcgggccgagagacttgctcgattccatgctgtatgctcgtcaaagctttggccgcagcgcactgcttctctcgggtggcggtactttcggcatgtctcatatcggcgtcctaaaggcattgtatgaggccaagcttctaccgcgcattatctccggggcgtctgccggttctatcgtgtgcgccgtgttctgctccaagaccgatgatgaagttcctcagcttatccaagattttcccaatggagatttggcggtattcgaagaggaaggaaacgaggatggtctccttgatcatcttagaaggatgctcactgagggcaactggtctgatatcaaacacttgacgcgtgtcatgcgcgatctactaggcgacatcacgtttcaggaggcttacaaccggacgaggcgcatctgcaatatttgtgtctctacggcatctatctacgaactacctcggctcctcaactatgtcacggcacctaatgttatgatttggtctgccgtggcaacctcttgctccgttccgcttgtcttctcggccggcgcgttgctcgtcaagaacccgttgacgggagagcacagtccctggaacccgaccccacaggcatggatcgacggatcggtcgataatgacttgccaatgactcgactggccgagatgttcaacgtcaatcatttcatcgtttcgcaagtgaacccgcacgttgtgccgttcttggccaaggaggacaccgcaggtcccataatccgcgatcaccattctgtctacaaagaggagaccgattggttacataccatgacttcacttgccaagagtgaggccttgcatagaatgcaattaatggcagaaataggggtatttcccaacttagtcagcaagctcagatctatcctcagccagaaatattccggcgatatcaatatcttacccgcaataggagtacttgaccttcctaatatcctaaagaatccaaccatcgatttcatgacgcggtcgtgtctcctcggcgaacgagcaacgtggcccaagctatctcgcataagagatcgttgtgccatcgagctcgccctggaccgcgccgttcacgctcttcgagcgcgggtcgtcttcagcaagagccaggtcgaccttaggaggatggcgacgggctccttgacgtcggcacacagtaggggcagccatgaacccctggcatcaggaccgtcagccgtgcagcgcatctcatccaaggataagctcaaacaccggcaaagacgattgagcgccggcaatttgttaaacccacatatttacaatgtcgctcacgatgcgccgtacaaggtcacagacgacgacaccgacgacgaggaaaggctagagatgaccctgcgtcatcatcgtgggaagccgaaaatgaaattgaagaaacttccaaagagtaatggtacgccgagcggggccaagacgggaccgataatatcgtccacgtcgggaggagacgagtttgatttctctcagccgctcacgccgccgaatcgagaaaacgatagtgggcgcgagaagaaactttctacaccaggtgccctaggctctaggttgaagacagaatgttccgaacccatcaccggtacgacgtcctcggcgacttctccaccgtccgtaccgaccaaggacgtcgggttcgatacgagcgatacgcattcttcggatgctgatatcgagagtcatactgatgccgatatatctgatttcgcgatacggtcgcctatgcctagggatgaggagaattgggtgattcaggataaggccaagggagcgattgcagtcccgcttgtggatgacatgttctcgcttgcgaggaaggagaggagcggaaacggtgttgatgagggtgttgatccttggggctgatttgggatggatgcatagcacgagctgttcacgttataggacggaatttggctgggatttcggagggagggatcatggcttgatgagtgataatctggacaggcaggagtaaacggcaactgatatatttcttacggtatacctacgcattcacatgcatctgaggacaggagcattacatagttgcatacttagatcaacgtttttcttttgtgcttatagcattgggggatccattgggcgatggattatgcaagggatattggcatgaattggtcggggttagcattgatataaatataagcat

SEQ ID NO: 232 - DNA, 3462 bp, Muscodor strobelii
  misc_feature: SGI cDNA ID NO. 559638
  misc_feature: Reduced expression when VOC is produced
  misc_feature: Encodes the peptide sequence at SEQ ID NO 233
atggccccgacatacatcaaggtcccccagagggaagcgtcgggagcaacgctgcaaagcccgagcgctccgcgatgggcgaccacgacgctccgggtgggcggcatgacatgcggcgcatgcacctcggccgttgaagctggcttcaagggcgtcgacggcgtcggcaacgtctccgtcagtctcgtcatggagcgcgccgtcgtcatgcacgacccccagcgcatccccgcagacgaggtgagggacatcatcgaggaccgtggcttcgaagccgaggtcctctcgacatatatcccctcgcccctcgtcactccgaatcgcgcgaccgccgacgtcgagaacgccgggccacccaccaccgtgaccacgattgctgtcgaaggcatgacctgcggcgcgtgtacctctgccgtcgaaggagggtttgcagacgtcacaggcgtcaagcatttcagcatttccttgttgtccgagcgggccgttgtcgagcacgatgcgacgttgttgtcagcagataagataatagagatcatcgaagaccggggcttcggcgcaaccttgatagacagcgaggagtccaaagccgccaaggccacgaaagccggactcgaggagctgaagccgtctatggcgacgtccacaatcacaatcgagggaatgacctgtggtgcttgcacttcagctgtcgaaggcggattcaccggtctcgatggtatcgtgcgcttcaatatcagcttactggctgagagggcagtcatcacgcatgacccaacaaaggtccccgcagagaagatagtcgaaatcatcgaggataggggcttcgatgccaagatattgtctaccacctttgatacctctgaccaaaactctgcatcttcagcgcagttcaagatctacgggaacccggatgcgaaggctgccaagggtatcgaggacgcactattggccctctccggagtcagctctgccaagttgagtttgtccaccgcaaggctcaccgtcgcgcatcagcccggtgtcactgggcttcgtactatcgtagagacgatagagagcctcggcttcaatgcattggtcgccgacaacgacgacaacaacgcgcaactagaatcgttagccaagacaaaagagatccaggagtggcggagagccttccaaatctcgctttcgtttgctctgcccgtcttcttcatcggcatgattttccccatggtcctccccatactagattttggaggcctgcaacttattcccggcctcttcctaggcgatatcatatgtttggttttgacgatacccgttcagtttggcattgggaagcgattttacatatcggcatacaagtctctcaagcatggctctcccaccatggacgttctcgtggttctgggcacatccgctgccttctttttcagcattttcaccatgaccgtttcggttctttctccgccgcactcacggcccggcactatcttcgacacaagcactatgttgatcactttcatcacgctcggccgctttctagagaaccgtgccaagggtcagacttcatccgccctttcgcgactcatgtctctcgcaccctccatggctactatctacgctgaccccattgccgctgaaaaggctgccgaagcttggaacagcgccgtttctgaggaccctaaaacccctaaagatggaaacgcggcggaagagaagatcattcctaccgagctcatctcagtcggcgatgtcgtcatcattcgccccggagacaagattcctgcggatggtattatcgttcgtggtgagacctatgtggacgaaagtatggtaacgggtgaggctatacctgttcagaaaaagaagggaagcagcgtcatcggtggcacggtcaatgggcacgggcgtgtggatttccgtgttactagagctggtcgtgacacgcaactgagccaaattgtcaaacttgttcaggatgcccagacgactcgcgctccaattcaacgcctcgccgacactttggctggttattttgtaccgacgattcttattcttggtttccttacctttatcacttggatgatcctcagccacgttctcgtcaaccctcccaagatcttccttcaggagcagagtggcggcaagctcatggtctgcgtcaaactttgcatcgctgtcattgtctttgcttgcccctgcgctttgggtctggccacgcccactgctgtcatggttggtaccggagtcggtgcggagaacggcattcttgtcaaaggtggagctgcacttgagaccagtaccaagatcacgcaggttgtcctcgacaagacaggcactatcacctacggcaaaatgagcgtggctgtggcgaatttaccctctatctggcaagataatgactggcgccgacggctgtggtggactattgtcggcctcgccgagacaggtagcgaacatcctatcggtaaagctatcctgggagctgcgcgtaccgaactgggtctcgatggtgaatctgctgttgaaggtagtgttggcgacttcagggctgctgttggacgaggtatcagcgcagccgtcgagcccgccagcagcgcagaacgcaaacgatataacgtattgattggcagtgtgcgcttccttcgcgagagtagcattaacgtgcccgagtccgcggtcgaagcctcggaggagatcaacgcgagagctaacagcaaatctggcaaatctacttcgggaacgaccagcatcttcatcgctatcgacggtacctacgccggtcatctttgcttagcagacaccatcaaagacggagctgccgttgctattgctgctctgcatcgcatgggtatcaagaccgccatcgtcactggtgatcagcgatctactgctctcgctgtagcagcccaagtcggtattgcggaggagaacgtctgggctggcgtctcgcctgatcagaagcaggagatcatcctccagctcaaggaacagggtgagtgcgttgctatggttggcgatggtatcaacgattcgccagcccttgccaccgccgatgttggcattgctatggcctccggaacagacgtggctatggaggcggcggatgtcgttctcatgcgacccaacgagcttatggacgtacccgccgctctgtgccttgcgcgcaccatcttcacgcgcatcaagctcaacttggcctgggcttgcgtatataaccttgtcggcctgccattcgctatgggctttttctgccgctgggtttccacttacatcccctcgccgcaggcgccgctatggccacaagcagtatggatggacgacgccctgctcgcggagaagggtggtcttaagaagagaggacgcgggtggggctttgacgccctggtcgtgaaggccagggatctcgtgggcaggaggacagtacgggatgagggttatgtcccgctcaccacgcttgagcacgctgatatatga

SEQ ID NO: 233 - protein, 1153 aa, Muscodor strobelii
  misc_feature: SGI Peptide ID NO. 559638
  misc_feature (30)..(94): Pfam Id: PF00403 Pfam Desc: Heavy-metal-associated domain
  misc_feature (124)..(188): Pfam Id: PF00403 Pfam Desc: Heavy-metal-associated domain
  misc_feature (215)..(279): Pfam Id: PF00403 Pfam Desc: Heavy-metal-associated domain
  misc_feature (296)..(360): Pfam Id: PF00403 Pfam Desc: Heavy-metal-associated domain
  misc_feature (765)..(1023): Pfam Id: PF00702 Pfam Desc: haloacid dehalogenase-like hydrolase
  misc_feature (498)..(761): Pfam Id: PF00122 Pfam Desc: E1-E2 ATPase
  misc_feature (1)..(1141): NCBI GI: 39943288 Blast Desc: MGG_03724 [Magnaporthe grisea 70-15] gi|145009678|gb|EDJ94334.1| MGG_03724 [Magnaporthe grisea 70-15]
  misc_feature (1)..(1152): NCBI GI: 85117384 Blast Desc: NCU08341 [Neurospora crassa OR74A] gi|28927050|gb|EAA36008.1| NCU08341 [Neurospora crassa OR74A]
  misc_feature (1)..(1152): NCBI GI: 24528450 Blast Desc: CLAP1 [Glomerella lindemuthiana]
  misc_feature (17)..(1149): NCBI GI: 116182296 Blast Desc: CHGG_01776 [Chaetomium globosum CBS 148.51] gi|88186073|gb|EAQ93541.1| CHGG_01776 [Chaetomium globosum CBS 148.51]
  misc_feature (1)..(1148): NCBI GI: 110556603 Blast Desc: copper-transporting P-type ATPase [Colletotrichum lagenarium]
  misc_feature (19)..(1150): NCBI GI: 171695358 Blast Desc: protein product [Podospora anserina] gi|170947921|emb|CAP60085.1| protein product [Podospora anserina]
  misc_feature (27)..(1149): NCBI GI: 154299891 Blast Desc: BC1G_10836 [Botryotinia fuckeliana B05.10] gi|150857116|gb|EDN32308.1| BC1G_10836 [Botryotinia fuckeliana B05.10]
  misc_feature (1)..(1079): NCBI GI: 156053616 Blast Desc: SS1G_05655 [Sclerotinia sclerotiorum 1980] gi|154703436|gb|EDO03175.1| SS1G_05655 [Sclerotinia sclerotiorum 1980]
  misc_feature (1)..(1153): NCBI GI: 256730813 Blast Desc: NECHADRAFT_30490 [Nectria haematococca mpVI 77-13-4]
  misc_feature (1)..(1153): NCBI GI: 261355210 Blast Desc: copper-transporting ATPase RAN1 [Verticillium albo-atrum VaMs.102]
  misc_feature (3)..(1079): SWISSPROT Homolog: EC 3.6.3.4 Copper-exporting ATPase
  misc_feature: Useful for introducing or modulating the production of volatile compounds
MAPTYIKVPQREASGATLQSPSAPRWATTTLRVGGMTCGACTSAVEAGFKGVDGVGNVSVSLVMERAVVMHDPQRIPADEVRDIIEDRGFEAEVLSTYIPSPLVTPNRATADVENAGPPTTVTTIAVEGMTCGACTSAVEGGFADVTGVKHFSISLLSERAVVEHDATLLSADKIIEIIEDRGFGATLIDSEESKAAKATKAGLEELKPSMATSTITIEGMTCGACTSAVEGGFTGLDGIVRFNISLLAERAVITHDPTKVPAEKIVEIIEDRGFDAKILSTTFDTSDQNSASSAQFKIYGNPDAKAAKGIEDALLALSGVSSAKLSLSTARLTVAHQPGVTGLRTIVETIESLGFNALVADNDDNNAQLESLAKTKEIQEWRRAFQISLSFALPVFFIGMIFPMVLPILDFGGLQLIPGLFLGDIICLVLTIPVQFGIGKRFYISAYKSLKHGSPTMDVLVVLGTSAAFFFSIFTMTVSVLSPPHSRPGTIFDTSTMLITFITLGRFLENRAKGQTSSALSRLMSLAPSMATIYADPIAAEKAAEAWNSAVSEDPKTPKDGNAAEEKIIPTELISVGDVVIIRPGDKIPADGIIVRGETYVDESMVTGEAIPVQKKKGSSVIGGTVNGHGRVDFRVTRAGRDTQLSQIVKLVQDAQTTRAPIQRLADTLAGYFVPTILILGFLTFITWMILSHVLVNPPKIFLQEQSGGKLMVCVKLCIAVIVFACPCALGLATPTAVMVGTGVGAENGILVKGGAALETSTKITQVVLDKTGTITYGKMSVAVANLPSIWQDNDWRRRLWWTIVGLAETGSEHPIGKAILGAARTELGLDGESAVEGSVGDFRAAVGRGISAAVEPASSAERKRYNVLIGSVRFLRESSINVPESAVEASEEINARANSKSGKSTSGTTSIFIAIDGTYAGHLCLADTIKDGAAVAIAALHRMGIKTAIVTGDQRSTALAVAAQVGIAEENVWAGVSPDQKQEIILQLKEQGECVAMVGDGINDSPALATADVGIAMASGTDVAMEAADVVLMRPNELMDVPAALCLARTIFTRIKLNLAWACVYNLVGLPFAMGFFCRWVSTYIPSPQAPLWPQAVWMDDALLAEKGGLKKRGRGWGFDALVVKARDLVGRRTVRDEGYVPLTTLEHADI

SEQ ID NO: 234 - DNA, 5169 bp, Muscodor strobelii
  misc_feature: SGI EST ID NO. CUFF.1048.0
  misc_feature: Variant of the nucleotide sequence at SEQ ID NO 232
cgaaaaagcaacagatcgcatcatctcacctcttaatcagcaagattgggtgtacgtagaggacacgagcgtgcacttggctgatagcccggctggtgagggtggcgccatgggtttccggtttgggccaaatattggatggtggtgcgtaaagccgcgtacgttttgtgggttgcgcagccgtggatggctcgctggccgagcgtcttggccccgtcaaacaagctccgaccaagcccgcagcaagcacgggaacaacgccctaccagacggccaggaggctagaaccgacaagttgacaagcgaggtaagggtcagactactgtgtaccttgcagtgcgttgcaacgactacgtgtctactgggagccacgacgagtacccatttcattgaccatatttgcgatgcgctgtggtgggagaaggcgggattattggtggtggtctgatgatgtagtctgacaaggaaaggtgactctatgcggtggcactggaacgtgatcggacttcttatcaaaccatttccaatctgactgtcagtcctggtccggcaaactgctctggcagaagttgagggatctacgccaatgcggtgatcttgagccgtattctacatacgcgatcccatgcatgtgtacggcgtacaagggagagaaggcggtgacatcgatacctaggtatatatcttgtacggccgtgacttcttttgcttccttgggagcagttgtttacctacatgtactttaactttaaacgctacatattctgctcctgggcctatgtaaagtttggaagagaaggttccctgcaaaagcaaaaggcggttcttgttcctgagtccagcactcgtaacaagagcgagtcgcgagacacatggaagagtggcccggggctaagggtcaagggtatgcccatgctctgcccatgtcgggattcgggacaaggacccccagggaccaacccccctccacttcgatggtgaaatcgttacttgtttggcgctttgaagtcgggagttccatctgtgttgcaaagcgcccgtgtcttattaatctagcgtgcccgcctcgcctcgggagctggctgagaagtcggaactcgattcttctttggccacacctcgacgactgtcctttcccattccctttccctttggcatatcatattaatcggccttggctgtgcgcagtcagtcgtatgccactgcacgacaacatatacctcgtgtttctttgttagatacctccttttgcagtaaataatattctgtgcactatgccattcattgcgtagcgagaacccccgagacagcccgccgccatctgtgtacatatctcccccaacgtaaaatcacaccactgccctcttctgcccttctccgctctttctcctcctctcccttctcgccgagaggcgcagtccaccatggccccgacatacatcaaggtcccccagagggaagcgtcgggagcaacgctgcaaagcccgagcgctccgcgatgggcgaccacgacgctccgggtgggcggcatgacatgcggcgcatgcacctcggccgttgaagctggcttcaagggcgtcgacggcgtcggcaacgtctccgtcagtctcgtcatggagcgcgccgtcgtcatgcacgacccccagcgcatccccgcagacgaggtgagggacatcatcgaggaccgtggcttcgaagccgaggtcctctcgacatatatcccctcgcccctcgtcactccgaatcgcgcgaccgccgacgtcgagaacgccgggccacccaccaccgtgaccacgattgctgtcgaaggcatgacctgcggcgcgtgtacctctgccgtcgaaggagggtttgcagacgtcacaggcgtcaagcatttcagcatttccttgttgtccgagcgggccgttgtcgagcacgatgcgacgttgttgtcagcagataagataatagagatcatcgaagaccggggcttcggcgcaaccttgatagacagcgaggagtccaaagccgccaaggccacgaaagccggactcgaggagctgaagccgtctatggcgacgtccacaatcacaatcgagggaatgacctgtggtgcttgcacttcagctgtcgaaggcggattcaccggtctcgatggtatcgtgcgcttcaatatcagcttactggctgagagggcagtcatcacgcatgacccaacaaaggtccccgcagagaagatagtcgaaatcatcgaggataggggcttcgatgccaagatattgtctaccacctttgatacctctgaccaaaactctgcatcttcagcgcagttcaagatctacgggaacccggatgcgaaggctgccaagggtatcgaggacgcactattggccctctccggagtcagctctgccaagttgagtttgtccaccgcaaggctcaccgtcgcgcatcagcccggtgtcactgggcttcgtactatcgtagagacgatagagagcctcggcttcaatgcattggtcgccgacaacgacgacaacaacgcgcaactagaatcgttagccaagacaaaagagatccaggagtggcggagagccttccaaatctcgctttcgtttgctctgcccgtcttcttcatcggcatgattttccccatggtcctccccatactagattttggaggcctgcaacttattcccggcctcttcctaggcgatatcatatgtttggttttgacgatacccgttcagtttggcattgggaagcgattttacatatcggcatacaagtctctcaagcatggctctcccaccatggacgttctcgtggttctgggcacatccgctgccttctttttcagcattttcaccatgaccgtttcggttctttctccgccgcactcacggcccggcactatcttcgacacaagcactatgttgatcactttcatcacgctcggccgctttctagagaaccgtgccaagggtcagacttcatccgccctttcgcgactcatgtctctcgcaccctccatggctactatctacgctgaccccattgccgctgaaaaggctgccgaagcttggaacagcgccgtttctgaggaccctaaaacccctaaagatggaaacgcggcggaagagaagatcattcctaccgagctcatctcagtcggcgatgtcgtcatcattcgccccggagacaagattcctgcggatggtattatcgttcgtggtgagacctatgtggacgaaagtatggtaacgggtgaggctatacctgttcagaaaaagaagggaagcagcgtcatcggtggcacggtcaatgggcacgggcgtgtggatttccgtgttactagagctggtcgtgacacgcaactgagccaaattgtcaaacttgttcaggatgcccagacgactcgcgctccaattcaacgcctcgccgacactttggctggttattttgtaccgacgattcttattcttggtttccttacctttatcacttggatgatcctcagccacgttctcgtcaaccctcccaagatcttccttcaggagcagagtggcggcaagctcatggtctgcgtcaaactttgcatcgctgtcattgtctttgcttgcccctgcgctttgggtctggccacgcccactgctgtcatggttggtaccggagtcggtgcggagaacggcattcttgtcaaaggtggagctgcacttgagaccagtaccaagatcacgcaggttgtcctcgacaagacaggcactatcacctacggcaaaatgagcgtggctgtggcgaatttaccctctatctggcaagataatgactggcgccgacggctgtggtggactattgtcggcctcgccgagacaggtagcgaacatcctatcggtaaagctatcctgggagctgcgcgtaccgaactgggtctcgatggtgaatctgctgttgaaggtagtgttggcgacttcagggctgctgttggacgaggtatcagcgcagccgtcgagcccgccagcagcgcagaacgcaaacgatataacgtattgattggcagtgtgcgcttccttcgcgagagtagcattaacgtgcccgagtccgcggtcgaagcctcggaggagatcaacgcgagagctaacagcaaatctggcaaatctacttcgggaacgaccagcatcttcatcgctatcgacggtacctacgccggtcatctttgcttagcagacaccatcaaagacggagctgccgttgctattgctgctctgcatcgcatgggtatcaagaccgccatcgtcactggtgatcagcgatctactgctctcgctgtagcagcccaagtcggtattgcggaggagaacgtctgggctggcgtctcgcctgatcagaagcaggagatcatcctccagctcaaggaacagggtgagtgcgttgctatggttggcgatggtatcaacgattcgccagcccttgccaccgccgatgttggcattgctatggcctccggaacagacgtggctatggaggcggcggatgtcgttctcatgcgacccaacgagcttatggacgtacccgccgctctgtgccttgcgcgcaccatcttcacgcgcatcaagctcaacttggcctgggcttgcgtatataaccttgtcggcctgccattcgctatgggctttttctgccgctgggtttccacttacatcccctcgccgcaggcgccgctatggccacaagcagtgtcagcgtggttgtatcttctctgctactcaaattctggcataggcccagatggatggacgacgccctgctcgcggagaagggtggtcttaagaagagaggacgcgggtggggctttgacgccctggtcgtgaaggccagggatctcgtgggcaggaggacagtacgggatgagggttatgtcccgctcaccacgcttgagcacgctgatatatgatccccccccctcccttttctttttcttttatcttattctccctggattaagagcgttgcattggagtttcggtagcgccttttggctatggattgaattatcaaactccacctttgcacataggattctacttattgcctagttattcatctacctggccattgaagactagtattgatagcattgtatatacatgttttgttatgaatatgactatgcttcatacgtgtaat

SEQ ID NO: 235 - DNA, 1668 bp, Muscodor strobelii
  misc_feature: SGI cDNA ID NO. 559639
  misc_feature: Elevated expression when VOC is produced
  misc_feature: Encodes the peptide sequence at SEQ ID NO 236
atgcaaaccgaaccctcggaagcctcatcttccaaacgatacgcaacctctgaggattgggcgagattccagaatgtcatcgtgcggctgtatgtggaagagaacaagaccctagacgaggttaagcagcatttggaagagaatcatggatttgtcgccaccatttccatgtataagaggcagctcgcttcgtggaatgcctttaagaatcttcggtttgacgaagtcttgcagatcctccgcctaaagaggcaacgagacgcagagcgcaaaacctccatcttttacgtcagagataggaaagtggacatcgatagtcttcaggtctacatatctcgtaatccagctctacacgccaaactcgaatctggagaggcaccccactcagatgcagtccgcgatgtcaggtgtcactcaccacctcccgcagacattcgaggtgatgcctcgccggagtctgccaaagctaaggaaaatgcgccatcagcgaccgcaaaccctgaacctttgtcttatgacgatttgttaagaaatcttcgtacatacctatgtggaagcttcgagtctggtgcttggcttaaatctcaggtacagtgttggagtgcaaggggtcaccgtggccctgcagaactcttgaagtccttgctagatagatgcatgactgcggctttggcagttgggcgtcaagtcgagcctgttgctatacgacatgctctcgatgccccatttacgctactcattcgagtctttaggaacccgccgccagacctgatcccaagggtcctctgcattgcagctcggctggagtttgtgggtcgaaaggagatccagaccatcttgctacagttctgctatgatctttcaatcgccctgtatcagcgggatcacccgctctcagagttctggaagactctcctcgacataccggcggctgaaaggagggcggcaattgactgtatacttggctgttgtgtctcgatattcgaggagcacctaggtgttgatcactcactgtcaacagaggtgttcttgctgtattttgatgcattggaaaggcatagagaccccgtgtcacaactcgagagccttcgtcgccagctggccaaagttgacgagcagaagatagacccttcggttttaggaatggtcaaacttgaacacgctctagcgacttgcaagctaaggatagctgagaatcgactcgatgaagcggaggaggttctgactaaactagacgacacaccacttttaccccgagacgaatctttccgctgcgtttggttagggtatattcgatggacaaaaggagatattacagttgcagaaaggtcatatcaggactctgtcgaggccgccaagcgcacaggttcccgcgattgcgttggggaagctctgtttcaactcgaaacattctaccttcacactaaagaccctcttcgagcagagcagatacgagctgaaaggctagatgtccttcgacagctggattctatcgtatggaccgatgagcacagtccgtcccctccgaaggccgttggggctaagtccgaagtaacggtaatacgaattggatcagatgcgcatagtagagaatggcaaccttctgcgtttgccttaatgatggagcaccacagactccttagtaatgagatatctgccggcgtttag

SEQ ID NO: 236 - protein, 555 aa, Muscodor strobelii
  misc_feature: SGI Peptide ID NO. 559639
  misc_feature (8)..(520): NCBI GI: 256728689 Blast Desc: NECHADRAFT_96871 [Nectria haematococca mpVI 77-13-4]
  misc_feature (17)..(513): NCBI GI: 46109918 Blast Desc: FG01841.1 [Gibberella zeae PH-1]
  misc_feature (1)..(312): NCBI GI: 116197018 Blast Desc: CHGG_05107 [Chaetomium globosum CBS 148.51] gi|88181020|gb|EAQ88488.1| CHGG_05107 [Chaetomium globosum CBS 148.51]
  misc_feature (20)..(485): NCBI GI: 145605984 Blast Desc: MGG_06762 [Magnaporthe grisea 70-15] gi|145013719|gb|EDJ98360.1| MGG_06762 [Magnaporthe grisea 70-15]
  misc_feature (57)..(489): NCBI GI: 261360857 Blast Desc: conserved [Verticillium albo-atrum VaMs.102]
  misc_feature (5)..(192): NCBI GI: 256722369 Blast Desc: [Nectria haematococca mpVI 77-13-4]
  misc_feature (14)..(142): NCBI GI: 164425649 Blast Desc: NCU06072 [Neurospora crassa OR74A] gi|157071008|gb|EAA30599.2| [Neurospora crassa OR74A]
  misc_feature (11)..(137): NCBI GI: 46109922 Blast Desc: FG01843.1 [Gibberella zeae PH-1]
  misc_feature (11)..(159): NCBI GI: 256728687 Blast Desc: NECHADRAFT_85885 [Nectria haematococca mpVI 77-13-4]
  misc_feature (17)..(171): NCBI GI: 255945625 Blast Desc: Pc20g10910 [Penicillium chrysogenum Wisconsin 54-1255] gi|211588315|emb|CAP86420.1| Pc20g10910 [Penicillium chrysogenum Wisconsin 54-1255]
  misc_feature: Useful for introducing or modulating the production of volatile compounds
MQTEPSEASSSKRYATSEDWARFQNVIVRLYVEENKTLDEVKQHLEENHGFVATISMYKRQLASWNAFKNLRFDEVLQILRLKRQRDAERKTSIFYVRDRKVDIDSLQVYISRNPALHAKLESGEAPHSDAVRDVRCHSPPPADIRGDASPESAKAKENAPSATANPEPLSYDDLLRNLRTYLCGSFESGAWLKSQVQCWSARGHRGPAELLKSLLDRCMTAALAVGRQVEPVAIRHALDAPFTLLIRVFRNPPPDLIPRVLCIAARLEFVGRKEIQTILLQFCYDLSIALYQRDHPLSEFWKTLLDIPAAERRAAIDCILGCCVSIFEEHLGVDHSLSTEVFLLYFDALERHRDPVSQLESLRRQLAKVDEQKIDPSVLGMVKLEHALATCKLRIAENRLDEAEEVLTKLDDTPLLPRDESFRCVWLGYIRWTKGDITVAERSYQDSVEAAKRTGSRDCVGEALFQLETFYLHTKDPLRAEQIRAERLDVLRQLDSIVWTDEHSPSPPKAVGAKSEVTVIRIGSDAHSREWQPSAFALMMEHHRLLSNEISAGV

SEQ ID NO: 237 - DNA, 2240 bp, Muscodor strobelii
  misc_feature: SGI EST ID NO. CUFF.606.1
  misc_feature: Variant of the nucleotide sequence at SEQ ID NO 235
cctgtctctcccacttgctcccagtccaaaccccggcagaggccgggcaatagccaatcgaggcaatagttttctgcagctcgggtgttgctttcagctgtcttgaacccagcctaaacgtggttttcagcgcagcctgtccgcgctagactcgtcgctgcagctgacttcttcccccattgggccacccgtggggacgttatccaatcaccaacaaagtcatcgcatcctggagggtcatccgcctccgctcttcttatacatgtatcaactttgcctcatcctcatatccagatgtagatggccgtatttgacagtggctacctagacctcgtccgtagctcgacacacacgatcacaagaacacttaacattcaaatagcttccaccgactcttcttaagtagcaccgaggtatgtaggtagacatttgcgctgttcattctcccagcatgttagtgccatcaatcgaccacgataccgtgtcttgtcaaccgccgctgtcgtagagctttcaccggcctgcctcgtccctcgagagccgcgccctggtcatgcaaaccgaaccctcggaagcctcatcttccaaacgatacgcaacctctgaggattgggcgagattccagaatgtcatcgtgcggctgtatgtggaagagaacaagaccctagacgaggttaagcagcatttggaagagaatcatggatttgtcgccaccatttccatgtataagaggcagctcgcttcgtggaatgcctttaagaatcttcggtttgacgaagtcttgcagatcctccgcctaaagaggcaacgagacgcagagcgcaaaacctccatcttttacgtcagagataggaaagtggacatcgatagtcttcaggtctacatatctcgtaatccagctctacacgccaaactcgaatctggagaggcaccccactcagatgcagtccgcgatgtcaggtgtcactcaccacctcccgcagacattcgaggtgatgcctcgccggagtctgccaaagctaaggaaaatgcgccatcagcgaccgcaaaccctgaacctttgtcttatgacgatttgttaagaaatcttcgtacatacctatgtggaagcttcgagtctggtgcttggcttaaatctcaggtacagtgttggagtgcaaggggtcaccgtggccctgcagaactcttgaagtccttgctagatagatgcatgactgcggctttggcagttgggcgtcaagtcgagcctgttgctatacgacatgctctcgatgccccatttacgctactcattcgagtctttaggaacccgccgccagacctgatcccaagggtcctctgcattgcagctcggctggagtttgtgggtcgaaaggagatccagaccatcttgctacagttctgctatgatctttcaatcgccctgtatcagcgggatcacccgctctcagagttctggaagactctcctcgacataccggcggctgaaaggagggcggcaattgactgtatacttggctgttgtgtctcgatattcgaggagcacctaggtgttgatcactcactgtcaacagaggtgttcttgctgtattttgatgcattggaaaggcatagagaccccgtgtcacaactcgagagccttcgtcgccagctggccaaagttgacgagcagaagatagacccttcggttttaggaatggtcaaacttgaacacgctctagcgacttgcaagctaaggatagctgagaatcgactcgatgaagcggaggaggttctgactaaactagacgacacaccacttttaccccgagacgaatctttccgctgcgtttggttagggtatattcgatggacaaaaggagatattacagttgcagaaaggtcatatcaggactctgtcgaggccgccaagcgcacaggttcccgcgattgcgttggggaagctctgtttcaactcgaaacattctaccttcacactaaagaccctcttcgagcagagcagatacgagctgaaaggctagatgtccttcgacagctggattctatcgtatggaccgatgagcacagtccgtcccctccgaaggccgttggggctaagtccgaagtaacggtaatacgaattggatcagatgcgcatagtagagaatggcaaccttctgcgtttgccttaatgatggagcaccacagactccttagtaatgagatatctgccggcgtttagagtagagacagcaattgat

SEQ ID NO: 238 - DNA, 1410 bp, Muscodor strobelii
  misc_feature: SGI cDNA ID NO. 559640
  misc_feature: Encodes the peptide sequence at SEQ ID NO 239
atggaggaagtggaggaccgaaaggttcaatttcaggcgagacttggcaagtggcaggacatcatcagagatgatgtgagtgaggaataccaggaccttctgtattattggatccaagcaaatcgccacctttgcaagaccggaaacaaccgtttcacatcttggccatgccttactcagggtggcaacgcccgcatagatttgctcgaaggcaacgagtttgacacccgcttcatttggctgaagaggctttatgactttgacatcatctatttatgtttgggagacgagtactcccgaatggaagagaaagcggaggagctcaaacagtgctctccggccgaagatatgaaagcccagatgcgtcggcacctcaaatatgatcctaattcgtccctggagcaaagagccgattcgatcatgacaaggtggtgcatagctcatggagtgaataagttcgatgccctcccagctcatcccaacgatccctccagacggatcttcaccacgcctgccgactgtagagtcaagccagccccataccacgaggctacgagaagcagaagactccccaagccgaagcccgatccagaggaagaggaaactgacgaggaagttgatgaggatgatatgtctacctgcgaagccaagaaaatggacatggctcgagaggtagcactgagactcgtccaaactcctttgttcaagaacatcgttgaggagcaaaacgcgaagtctcggagggaggcggagactaaaaaagcagaagagaagcttgaagaggacaagaaacagcataaaagaatcaagaaccctgaagccgagatatacaggagaattgtggtcgagacacacagagcaaaagagctcgagaaagaggcgacgcggatactcatgtcgatggaggccgagaagcgcgagaaggaagagaccctgaaactcctggctgagaaaaccaagaaactcgaggccgcgaagctcaagcaacaggagcaggcaaagcaggaacaacatgagagtcagcagccgtccgcttccggccgagttcctccatctgcagaaggtgtttttcaaggcggcatcccgctttacgcccgcgtacccggcaccggtcagtatgttccgatggatcagtggctcgactccgacagtgctcccttctctgctatgaatatttatgcacccaccaagaaacaggccgaggagcagcgtgttgaggaggaacccaagaaagacaccgaggtaaaggccaaggagaagcctgccgagaagaaagacaaggaggaggagaagtctgaggagatgcccgctgagaagaagggcaacgatgaggaggcagaggtgaagccccagccggccaagccccagaagaagcacaagaagaaggtcaaggcacgtgtcaagttttga

SEQ ID NO: 239 - protein, 469 aa, Muscodor strobelii
  misc_feature: SGI Peptide ID NO. 559640
MEEVEDRKVQFQARLGKWQDIIRDDVSEEYQDLLYYWIQANRHLCKTGNNRFTSWPCLTQGGNARIDLLEGNEFDTRFIWLKRLYDFDIIYLCLGDEYSRMEEKAEELKQCSPAEDMKAQMRRHLKYDPNSSLEQRADSIMTRWCIAHGVNKFDALPAHPNDPSRRIFTTPADCRVKPAPYHEATRSRRLPKPKPDPEEEETDEEVDEDDMSTCEAKKMDMAREVALRLVQTPLFKNIVEEQNAKSRREAETKKAEEKLEEDKKQHKRIKNPEAEIYRRIVVETHRAKELEKEATRILMSMEAEKREKEETLKLLAEKTKKLEAAKLKQQEQAKQEQHESQQPSASGRVPPSAEGVFQGGIPLYARVPGTGQYVPMDQWLDSDSAPFSAMNIYAPTKKQAEEQRVEEEPKKDTEVKAKEKPAEKKDKEEEKSEEMPAEKKGNDEEAEVKPQPAKPQKKHKKKVKARVKF

SEQ ID NO: 240 - DNA, 1863 bp, Muscodor strobelii
  misc_feature: SGI cDNA ID NO. 559641
  misc_feature: Elevated expression when VOC is produced
  misc_feature: Encodes the peptide sequence at SEQ ID NO 241
atgcaacgtctgcttgacaggatacttgggcgccggacgcaacagaaacattctgctccaaatgacactccaaaacatcatcccagtgtctctattgaccatgtaccatttaccatcaaggatgagccgctggacggccatcgccggatgaaggttcgtgttataggggctggattctcaggcatctaccttggaattagaataccgcaacgtctacgaaatatcgacctgcaaatctacgagaaaaatgccagtgtcggcggaacgtggtggctgaaccgatatccaggcattgcatgcgatgtcccagcacattcatatcaatactccttcaaccctaacccaaattggtcctccttctacgcgccaggatctgagatttgcgagtacctcaagaacactgccgaaaaatacggcgtgatgagatttaccaagctccgtcacgaggttaattcttgcaagtgggacagcgagaagaaaaaatggctacttgagatccgcaatctagacacagaagagaattttccggatgatgcagatgtgttgattgtggcgcgtggcctcctggccactcctgcttggcctgacatcgatggtcttaagcaattccaaggtgagcttgtgcattcagcacgatggaacgagaaatatgactacagaaataaacggataggcatcatagggaatgggtcaagcggcatacaaatagttcctagcctacaaaagatggacggagtacaattgtcatgttttgtcagaaataaaacttggatcttgaatccattcggcgaagcgatcatgaaggagctcgggatggatatcaacgaattggatttttctcctgagcgccgccaagagtttgctcggaatccagaagaattctaccgtttccgcaagacgatcgaggtcggaggaaacacaatccatgaagtctcgatgcgcgatacggctatgcagttaggcggtaaagccataacagaagcaaacatgcgaaaacgccttgcctcccgacccgacatcgctgattttcttatcccttctttcggcattggatgtcgtcgtccgacgccagggccggggtatttagaagcgcttaccaaagataacgtggaatttatcacggatggcatcaaatctataactggggaacacgttatgctgaaatccggacgtaaggtcgagctcgatgcactcgtttgtgccactggcttcagcgttagcgacgctcctccctttcccatcatcggacagggtggtcttacactcgccgagcgatataaacccgttccagaggcttatatgtctacagccattgactcgttcccgaatctcttcgtgatgctaggtccaaattcggccattggatcaggctcactcacaatgatcctcgaaagtattggagactatgcgataaagtgcatacgcaagctgcaaaaggaggactatgcctcgatgactatcaagcccgaaagaatgcgcgattggaaagaatactgttgcgagtatttcaagcagactgtctatacagaggactgtaagagttggtataagagtgatggtggaaaaggagatcgagtgatagcgctatggcctggaagtcctttgcatgcacttgaggcactgagagctcctcggtgggaggactacaactttgagagtcggtatggtggaaaatcgaatttgcttaaatggttgggcaatggatacagtataacgcacataaaagctggggacggagagaacatgggacagaagtatcaaggtgaccctgcttggtatttagaacccatgttgcaaagcgtaccgaccgagggtcagccagaaaacgacgcagagttcaagctgcgaccattttctcattag

SEQ ID NO: 241 - protein, 620 aa, Muscodor strobelii
  misc_feature: SGI Peptide ID NO. 559641
  misc_feature (14)..(620): NCBI GI: 46133963 Blast Desc: FG09121.1 [Gibberella zeae PH-1]
  misc_feature (35)..(620): NCBI GI: 256722110 Blast Desc: NECHADRAFT_98200 [Nectria haematococca mpVI 77-13-4]
  misc_feature (36)..(620): NCBI GI: 261359953 Blast Desc: conserved [Verticillium albo-atrum VaMs.102]
  misc_feature (23)..(620): NCBI GI: 256725406 Blast Desc: NECHADRAFT_45864 [Nectria haematococca mpVI 77-13-4]
  misc_feature (37)..(620): NCBI GI: 189199632 Blast Desc: conserved [Pyrenophora tritici-repentis Pt-1C-BFP] gi|187983252|gb|EDU48740.1| conserved [Pyrenophora tritici-repentis Pt-1C-BFP]
  misc_feature (39)..(620): NCBI GI: 242773607 Blast Desc: monooxygenase, [Talaromyces stipitatus ATCC 10500] gi|218721893|gb|EED21311.1| monooxygenase, [Talaromyces stipitatus ATCC 10500]
  misc_feature (36)..(620): NCBI GI: 171684563 Blast Desc: protein product [Podospora anserina] gi|170942242|emb|CAP67894.1| protein product [Podospora anserina]
  misc_feature (34)..(620): NCBI GI: 256727957 Blast Desc: NECHADRAFT_45940 [Nectria haematococca mpVI 77-13-4]
  misc_feature (18)..(620): NCBI GI: 212531643 Blast Desc: monooxygenase, [Penicillium marneffei ATCC 18224] gi|210071342|gb|EEA25431.1| monooxygenase, [Penicillium marneffei ATCC 18224]
  misc_feature (20)..(620): NCBI GI: 169608492 Blast Desc: SNOG_07326 [Phaeosphaeria nodorum SN15] gi|160701656|gb|EAT84792.2| SNOG_07326 [Phaeosphaeria nodorum SN15]
  misc_feature (40)..(522): SWISSPROT Homolog: EC 1.14.13.84 4-hydroxyacetophenone monooxygenase
  misc_feature: Useful for introducing or modulating the production of volatile compounds
MQRLLDRILGRRTQQKHSAPNDTPKHHPSVSIDHVPFTIKDEPLDGHRRMKVRVIGAGFSGIYLGIRIPQRLRNIDLQIYEKNASVGGTWWLNRYPGIACDVPAHSYQYSFNPNPNWSSFYAPGSEICEYLKNTAEKYGVMRFTKLRHEVNSCKWDSEKKKWLLEIRNLDTEENFPDDADVLIVARGLLATPAWPDIDGLKQFQGELVHSARWNEKYDYRNKRIGIIGNGSSGIQIVPSLQKMDGVQLSCFVRNKTWILNPFGEAIMKELGMDINELDFSPERRQEFARNPEEFYRFRKTIEVGGNTIHEVSMRDTAMQLGGKAITEANMRKRLASRPDIADFLIPSFGIGCRRPTPGPGYLEALTKDNVEFITDGIKSITGEHVMLKSGRKVELDALVCATGFSVSDAPPFPIIGQGGLTLAERYKPVPEAYMSTAIDSFPNLFVMLGPNSAIGSGSLTMILESIGDYAIKCIRKLQKEDYASMTIKPERMRDWKEYCCEYFKQTVYTEDCKSWYKSDGGKGDRVIALWPGSPLHALEALRAPRWEDYNFESRYGGKSNLLKWLGNGYSITHIKAGDGENMGQKYQGDPAWYLEPMLQSVPTEGQPENDAEFKLRPFSH

SEQ ID NO: 242 - DNA, 1599 bp, Muscodor strobelii
  misc_feature: SGI EST ID NO. CUFF.598.0
  misc_feature: Variant of the nucleotide sequence at SEQ ID NO 240
gcgatcccaaatcctactagtttgtgtgcaattactattaggtgataatccacatagctgatatggcaaccagataactgtagctcaaataattatttcaagccagaatacgtgcctcagttcataatgggttcggtttgatcttctagcatcgtccacgacggctgatgtggcagggaaatagacaacctcataatggttgtaattgtgaatgcgcttccaaacaagtggatgtgattccgggtgttattgccactgaacctggttgagggcgtcatagccgggtgaggggttcattatgccatctccttacttatagaattggagatgttgtgacatctccttgcatatgttacggcagaaagaaatgagctgtcaaattgaattgttcgccgactatacaaatattcgctaacgttgttcctacataaataaacgcgtaccggcttgctagattaccgagactgccacgtgggttgtgatactttaccctcatctagccaaggagtcggctgatcagctctgcatggaaagggcttggaatattctgatgggattgtagttcctccgactgtaataggaggccagaatgcaacgtctgcttgacaggatacttgggcgccggacgcaacagaaacattctgctccaaatgacactccaaaacatcatcccagtgtctctattgaccatgtaccatttaccatcaaggatgagccgctggacggccatcgccggatgaaggttcgtgttataggggctggattctcaggcatctaccttggaattagaataccgcaacgtctacgaaatatcgacctgcaaatctacgagaaaaatgccagtgtcggcggaacgtggtggctgaaccgatatccaggtgagtcgaagtattacttacctgagaagagaatgattacgctcatcgctagatctaggcattgcatgcgatgtcccagcacattcatatcaatactccttcaaccctaacccaaattggtcctccttctacgcgccaggatctgagatttgcgagtacctcaagaacactgccgaaaaatacggcgtgatgagatttaccaagctccgtcacgaggttaattcttgcaagtgggacagcgagaagaaaaaatggctacttgagatccgcaatctagacacagaagagaattttccggatgatgcagatgtgttgattgtggcgcgtggcctcctggccactcctgcttggcctgacatcgatggtcttaagcaattccaaggtgagcttgtgcattcagcacgatggaacgagaaatatgactacagaaataaacggataggcatcatagggaatgggtcaagcggcatacaaatagttcctagcctacaaaagatggacggagtacaattgtcatgttttgtcagaaataaaacttggatcttgaatccattcggcgaaggtaaggcagattcttcaccctgtcaagatcaataggatactcaaatagttatgcagcgatcatgaaggagctcgggatggatatcaacgaattggatttttctcctgagcgccgccaagagtttgctcggaatccagaagaattctaccgtttccgcaa

SEQ ID NO: 243 - DNA, 2115 bp, Muscodor strobelii
  misc_feature: SGI cDNA ID NO. 559642
  misc_feature: Encodes the peptide sequence at SEQ ID NO 244
atgacaacacgacagcctcaagttctgcctgaagatgtttttctagaccccgccagccggcaagaaatacggcctaaccagacagctcagcccgccgatcctcagtccttatccgccttgcaagatctcaaccgccaaagtacacaatccaaccgcgccatccacccaagcagcaatgacctcctacgattcattggtgaagatgactcgataagtgctctgccgccagcggcgttcagtcatatcaagttcgaaactcacacgacaaccccatcgccaccattatccggagcgacttctggcgactccaacgcccctcttgacacgacatcgcctgttgcgagggctaccaactctctttcgatctccaccgatacttccgcgcatcgtaaacggtccgacagtgggagaagccagaacggcggtctctttgcaagctctggccttgccatacagcgaaaacactcagcctcaaatctccaaccggtatcgagaacgcccagctggaagcagcactttgctaagggcatcagttctgctaccagctcggcctatccaagtcccgtgatatctgctatgggtgatgtgacaccgcttccctcgccattgttatcaagcgactcgcctggcccttggagacgacttgggccgcgccctccgtcgagagactcgagtattagaacagtgatgccggagtctgtcctggtcactaagagcggcgagtccgtagctgctgcaatcgaacaccaacacaagcgaaaggcatatgtcggactcaattctaaccacctcgtcgagcagagtagcggaaaggttgaacatgttcgtaacaggagtctcagtgaatatgtaccggatgcgaaaggggcaccacggaggcagattgctgtctcgtctggaaaagtgggccagattacggaagagcctcctaatgctctccgaagagaacccaacttgtccgaatcgagaggtgtgacgcccgcagcgaaaccaccaacacccccgccgagcgagtcttcgcaaagcaatgacagctctggcgccaaacgactccagggtgaatattttgaagcccacggcagaaaagataacagactgcggagatggcgcgggattaaagatctcggagaaggtactttcagtcgagtcatactggccacgacacagctcgatcccgaaaccaacgggccagatggcgcggctgatgtagcgaaattgggccggaagaaattagtcgccatcaaaatttgtgaacatggtccaaagggcggtgcctcggaagatcgaatcgaaatgagcttaaaacgagagcttgatatcatgcaatccgttaaccacccgtcattggtgcacttgaaggcctggaacatcgaaccgacacgggctttgttggtacttacctattgtcccggaggcgatttattcgatgtcgcatcgaactatcgtgattcgctgatagcgcccctgatacggaggattttcgccgaggttgtggatgcggtgagatatctccacagttgccgaattgtgcaccgagatattaaacttgaaaatgtgttggtcaatcttccaccgacagagctcaaagataaatcacaggattgggccatgtacccataccctgtcatcactctaacagatctcggcctctcacgccgcgtcactgatgacgagaagctagagacacgttgcggctcggatgactatgctgcacctgaagtaatcttggggcagccttacgacggccgagcaactgatgcttggtcgctgggcgtattgctctatgccctcgttgaggcccgcctacccttcgatcccccaccaggagcgagcgactatcaaagaatgcgtagccgcaccagccatcgtatcgcccgtgtcgagtggacatggattaaatatgccggagaggatggggatcacgacgcgaaccttgctttatttgagaaagacggcctcacaggcgctatggaaattacagagggtctattgcgacgtgcccggagccgatggtctatgggccagttggcagagcatgaatggactcgaggtgcgatccaagtcgagggcggcattcagcttcgggaagaagaagaaggccaggtggtattatga

SEQ ID NO: 244 - protein, 704 aa, Muscodor strobelii
  misc_feature: SGI Peptide ID NO. 559642
  misc_feature (369)..(682): Pfam Id: PF00069 Pfam Desc: Protein kinase domain
  misc_feature (369)..(632): Pfam Id: PF00069 Pfam Desc: Protein kinase domain
  misc_feature (372)..(566): Pfam Id: PF07714 Pfam Desc: Protein tyrosine kinase
  misc_feature (101)..(703): NCBI GI: 46109920 Blast Desc: FG01842.1 [Gibberella zeae PH-1]
  misc_feature (80)..(703): NCBI GI: 39977751 Blast Desc: MGG_06760 [Magnaporthe grisea 70-15] gi|145013721|gb|EDJ98362.1| MGG_06760 [Magnaporthe grisea 70-15]
  misc_feature (57)..(703): NCBI GI: 256728688 Blast Desc: [Nectria haematococca mpVI 77-13-4]
  misc_feature (79)..(703): NCBI GI: 85102244 Blast Desc: NCU04143 [Neurospora crassa OR74A] gi|16944413|emb|CAC28764.2| conserved [Neurospora crassa] gi|28922842|gb|EAA32063.1| conserved [Neurospora crassa OR74A]
  misc_feature (78)..(697): NCBI GI: 156045031 Blast Desc: SS1G_09704 [Sclerotinia sclerotiorum 1980] gi|154694099|gb|EDN93837.1| SS1G_09704 [Sclerotinia sclerotiorum 1980]
  misc_feature (146)..(695): NCBI GI: 171692451 Blast Desc: protein product [Podospora anserina] gi|170946174|emb|CAP72975.1| protein product [Podospora anserina]
  misc_feature (183)..(700): NCBI GI: 169619589 Blast Desc: SNOG_12993 [Phaeosphaeria nodorum SN15] gi|160703859|gb|EAT79793.2| SNOG_12993 [Phaeosphaeria nodorum SN15]
  misc_feature (183)..(699): NCBI GI: 189206832 Blast Desc: PTRG_09418 [Pyrenophora tritici-repentis Pt-1C-BFP] gi|187975843|gb|EDU42469.1| PTRG_09418 [Pyrenophora tritici-repentis Pt-1C-BFP]
  misc_feature (119)..(698): NCBI GI: 255933271 Blast Desc: Pc12g12980 [Penicillium chrysogenum Wisconsin 54-1255] gi|211582725|emb|CAP80925.1| Pc12g12980 [Penicillium chrysogenum Wisconsin 54-1255]
  misc_feature (159)..(698): NCBI GI: 121716244 Blast Desc: protein kinase, [Aspergillus clavatus NRRL 1] gi|119403888|gb|EAW14305.1| protein kinase, [Aspergillus clavatus NRRL 1]
MTTRQPQVLPEDVFLDPASRQEIRPNQTAQPADPQSLSALQDLNRQSTQSNRAIHPSSNDLLRFIGEDDSISALPPAAFSHIKFETHTTTPSPPLSGATSGDSNAPLDTTSPVARATNSLSISTDTSAHRKRSDSGRSQNGGLFASSGLAIQRKHSASNLQPVSRTPSWKQHFAKGISSATSSAYPSPVISAMGDVTPLPSPLLSSDSPGPWRRLGPRPPSRDSSIRTVMPESVLVTKSGESVAAAIEHQHKRKAYVGLNSNHLVEQSSGKVEHVRNRSLSEYVPDAKGAPRRQIAVSSGKVGQITEEPPNALRREPNLSESRGVTPAAKPPTPPPSESSQSNDSSGAKRLQGEYFEAHGRKDNRLRRWRGIKDLGEGTFSRVILATTQLDPETNGPDGAADVAKLGRKKLVAIKICEHGPKGGASEDRIEMSLKRELDIMQSVNHPSLVHLKAWNIEPTRALLVLTYCPGGDLFDVASNYRDSLIAPLIRRIFAEVVDAVRYLHSCRIVHRDIKLENVLVNLPPTELKDKSQDWAMYPYPVITLTDLGLSRRVTDDEKLETRCGSDDYAAPEVILGQPYDGRATDAWSLGVLLYALVEARLPFDPPPGASDYQRMRSRTSHRIARVEWTWIKYAGEDGDHDANLALFEKDGLTGAMEITEGLLRRARSRWSMGQLAEHEWTRGAIQVEGGIQLREEEEGQVVL

SEQ ID NO: 245 - DNA, 780 bp, Muscodor strobelii
  misc_feature: SGI cDNA ID NO. 559643
  misc_feature: Encodes the peptide sequence at SEQ ID NO 246
atgatgccaaacatcatcagtctcaccgcgctcgcagcgacggtcttctcggccaccgtgacaggacaatgtacgcgtgaaacacttgtcgcagcgacatccaagctgctcgatgcccaaacagctggaaagccagacacgctcggctcgctcgacggggtcgcatatctcgagcaattcaagactgcagacgtcacgaaaggcattctgacaacacctgtcactatcgacttcaaccgcagtctaattgacacgacccaatgcgccacttacactgagatggtcgccgcgaagcaagcgcacccttacgtcatcggcacacagatgcacttcagtcctgacgggagcaaaatatccaacatcagcaccctggtgacagaccaaggcgactggctcttcaacgcaacgggtaccttgtactgggcatctcgtgaaacctggaacgtcatccccgaggaccagcgcgatagccgtgcgaccatccaggcagccgccgacgcatacgccgatatcttcagcaataagagcgtgacagtgccatggggttctccctgcgcccgactcgagggcgggtcttacacgggtagtggttcggcgacggatcgatgtgatgtagggattccatcgggcgtcagcttaacaaatcgtcgctatgtgattgatgagacaatcggatcagtggatgtcttcatcgattttgcctcgctcccagatagccacgagttcagggttgagaaaggcaaacttcgatatgtccataccattaccgtcatggcatga

SEQ ID NO: 246 - protein, 259 aa, Muscodor strobelii
  misc_feature: SGI Peptide ID NO. 559643
  misc_feature (4)..(259): NCBI GI: 116200452 Blast Desc: CHGG_10771 [Chaetomium globosum CBS 148.51] gi|88175485|gb|EAQ82953.1| CHGG_10771 [Chaetomium globosum CBS 148.51]
  misc_feature (2)..(256): NCBI GI: 189194003 Blast Desc: conserved [Pyrenophora tritici-repentis Pt-1C-BFP] gi|187978904|gb|EDU45530.1| conserved [Pyrenophora tritici-repentis Pt-1C-BFP]
  misc_feature (24)..(258): NCBI GI: 171676424 Blast Desc: protein product [Podospora anserina] gi|170936278|emb|CAP60937.1| protein product [Podospora anserina]
  misc_feature (1)..(258): NCBI GI: 169854321 Blast Desc: CC1G_01512 [Coprinopsis cinerea okayama7#130] gi|116504970|gb|EAU87865.1| CC1G_01512 [Coprinopsis cinerea okayama7#130]
  misc_feature (23)..(258): NCBI GI: 169854317 Blast Desc: CC1G_01510 [Coprinopsis cinerea okayama7#130] gi|116504968|gb|EAU87863.1| CC1G_01510 [Coprinopsis cinerea okayama7#130]
  misc_feature (24)..(258): NCBI GI: 171694471 Blast Desc: protein product [Podospora anserina] gi|170947184|emb|CAP73989.1| protein product [Podospora anserina]
  misc_feature (2)..(258): NCBI GI: 169854319 Blast Desc: CC1G_01511 [Coprinopsis cinerea okayama7#130] gi|116504969|gb|EAU87864.1| CC1G_01511 [Coprinopsis cinerea okayama7#130]
  misc_feature (7)..(251): NCBI GI: 169601696 Blast Desc: SNOG_03720 [Phaeosphaeria nodorum SN15] gi|111067805|gb|EAT88925.1| SNOG_03720 [Phaeosphaeria nodorum SN15]
  misc_feature (24)..(258): NCBI GI: 85085104 Blast Desc: NCU07222 [Neurospora crassa OR74A] gi|28918538|gb|EAA28211.1| [Neurospora crassa OR74A] gi|28950194|emb|CAD71061.1| [Neurospora crassa]
  misc_feature (23)..(258): NCBI GI: 169869949 Blast Desc: CC1G_13257 [Coprinopsis cinerea okayama7#130] gi|116497398|gb|EAU80293.1| CC1G_13257 [Coprinopsis cinerea okayama7#130]
MMPNIISLTALAATVFSATVTGQCTRETLVAATSKLLDAQTAGKPDTLGSLDGVAYLEQFKTADVTKGILTTPVTIDFNRSLIDTTQCATYTEMVAAKQAHPYVIGTQMHFSPDGSKISNISTLVTDQGDWLFNATGTLYWASRETWNVIPEDQRDSRATIQAAADAYADIFSNKSVTVPWGSPCARLEGGSYTGSGSATDRCDVGIPSGVSLTNRRYVIDETIGSVDVFIDFASLPDSHEFRVEKGKLRYVHTITVMA

SEQ ID NO: 247 - DNA, 7250 bp, Muscodor strobelii
  misc_feature: SGI EST ID NO. CUFF.983.0
  misc_feature: Variant of the nucleotide sequence at SEQ ID NO 245
tgagatcttgtaagacgtcccccaggccataacagccaaatgaatatagcaattagcaatctgtgaggatttttcaacgttgtccgcagcgtacatgaatgccaaaatttctgctcttgctcaattgcaatagataatcatcgccattctattaaaggtatgaattatgcagatccttttctctaggcccacgtctattaggttggtgagttaattaagtaaaatagcgaatgcccaattcgcgtcggcatcatgtccctgcttcagatccttcttcagataacatgcatggctggccccttcgtcaccagcaatatatccccatccggcgcctgtgcagcccttcgtgccggcgcagttggcgatacaatctgtcgcactgatggtctggacgttcttaatatccacggcacccgagtcagaataatcgacgccgcacatgcgtaaaaactgttttgttgaacccgggacagtgtacacagtattgtttgcctttggacatcccgagttgactattacgcctggagtagatgtagcgctttgtgtcggagaggtcgagtgcgtcgaagtcgatgatcctgtcggcgtggaagatgctgtcgacggaccgtcagttaccatcccagggctcatgctggttgctgtgcttgtgcttgaggatctgcaaacatattagttgatgtatattataagcggtaagagtaggagcgacaaacgttgctgatgagccagcggcgtgactcgacttctggtttgcgctggcgccaacaccagccccaacgccaatagccacaataatgatgactagtaggatacccaggagcgtccaaaatattggtcgccgaacgcctaatatcctcttctctcgcctcggagttttaccgctcgggggaattggaaatgtccctggcggtggaggtaattcgtcgagagaacgatgtgcagttcccggaggcgtcacatctccgagccaggaagcactgccgccgtctccttgcttctcgcccgtcgtgccaaaataggctcgtgatgcatctttcagttgattgaactctcgctgcgcaaagaaatcgaagccgcggaactcgacgggcggggagctagcaccttgcacgcttgtattcctcccgaatgcttgcggtggtggagatactgtcggttttggacgccccagcgacgtgaggccgggttgacccgtcgccatcacttgttgtgagcccgaataccaagttgccgagtccggtctttctataacattgccggactagtatccgaaatagtagcaatctacagtgacgtgaggcgacaagacagacccgacagcggctacgagcagcatgccggtagcgactgaacgtgtcacgatgcgtgacaaacactctgctaggaatgcaatggagttgggggatttcccaaggatcccccgtgttcctcgaagagcgagccaccctgttctcggtaatgcgccgcccacatggtgccaagctcatctgttagcacaggccccagttccctgcgtcgccgcaatctcgcgcaacggctgagcttcctgcttgggatccatcacacgtggcgttgcaaccatgttgtgcgcctggacctttttctacgcgaccctttgcctttattgcgtggaactttgcgtttcgatgatgcttaccttggcctcgtgatgattttcaagcgggagtgatattaataagtattgataagtatgcgacagaatttgtagaagtgactatgtccctatctgaatgccttgtgcccagaaatggaaatggttaagttcgtgatgcctcctaaatcatgcatctagacaagcatcagctacagggtcatgaatcgcttggccagtgcgtcagcagggtatatcaaatagcggacgctcgcttcgtatcgtcagaacctgtggaactgcaactgctatcatctatgagatacttaactctaatcgccggaccgatccgagaatgagtgtcaaagcttcaaacctcgagatgatcgtcttggccaatcgaatcggacgagactccgcgtagcaaataatcgacgtccaatagccagacacgccaatgaaagcgcagagacccaatcgggtggtggctcgaacacaccgaacagccttgaacaagcatttcgtagggcaacgcaagtgccgttgacccctcgacgttcatatggatattctccgcaatacgacatatcgtcgctgtgtaaactccgaattcatcctgttcagggccttcagaatcatgatgaaaactagatggatggccatattttccgtagagttcgctcttgggtcttcatcgataaaccaagattgaacatctactgtaaaatatgatgccaaacatcatcagtctcaccgcgctcgcagcgacggtcttctcggccaccgtgacaggacaatgtacgcgtgaaacacttgtcgcagcgacatccaagctgctcgatgcccaaacagctggaaagccagacacgctcggctcgctcgacggggtcgcatatctcgagcaattcaagactgcagacgtcacgaaaggcattctgacaacacctgtcactatcgacttcaaccgcagtctaattgacacgacccaatgcgccacttacactgagatggtcgccgcgaagcaagcgcacccttacgtcatcggcacacagatgcacttcagtcctgacgggagcaaaatatccaacatcagcaccctggtgacagaccaaggcgactggctcttcaacgcaacgggtaccttgtactgggcatctcgtgaaacctggaacgtcatccccgaggaccagcgcgatagccgtgcgaccatccaggcagccgccgacgcatacgccgatatcttcagcaataagagcgtgacagtgccatggggttctccctgcgcccgactcgagggcgggtcttacacgggtagtggttcggcgacggatcgatgtgatgtagggattccatcgggcgtcagcttaacaaatcgtcgctatgtgattgatgagacaatcggatcagtggatgtcttcatcgattttgcctcgctcccagatagccacgagttcagggttgagaaaggcaaacttcgatatgtccataccattaccgtcatggcatgagcactataatttgattgctcctcgtcgattagatatcatagtgttgtttcgaacctaaaaattgaaacatgatatctcacagttttgttcaaacgttagtatgtaccgcatgtgggccaaaagcttcgcatctctgggatttcatcgcacaacaagttgcggtctcggtatatgtaggtaagtattcaaggtaaggagtagaagtctactaaggtaaaaggtaaaaaggtataaccagctcgcgcatctttgagcaactccaaagctttccaatatgcaacatgagaataatttccagaaagctcttccgtatgacacaaccatgacgaatatctccaattctgatcacaaaacatagttccgaatatcccgttcgctctgctcatgagcacgacatgtaatatgcccgtgactttagcccaaatcgctgggccgccgctcgcctcccaaacccaatcatttgaatcattcaactgaaaggcgctactagtgtcataataccacctggccttcttcttcttcccgaagctgaatgccgccctcgacttggatcgcacctcgagtccattcatgctctgccaactggcccatagaccatcggctccgggcacgtcgcaatagaccctctgtaatttccatagcgcctgtgaggccgtctttctcaaataaagcaaggttcgcgtcgtgatccccatcctctccggcatatttaatccatgtccactcgacacgggcgatacgatggctggtgcggctacgcattctttgatagtcgctcgctcctggtgggggatcgaagggtaggcgggcctcaacgagggcatagagcaatacgcccagcgaccaagcatcagttgctcggccgtcgtaaggctgccccaagattacttcaggtgcagcatagtcatccgagccgcaacgtgtctctagcttctcgtcatcagtgacgcggcgtgagaggccgagatctgttagagtgatgacagggtatgggtacatggcccaatcctgtgatttatctttgagctctgtcggtggaagattgaccaacacattttcaagtttaatatctcggtgcacaattcggcaactgtggagatatctcaccgcatccacaacctcggcgaaaatcctccgtatcaggggcgctatcagcgaatcacgatagttcgatgcgacatcgaataaatcgcctccgggacaataggtaagtaccaacaaagcccgtgtcggttcgatgttccaggccttcaagtgcaccaatgacgggtggttaacggattgcatgatatcaagctctcgttttaagctcatttcgattcgatcttccgaggcaccgccctttggaccatgttcacaaattttgatggcgactaatttcttccggcccaatttcgctacatcagccgcgccatctggcccgttggtttcgggatcgagctgtgtcgtggccagtatgactcgactgaaagtaccttctccgagatctttaatcccgcgccatctccgcagtctgttatcttttctgccgtgggcttcaaaatattcaccctggagtcgtttggcgccagagctgtcattgctttgcgaagactcgctcggcgggggtgttggtggtttcgctgcgggcgtcacacctctcgattcggacaagttgggttctcttcggagagcattaggaggctcttccgtaatctggcccacttttccagacgagacagcaatctgcctccgtggtgcccctttcgcatccggtacatattcactgagactcctgttacgaacatgttcaacctttccgctactctgctcgacgaggtggttagaattgagtccgacatatgcctttcgcttgtgttggtgttcgattgcagcagctacggactcgccgctcttagtgaccaggacagactccggcatcactgttctaatactcgagtctctcgacggagggcgcggcccaagtcgtctccaagggccaggcgagtcgcttgataacaatggcgagggaagcggtgtcacatcacccatagcagatatcacgggacttggataggccgagctggtagcagaactgatgcccttagcaaagtgctgcttccagctgggcgttctcgataccggttggagatttgaggctgagtgttttcgctgtatggcaaggccagagcttgcaaagagaccgccgttctggcttctcccactgtcggaccgtttacgatgcgcggaagtatcggtggagatcgaaagagagttggtagccctcgcaacaggcgatgtcgtgtcaagaggggcgttggagtcgccagaagtcgctccggataatggtggcgatggggttgtcgtgtgagtttcgaacttgatatgactgaacgccgctggcggcagagcacttatcgagtcatcttcaccaatgaatcgtaggaggtcattgctgcttgggtggatggcgcggttggattgtgtactttggcggttgagatcttgcaaggcggataaggactgaggatcggcgggctgagctgtctggttaggccgtatttcttgccggctggcggggtctagaaaaacatcttcaggcagaacttgaggctgtcgtgttgtcatactggcaaaacgaagaggtgcttagaggatatatagtttgacagcgtcgaatgacctggtagtctatgtctgcacaataagcgagagaacacgtaacgcggctgctttcagctcagtagggctcgatctgtggtgttactcctgtcgctgtggaggtataaactgatgcagtgagtagcagagcggactaaacagagccagtgatgcgcgcagcagagagagacccagtcaatggtgccaggacgtagtcaggagtatcgtacattaacagaaggaagatgctgacggccagacctcactctgggccagacagagagtggaccagatggccggtgacactctcagacgtagtgctggggggagacgtggaaagacaagttgaaatgcaaaatgtcccggaggcagcagtgggggtggaatgtgcagggcgcagggccgcagggcagacttgatagttggctaccggagaatggggcgcggcgcggtgtcgcggtcgtgttatgcacgatagacgctccaaaatagcacttctggcgctgggtgaggccaggcgggctagcgacggcggatgaggacggcgcaaagcctaagctcctgcggatgctggaccggtgctcggtggatgtggtgctacaacaatgcgggactattgtacaatacgatagacagacaataagcgcaacacggtggatgcgatgcaccaaccattaagtcgccgatgactaggctactagcgtcgaggaagacacggaattgtcagtgccagtgtcggatgtccagacccaggcccgaacaggtctcttcgcgcgacggcggactgacgattgtaacgttgactcgtcggtgttgagctgtccaggtgggatgagctgcaggaggtctgacagggactcgggcacttggggctctcggccgtcttctgggagcgggaatgcacacaaaaggtgggccgactgcagcacgtgcagtggaatccaggcgtatctaatttaaattcgcctgctttttctttgattaatttcgctgaacatcgggatgggtctcagaggttgacggttgctgtgtgatcagttctcgatggcaatttccctacgcaatcggagtgggcgcaggatttcgagctcggggaaatgtggtaggcgcgttgaatgactgtttgataggcgatgctgagtaaaaaagacaatgctatgtttcttaggatgcgagtgaaacagctgtgatcaaagagattctcgtcaaggcatggagatatatgtacattaggaacggtagtgcgtcagacgaaggtgttaatggaaacagaaactcgagagcacgttgaaatcgaaacaaaggttattgatgttttagagttcgactgacaaaatgtgagttcctctaggcgcaggtggggagggaaacactaagggaagcacacagatgaaaggtgaggtaatgatgtcgatgcatgtttacttcgaaatgggggctattgctggaggatttgggttaatatcctccaactgtcacgatccacg

SEQ ID NO: 248 - DNA, 939 bp, Muscodor strobelii
  misc_feature: SGI cDNA ID NO. 559644
  misc_feature: Encodes the peptide sequence at SEQ ID NO 249
atggcgacgggtcaacccggcctcacgtcgctggggcgtccaaaaccgacagtatctccaccaccgcaagcattcgggaggaatacaagcgtgcaaggtgctagctccccgcccgtcgagttccgcggcttcgatttctttgcgcagcgagagttcaatcaactgaaagatgcatcacgagcctattttggcacgacgggcgagaagcaaggagacggcggcagtgcttcctggctcggagatgtgacgcctccgggaactgcacatcgttctctcgacgaattacctccaccgccagggacatttccaattcccccgagcggtaaaactccgaggcgagagaagaggatattaggcgttcggcgaccaatattttggacgctcctgggtatcctactagtcatcattattgtggctattggcgttggggctggtgttggcgccagcgcaaaccagaagtcgagtcacgccgctggctcatcagcaacatcctcaagcacaagcacagcaaccagcatgagccctgggatggtaactgacggtccgtcgacagcatcttccacgccgacaggatcatcgacttcgacgcactcgacctctccgacacaaagcgctacatctactccaggcgtaatagtcaactcgggatgtccaaaggcaaacaatactgtgtacactgtcccgggttcaacaaaacagtttttacgcatgtgcggcgtcgattattctgactcgggtgccgtggatattaagaacgtccagaccatcagtgcgacagattgtatcgccaactgcgccggcacgaagggctgcacaggcgccggatggggatatattgctggtgacgaaggggccagccatgcatgttatctgaagaaggatctgaagcagggacatgatgccgacgcgaattgggcattcgctattttacttaattaa

SEQ ID NO: 249 - protein, 312 aa, Muscodor strobelii
  misc_feature: SGI Peptide ID NO. 559644
  misc_feature (121)..(310): NCBI GI: 116192769 Blast Desc: CHGG_06102 [Chaetomium globosum CBS 148.51] gi|88182015|gb|EAQ89483.1| CHGG_06102 [Chaetomium globosum CBS 148.51]
  misc_feature (214)..(310): NCBI GI: 171684215 Blast Desc: protein product [Podospora anserina] gi|170942068|emb|CAP67720.1| protein product [Podospora anserina]
  misc_feature (117)..(303): NCBI GI: 116203369 Blast Desc: CHGG_09569 [Chaetomium globosum CBS 148.51] gi|88178087|gb|EAQ85555.1| CHGG_09569 [Chaetomium globosum CBS 148.51]
  misc_feature (97)..(310): NCBI GI: 85096753 Blast Desc: NCU07138 [Neurospora crassa OR74A] gi|28921808|gb|EAA31085.1| [Neurospora crassa OR74A]
  misc_feature (215)..(310): NCBI GI: 85115027 Blast Desc: NCU00883 [Neurospora crassa OR74A] gi|28926593|gb|EAA35563.1| [Neurospora crassa OR74A]
  misc_feature (216)..(311): NCBI GI: 171684013 Blast Desc: protein product [Podospora anserina] gi|170941967|emb|CAP67619.1| protein product [Podospora anserina]
  misc_feature (103)..(309): NCBI GI: 171686050 Blast Desc: protein product [Podospora anserina] gi|170942986|emb|CAP68639.1| protein product [Podospora anserina]
  misc_feature (200)..(309): NCBI GI: 145603176 Blast Desc: [Magnaporthe grisea 70-15] gi|145011465|gb|EDJ96121.1| [Magnaporthe grisea 70-15]
  misc_feature (105)..(305): NCBI GI: 261361403 Blast Desc: conserved [Verticillium albo-atrum VaMs.102]
  misc_feature (109)..(292): NCBI GI: 39972605 Blast Desc: [Magnaporthe grisea 70-15] gi|145016808|gb|EDK01238.1| [Magnaporthe grisea 70-15]
MATGQPGLTSLGRPKPTVSPPPQAFGRNTSVQGASSPPVEFRGFDFFAQREFNQLKDASRAYFGTTGEKQGDGGSASWLGDVTPPGTAHRSLDELPPPPGTFPIPPSGKTPRREKRILGVRRPIFWTLLGILLVIIIVAIGVGAGVGASANQKSSHAAGSSATSSSTSTATSMSPGMVTDGPSTASSTPTGSSTSTHSTSPTQSATSTPGVIVNSGCPKANNTVYTVPGSTKQFLRMCGVDYSDSGAVDIKNVQTISATDCIANCAGTKGCTGAGWGYIAGDEGASHACYLKKDLKQGHDADANWAFAILLN

SEQ ID NO: 250 - DNA, 3036 bp, Muscodor strobelii
  misc_feature: SGI EST ID NO. CUFF.982.1
  misc_feature: Variant of the nucleotide sequence at SEQ ID NO 248
agacatccactgatccgattgtctcatcaatcacatagcgacgatttgttaagctgacgcccgatggaatccctacatcacatcgatccgtcgccgaaccactacccgtgtaagacccgccctcgagtcgggcgcagggagaaccccatggcactgtcacgctcttattgctgaagatatcggcgtatgcgtcggcggctgcctggatggtcgcacggctatcgcgctggtcctcggggatgacgttccaggtttcacgagatgcccagtacaaggtacccgttgcgttgaagagccagtcgccttggtctgtcaccagggtgctgatgttggatattttgctcccgtcaggactgaagtgcatctgtgtgccgatgacgtaagggtgcgcttgcttcgcggcgaccatctcagtgtaagtggcgcattgggtcgtgtcaattagactgcggttgaagtcgatagtgacaggtgttgtcagaatgcctttcgtgacgtctgcagtcttgaattgctcgagatatgcgaccccgtcgagcgagccgagcgtgtctggctttccagctgtttgggcatcgagcagcttggatgtcgctgcgacaagtgtttcacgcgtacattgtcctgtcacggtggccgagaagaccgtcgctgcgagcgcggtgagactgatgatgtttggcatcatattttacagtagatgttcaatcttggtttatcgatgaagacccaagagcgaactctacggaaaatatggccatccatctagttttcatcatgattctgaaggccctgaacaggatgaattcggagtttacacagcgacgatatgtcgtattgcggagaatatccatatgaacgtcgaggggtcaacggcacttgcgttgccctacgaaatgcttgttcaaggctatattgttattttagcagaggttaatatgcagtcgtttcatccgaccaccacgcatacctgttcggtgtgttcgagccaccacccgattgggtctctgcgctttcattggcgtgtctggctattggacgtcgattatttgctacgcggagtctcgtccgattcgattggccaagacgatcatctcgaggtttgaagctttgacactcattctcggatcggtccggcgattagagttaagtatctcatagatgatagcagttgcagttccacaggttctgacgatacgaagcgagcgtccgctatttgatataccctgctgacgcactggccaagcgattcatgaccctgtagctgatgcttgtctagatgcatgatttaggaggcatcacgaacttaaccatttccatttctgggcacaaggcattcagatagggacatagtcacttctacaaattctgtcgcatacttatcaatacttattaatatcactcccgcttgaaaatcatcacgaggccaaggtaagcatcatcgaaacgcaaagttccacgcaataaaggcaaagggtcgcgtagaaaaaggtccaggcgcacaacatggttgcaacgccacgtgtgatggatcccaagcaggaagctcagccgttgcgcgagattgcggcgacgcagggaactggggcctgtgctaacagatgagcttggcaccatgtgggcggcgcattaccgagaacagggtggctcgctcttcgaggaacacgggggatccttgggaaatcccccaactccattgcattcctagcagagtgtttgtcacgcatcgtgacacgttcagtcgctaccggcatgctgctcgtagccgctgtcgggtctgtcttgtcgcctcacgtcactgtagattgctactatttcggatactagtccggcaatgttatagaaagaccggactcggcaacttggtattcgggctcacaacaagtgatggcgacgggtcaacccggcctcacgtcgctggggcgtccaaaaccgacagtatctccaccaccgcaagcattcgggaggaatacaagcgtgcaaggtgctagctccccgcccgtcgagttccgcggcttcgatttctttgcgcagcgagagttcaatcaactgaaagatgcatcacgagcctattttggcacgacgggcgagaagcaaggagacggcggcagtgcttcctggctcggagatgtgacgcctccgggaactgcacatcgttctctcgacgaattacctccaccgccagggacatttccaattcccccgagcggtaaaactccgaggcgagagaagaggatattaggcgttcggcgaccaatattttggacgctcctgggtatcctactagtcatcattattgtggctattggcgttggggctggtgttggcgccagcgcaaaccagaagtcgagtcacgccgctggctcatcagcaacatcctcaagcacaagcacagcaaccagcatgagccctgggatggtaactgacggtccgtcgacagcatcttccacgccgacaggatcatcgacttcgacgcactcgacctctccgacacaaagcgctacatctactccaggcgtaatagtcaactcgggatgtccaaaggcaaacaatactgtgtacactgtcccgggttcaacaaaacagtttttacgcatgtgcggcgtcgattattctgactcgggtgccgtggatattaagaacgtccagaccatcagtgcgacagattgtatcgccaactgcgccggcacgaagggctgcacaggcgccggatggggatatattgctggtgacgaaggggccagccatgcatgttatctgaagaaggatctgaagcagggacatgatgccgacgcgaattgggcattcgctattttacttaattaactcaccaacctaatagacgtgggcctagagaaaaggatctgcataattcatacctttaatagaatggcgatgattatctattgcaattgagcaagagcagaaattttggcattcatgtacgctgcggacaacgttgaaaaatcctcacagattgctaattgctatattcatttggctgttatggcctgggggacgtcttacaagatctca

SEQ ID NO: 251 - DNA, 735 bp, Muscodor strobelii
  misc_feature: SGI cDNA ID NO. 559645
  misc_feature: Encodes the peptide sequence at SEQ ID NO 252
atgtctgacgagaatctatctaagtataatagtataggtagagggtctcgctataacaagggccagggacgagacgaggagtcggatgttgctcaattcgcatttcttgtagctggtgattcgactacaggcatttcgagatacagtgataccctatcagtaggtgcagatactgccaatatcaatagcgaagacccttcaaacattagtttgccgccccgaacaaggcctatgggcgacgaggctctccagactgatcagcaccttatgatacagtttcagtctgaaatgaaacccgataaacatggcaactgcagactgatccaggagtggaaacctgaaggcgatgccgccgaagagcttcccttttctgagtgcggtctcaccggaaattgtctctggatccagcgcgaggaagactttttcaagcagcaccctgtgctcaaggaacagatatttgaagcatctactccggcagctttggacgaattcatcaataaagagtttcagatgctagacgacagaccacaattcaaacagctgggccaagagggaccttataatgcagaaaatgattcagtcaggggaaagccattgaggcgtcgttgtgtaaagatctgcgggcacatcatttatgttgaccgaattcccgtgtcagacatgatagatcgctacaatgcagcgggggtatcgatccgacatcagagcgctgtgggcacaaacacttctggttaa

SEQ ID NO: 252 - protein, 244 aa, Muscodor strobelii
  misc_feature: SGI Peptide ID NO. 559645
MSDENLSKYNSIGRGSRYNKGQGRDEESDVAQFAFLVAGDSTTGISRYSDTLSVGADTANINSEDPSNISLPPRTRPMGDEALQTDQHLMIQFQSEMKPDKHGNCRLIQEWKPEGDAAEELPFSECGLTGNCLWIQREEDFFKQHPVLKEQIFEASTPAALDEFINKEFQMLDDRPQFKQLGQEGPYNAENDSVRGKPLRRRCVKICGHIIYVDRIPVSDMIDRYNAAGVSIRHQSAVGTNTSG

SEQ ID NO: 253 - DNA, 1119 bp, Muscodor strobelii
  misc_feature: SGI cDNA ID NO. 559646
  misc_feature: Encodes the peptide sequence at SEQ ID NO 254
atgcattcacactcgttcatcaaagcgctcgggttggtgtctctaatgactcaagtcgatgcctttccaagcttccctcggagcaagcagcttgccatgattgatgttgcgacaccggctgatcttagcaatgtgcaatctgatgaaggtgacgactcgttccagctgctgggcgacctagtcagtctccctgctgcaaaactgacgacagtgggaagaaacatcagagaactactcctgaattatggagcccctgaaagcgatttgcaatataccgatgtgccagcactcgactccgccgaatgcaaacaggacacatgttgtgtctggaaatacatcgcagatgatatgaccaaactattccgtgaggagtcagggcagtgtacaacatgggcacggaaagccatccgtttgggttttcatgatgctggaacctggtcgatcgagacagccaaagaaggcggcggtgcagacggttctatatgtctgacagacgagaatactgcttctgaaaacgcaggcttggaggatttgtgtgcccaaatgaacgtttggtatgacaaatggcataatcaaaatggctttggtgtcacaatggcagatttgattcgggccaaaaccattagcccccatcagcttgtagctctagttggtgcacatacagccagtcagcagcagggcgtcaatgttacaagagcaggagacccacaagactccacccctggtgtgtgggacacactattctacgaggagacttatgggactgtcgatgcgccagagagtgtcttcaaatttcctagtgacatagctctcgctaagtattctgttactgcaagagagtgggtgaccttctttggtaccagcggtcaggatcattggaacatggactatgctagagcgtacattcgactcagcctgcttggtgtgaacaatatcaatgatctcacggaatgcaccaaggcgctgcctgcacgaacgatcaagtttaccaacaacaacagcacaacaatctcacttacacctgaacagattaccgaacaagttgaacttggaggcattgttgatgcgagtactttcaatcctactgatgcaacccgagatgttgaattaaagaaatag

SEQ ID NO: 254 - protein, 372 aa, Muscodor strobelii
  misc_feature: SGI Peptide ID NO. 559646
  misc_feature (40)..(337): NCBI GI: 261361667 Blast Desc: ligninase H2 [Verticillium albo-atrum VaMs.102]
  misc_feature (55)..(338): NCBI GI: 256725786 Blast Desc: NECHADRAFT_4582 [Nectria haematococca mpVI 77-13-4]
  misc_feature (52)..(338): NCBI GI: 39972991 Blast Desc: MGG_07790 [Magnaporthe grisea 70-15] gi|145012565|gb|EDJ97219.1| MGG_07790 [Magnaporthe grisea 70-15]
  misc_feature (1)..(354): NCBI GI: 169620674 Blast Desc: SNOG_13539 [Phaeosphaeria nodorum SN15] gi|160704086|gb|EAT78986.2| SNOG_13539 [Phaeosphaeria nodorum SN15]
  misc_feature (55)..(337): NCBI GI: 189194071 Blast Desc: ligninase H2 precursor [Pyrenophora tritici-repentis Pt-1C-BFP] gi|187978938|gb|EDU45564.1| ligninase H2 precursor [Pyrenophora tritici-repentis Pt-1C-BFP]
  misc_feature (31)..(329): NCBI GI: 171695770 Blast Desc: protein product [Podospora anserina] gi|170948127|emb|CAP60291.1| protein product [Podospora anserina]
  misc_feature (40)..(337): NCBI GI: 261352643 Blast Desc: peroxidase manganese-dependent 1 [Verticillium albo-atrum VaMs.102]
  misc_feature (48)..(325): NCBI GI: 169616924 Blast Desc: SNOG_11639 [Phaeosphaeria nodorum SN15] gi|111060227|gb|EAT81347.1| SNOG_11639 [Phaeosphaeria nodorum SN15]
  misc_feature (19)..(323): NCBI GI: 145606935 Blast Desc: MGG_03873 [Magnaporthe grisea 70-15] gi|145014564|gb|EDJ99132.1| MGG_03873 [Magnaporthe grisea 70-15]
  misc_feature (52)..(239): NCBI GI: 46111339 Blast Desc: FG02551.1 [Gibberella zeae PH-1]
  misc_feature (106)..(345): SWISSPROT Homolog: EC 1.11.1.14 Lignin peroxidase
MHSHSFIKALGLVSLMTQVDAFPSFPRSKQLAMIDVATPADLSNVQSDEGDDSFQLLGDLVSLPAAKLTTVGRNIRELLLNYGAPESDLQYTDVPALDSAECKQDTCCVWKYIADDMTKLFREESGQCTTWARKAIRLGFHDAGTWSIETAKEGGGADGSICLTDENTASENAGLEDLCAQMNVWYDKWHNQNGFGVTMADLIRAKTISPHQLVALVGAHTASQQQGVNVTRAGDPQDSTPGVWDTLFYEETYGTVDAPESVFKFPSDIALAKYSVTAREWVTFFGTSGQDHWNMDYARAYIRLSLLGVNNINDLTECTKALPARTIKFTNNNSTTISLTPEQITEQVELGGIVDASTFNPTDATRDVELKK

SEQ ID NO: 255 - DNA, 201 bp, Muscodor strobelii
  misc_feature: SGI EST ID NO. CUFF.633.0
  misc_feature: Variant of the nucleotide sequence at SEQ ID NO 253
ctttggtaccagcggtcaggatcattggaacatggactatgctagagcgtacattcgactcagcctgcttggtgtgaacaatatcaatgatctcacggaatgcaccaaggcgctgcctgcacgaacgatcaagtttaccaacaacaacagcacaacaatctcacttacacctgaacagattaccgaacaagttgaacttgg

SEQ ID NO: 256 - DNA, 747 bp, Muscodor strobelii
  misc_feature: SGI cDNA ID NO. 559647
  misc_feature: Encodes the peptide sequence at SEQ ID NO 257
atgccttctcttctgtctgttgcggctgtgtcgcttcctctgcttaaggtcgtatcggctcatggctacgtatccggcgttgaagtaaatggcggcgcatgggttgcaggagcgaatccgaactggtactattatccagctggagctccgactactcctggatggagagcactgaaccaggacaatggcttcgtagcccctgatgcatttcagactaccgacattgcttgccataagagcgccaccgcaggcggagcatatatcaatgctaatgcaggcgatacattgaaagtattttggaacacctggccggacacacataagggccctattatcaactatcttgccaaatgtaacggagagtgcacagccgaaactgctggtgacctgagctttacgaagataaatgctggcgggtggctatcgggtagtaaccccggaacctgggtgaccgatacactcattgccaacaacttctcatccacggttaccattccctcgaaactcgctgctggcaactatgttttaagacatgagatcatcgctcttcacagtgcaggaaacgttgatggtgctcaagcttatccccagtgcttaaacattaaggttggcggaagtggttcaacggcgctcccaactgggactaaggcaactgcgctttacactgagaacgatcccggtatcctcttcaatctttacaccaccttcactagctataccattccgggtcccgttctctggagctag

SEQ ID NO: 257 - protein, 248 aa, Muscodor strobelii
  misc_feature: SGI Peptide ID NO. 559647
  misc_feature (5)..(241): Pfam Id: PF03443 Pfam Desc: Glycosyl hydrolase family 61
  misc_feature (1)..(241): Pfam Id: PF03443 Pfam Desc: Glycosyl hydrolase family 61
  misc_feature (1)..(248): NCBI GI: 261353056 Blast Desc: endoglucanase-4 [Verticillium albo-atrum VaMs.102]
  misc_feature (4)..(248): NCBI GI: 169613875 Blast Desc: SNOG_10071 [Phaeosphaeria nodorum SN15] gi|111061286|gb|EAT82406.1| SNOG_10071 [Phaeosphaeria nodorum SN15]
  misc_feature (21)..(248): NCBI GI: 116208766 Blast Desc: CHGG_03676 [Chaetomium globosum CBS 148.51] gi|88184273|gb|EAQ91741.1| CHGG_03676 [Chaetomium globosum CBS 148.51]
  misc_feature (19)..(248): NCBI GI: 189199012 Blast Desc: endoglucanase IV [Pyrenophora tritici-repentis Pt-1C-BFP] gi|187982942|gb|EDU48430.1| endoglucanase IV [Pyrenophora tritici-repentis Pt-1C-BFP]
  misc_feature (3)..(247): NCBI GI: 169782131 Blast Desc: [Aspergillus oryzae RIB40] gi|83774271|dbj|BAE64395.1| protein product [Aspergillus oryzae]
  misc_feature (3)..(248): NCBI GI: 238500562 Blast Desc: endoglucanase-4 precursor, [Aspergillus flavus NRRL3357] gi|220691752|gb|EED48099.1| endoglucanase-4 precursor, [Aspergillus flavus NRRL3357]
  misc_feature (17)..(248): NCBI GI: 67526805 Blast Desc: AN3860.2 [Aspergillus nidulans FGSC A4] gi|40739935|gb|EAA59125.1| AN3860.2 [Aspergillus nidulans FGSC A4] gi|259481576|tpe|CBF75223.1| TPA: conserved [Aspergillus FGSC
  misc_feature (3)..(247): NCBI GI: 212274995 Blast Desc: LOC100191768 [Zea mays] gi|194689780|gb|ACF78974.1| [Zea mays] gi|238011426|gb|ACR36748.1| [Zea mays]
  misc_feature (3)..(247): NCBI GI: 145239987 Blast Desc: An08g05230 [Aspergillus niger] gi|134077154|emb|CAK45495.1| protein product [Aspergillus niger]
  misc_feature (1)..(247): NCBI GI: 145258912 Blast Desc: An04g08550 [Aspergillus niger] gi|134074828|emb|CAK38942.1| protein product [Aspergillus niger]
  misc_feature (21)..(248): SWISSPROT Homolog: EC 3.2.1.4 Cellulase
MPSLLSVAAVSLPLLKVVSAHGYVSGVEVNGGAWVAGANPNWYYYPAGAPTTPGWRALNQDNGFVAPDAFQTTDIACHKSATAGGAYINANAGDTLKVFWNTWPDTHKGPIINYLAKCNGECTAETAGDLSFTKINAGGWLSGSNPGTWVTDTLIANNFSSTVTIPSKLAAGNYVLRHEIIALHSAGNVDGAQAYPQCLNIKVGGSGSTALPTGTKATALYTENDPGILFNLYTTFTSYTIPGPVLWS

SEQ ID NO: 258 - DNA, 246 bp, Muscodor strobelii
  misc_feature: SGI EST ID NO. CUFF.645.0
  misc_feature: Variant of the nucleotide sequence at SEQ ID NO 256
gctacgtatccggcgttgaagtaaatggcggcgcatgggttgcaggagcgaatccgaactggtactattatccagctggagctccgactactcctggatggagagcactgaaccaggacaatggcttcgtagcccctgatgcatttcagactaccgacattgcttgccataagagcgccaccgcaggcggagcatatatcaatgctaatgcaggcgatacattgaaagtattttggaacacctggc

SEQ ID NO: 259 - DNA, 2061 bp, Muscodor strobelii
  misc_feature: SGI cDNA ID NO. 559648
  misc_feature: Encodes the peptide sequence at SEQ ID NO 260
atggatgataacgtctatcttggccgttggaccaactggtcacggggcccggtactcggtcaaactctcacaactacgaaagaagcgggcaatttgcttattgcatttaccgccgttttcgtcggatttgtcggtgctcgactgtggaaagttgtcagtctcataattcatcgatcttactctacaccgactccgaaaagcactctgcactaccaaagccagatcattctccgaaactcatcatcgccggaatctggattctcagctctagtacgattattatgggcgtggcgaaaatccaggacccaatatcttgtccgcttactgttattaattctcctttcggcaactcttttcggtgcattcacaatcgcgggtgggttttcagcaagcatctcgactgcagcaggagaccaagtgttgttgaaacctggaaattgtggtccagtggcagtcactcctacaaatctcgaggagcgctctctgattgccgcccggtatgccgaagaagccaacaatgctgccaattatgcacagcaatgcggcattagtagctctggcacgtcgatgggatgcaacaagtatgttgtcccgcgacttccagtcgcagccataaattacaagggtgtctgcccattcaacgagtcactctgccgcgatgccgagtcgacgatgcttctcgacactgggtatcttgatagtaacgatcacttcggcttaaatcgacccggtgatcttcgtttcgagtggcgatatgtcttgcaatgtacgcctctgcagaccgatggatacaccagtcacgttttcgcagaaaacagaggttgggaacgttatcactacggaacccaaaattccttcaaagatacagcaaacgagactacgcatgattttatatacgagattcaggacgctgattcccagtattcgttttcgaatgcaagtgttcttcagggtcataactatgttctcagttatcgtgcctctgacacatttggtggtcaagttctcgcttcatcagacatgtttccaatacccgagcttcaacgaaaagatggtgatgttaacatcgcttttctgtctggtcaaggtgttctctttgaagaaatttttgatgacgactggtatcaggcgacagtgtatcggaaaaacgtgagctccaatggcgttactggatctctaccagcatatgggctcaagaattccgcttcaccaattggatgcgtagagcagtatcaatggtgcaattctgcgtactctcgcgatgtgggctgtggacctttggcgagcagatatgatgcgctgtacggtgcagcagcactcttcaatctaacgagtgaggacttacacccagagagacccatttcctccactgaaccaggatcaagattaatctggcctgttctgacactattcacctatcctgttcaaatttctcgaatttggtctcatctcggcgtcacttctttggcgtctcagtcgcgtctctatgatggtctacagaactctatcccaatcaaccaatggcagcttgatgttcaaaaatggtttgatatcatcctgagcgcagttcaagcgtcattcatcgatactgtgttgggaccagatgatccacaactttacaatttgacctatcccccagtgacccatcaagagaaacaacagtgccagagccagaagatcagaagctctagatatacatccttcagcattctcggacttgttttcaccttttccgtcggtggtttgattgtactcgcttctttctttctcgagccattgttgttccttctctataagcattttaactacaagccttacgcccagcttgaatggtctaccaatgctaatctgcaactgcatcgactggcgcacgaagaactcggatttaatgaatggtttgattgtaacagggaagtcccgatcaccaaagatggtgtgaccctcatgggcctagatcttagtaatcctcgtcatcctattttatcgcggggcggatactcaggatctgtttctagacatagtagcgagaaaccaaagacggaaaatacggaacagatgtaa

SEQ ID NO: 260 - protein, 686 aa, Muscodor strobelii
  misc_feature: SGI Peptide ID NO. 559648
  misc_feature (2)..(661): NCBI GI: 189194015 Blast Desc: conserved [Pyrenophora tritici-repentis Pt-1C-BFP] gi|187978910|gb|EDU45536.1| conserved [Pyrenophora tritici-repentis Pt-1C-BFP]
  misc_feature (4)..(659): NCBI GI: 169615058 Blast Desc: SNOG_10683 [Phaeosphaeria nodorum SN15] gi|111060957|gb|EAT82077.1| SNOG_10683 [Phaeosphaeria nodorum SN15]
  misc_feature (5)..(650): NCBI GI: 159128250 Blast Desc: conserved [Aspergillus fumigatus A1163]
  misc_feature (3)..(640): NCBI GI: 169772941 Blast Desc: [Aspergillus oryzae RIB40] gi|83768800|dbj|BAE58937.1| protein product [Aspergillus oryzae]
  misc_feature (5)..(650): NCBI GI: 70986226 Blast Desc: conserved [Aspergillus fumigatus Af293] gi|66846236|gb|EAL86569.1| conserved [Aspergillus fumigatus Af293]
  misc_feature (4)..(640): NCBI GI: 121699395 Blast Desc: ACLA_082720 [Aspergillus clavatus NRRL 1] gi|119396149|gb|EAW06581.1| ACLA_082720 [Aspergillus clavatus NRRL 1]
  misc_feature (5)..(645): NCBI GI: 119474227 Blast Desc: NFIA_004500 [Neosartorya fischeri NRRL 181] gi|119407142|gb|EAW17092.1| conserved [Neosartorya fischeri NRRL 181]
  misc_feature (5)..(645): NCBI GI: 115399382 Blast Desc: [Aspergillus terreus NIH2624] gi|114192163|gb|EAU33863.1| [Aspergillus terreus NIH2624]
  misc_feature (5)..(641): NCBI GI: 256723662 Blast Desc: NECHADRAFT_86728 [Nectria haematococca mpVI 77-13-4]
  misc_feature (4)..(630): NCBI GI: 169618215 Blast Desc: SNOG_12297 [Phaeosphaeria nodorum SN15] gi|160703576|gb|EAT80110.2| SNOG_12297 [Phaeosphaeria nodorum SN15]
MDDNVYLGRWTNWSRGPVLGQTLTTTKEAGNLLIAFTAVFVGFVGARLWKVVSLIIHRSYSTPTPKSTLHYQSQIILRNSSSPESGFSALVRLLWAWRKSRTQYLVRLLLLILLSATLFGAFTIAGGFSASISTAAGDQVLLKPGNCGPVAVTPTNLEERSLIAARYAEEANNAANYAQQCGISSSGTSMGCNKYVVPRLPVAAINYKGVCPFNESLCRDAESTMLLDTGYLDSNDHFGLNRPGDLRFEWRYVLQCTPLQTDGYTSHVFAENRGWERYHYGTQNSFKDTANETTHDFIYEIQDADSQYSFSNASVLQGHNYVLSYRASDTFGGQVLASSDMFPIPELQRKDGDVNIAFLSGQGVLFEEIFDDDWYQATVYRKNVSSNGVTGSLPAYGLKNSASPIGCVEQYQWCNSAYSRDVGCGPLASRYDALYGAAALFNLTSEDLHPERPISSTEPGSRLIWPVLTLFTYPVQISRIWSHLGVTSLASQSRLYDGLQNSIPINQWQLDVQKWFDIILSAVQASFIDTVLGPDDPQLYNLTYPPVTHQEKQQCQSQKIRSSRYTSFSILGLVFTFSVGGLIVLASFFLEPLLFLLYKHFNYKPYAQLEWSTNANLQLHRLAHEELGFNEWFDCNREVPITKDGVTLMGLDLSNPRHPILSRGGYSGSVSRHSSEKPKTENTEQM

SEQ ID NO: 261 - DNA, 2930 bp, Muscodor strobelii
  misc_feature: SGI EST ID NO. CUFF.661.0
  misc_feature: Variant of the nucleotide sequence at SEQ ID NO 259
aactagtccttgactaatgctatttttgcggctttatactcaaccagtgtatgcgaataagaacattcaacatcaagctcagctctgtggctcaaattatgttgttccttgttcaatcccaaggtcttgttagagccaaacgtcttggtcgtgatctcatacgacaatactccttcacagactccaatcatcactatggatgataacgtctatcttggccgttggaccaactggtcacggggcccggtactcggtcaaactctcacaactacgaaagaagcgggcaatttgcttattgcatttaccgccgttttcgtcggatttgtcggtgctcgactgtggaaagttgtcagtctcataattcatcgatcttactctacaccgactccgaaaagcactctgcactaccaaagccagatcattctccgaaactcatcatcgccggaatctggattctcagctctagtacgattattatgggcgtggcgaaaatccaggacccaatatcttgtccgcttactgttattaattctcctttcggcaactcttttcggtgcattcacaatcgcgggtgggttttcagcaagcatctcgactgcagcaggagaccaagtgttgttgaaacctggaaattgtggtccagtggcagtcactcctacaaatctcgaggagcgctctctgattgccgcccggtatgccgaagaagccaacaatgctgccaattatgcacagcaatgcggcattagtagctctggcacgtcgatgggatgcaacaagtatgttgtcccgcgacttccagtcgcagccataaattacaagggtgtctgcccattcaacgagtcactctgccgcgatgccgagtcgacgatgcttctcgacactgggtatcttgatagtaacgatcacttcggcttaaatcgacccggtgatcttcgtttcgagtggcgatatgtcttgcaatgtacgcctctgcagaccgatggatacaccagtcacgttttcgcagaaaacagaggttgggaacgttatcactacggaacccaaaattccttcaaagatacagcaaacgagactacgcatgattttatatacgagattcaggacgctgattcccagtattcgttttcgaatgcaagtgttcttcagggtcataactatgttctcagttatcgtgcctctgacacatttggtggtcaagttctcgcttcatcagacatgtttccaatacccgagcttcaacgaaaagatggtgatgttaacatcgcttttctgtctggtcaaggtgttctctttgaagaaatttttgatgacgactggtatcaggcgacagtgtatcggaaaaacgtgagctccaatggcgttactggatctctaccagcatatgggctcaagaattccgcttcaccaattggatgcgtagagcagtatcaatggtgcaattctgcgtactctcgcgatgtgggctgtggacctttggcgagcagatatgatgcgctgtacggtgcagcagcactcttcaatctaacgagtgaggacttacacccagagagacccatttcctccactgaaccaggatcaagattaatctggcctgttctgacactattcacctatcctgttcaaatttctcgaatttggtctcatctcggcgtcacttctttggcgtctcagtcgcgtctctatgatggtctacagaactctatcccaatcaaccaatggcagcttgatgttcaaaaatggtttgatatcatcctgagcgcagttcaagcgtcattcatcgatactgtgttgggaccagatgatccacaactttacaatttgacctatcccccagtgacccatcaagagaaacaacagtgccagagccagaagatcagaagctctagatatacatccttcagcattctcggacttgttttcaccttttccgtcggtggtttgattgtactcgcttctttctttctcgagccattgttgttccttctctataagcattttaactacaagccttacgcccagcttgaatggtctaccaatgctaatctgcaactgcatcgactggcgcacgaagaactcggatttaatgaatggtttgattgtaacagggaagtcccgatcaccaaagatggtgtgaccctcatgggcctagatcttagtaatcctcgtcatcctattttatcgcggggcggatactcaggatctgtttctagacatagtagcgagaaaccaaagacggaaaatacggaacagatgtaacatgcttgcagcaagcctccattatgcacgtcgattttcggaattccatatggacctgtacttgaagcagagacttggcaactgtttcctttatcttacggtcacaaatttcttttcaaaagaagaggaagtcatggtcatgcttgagaatattgggaatactgggctctatcgttatgtaggtacttttgaataaaagatttgttgcgaagtggcctacttatacgaagtcagggttgtgaggtaatacgctatgctcggtggcacctgatacaggcgttcaggagtgtgtatgtacggtggttatccgcaagtcaattcggtagttagctagagtcatcctaattgctattcccatctaaatgcctatctgcagcaatcccacatgcttcccacgaccacgagtctctcgcctccgtgagacgtttttgttcgtacgaaaagggtatttcctctaagcacagctgccgaactgtgactggcaccctccaccgcagtaatatgacgacgaaccacaccaaccggcggatgagcaacaatcaccatacactgatccaacacaaacatacccgcttgacttaccgcagcttccattgccagagatagccaggcccttgttcgtaccgccagggccagatgattttggtgtaggtgaaggcgacgctgcactggcg

SEQ ID NO: 262 - DNA, 1074 bp, Muscodor strobelii
  misc_feature: SGI cDNA ID NO. 559649
  misc_feature: Encodes the peptide sequence at SEQ ID NO 263
atgttctttcagaagttgatattgactgccgctgtggctggtagcgctgtcgttggtcataggtttgcggtgtactacgaccaatggcacccgaacgcgccaaggaaagatcagactgccaacataactcatgtcattacggcctttttggaccccatcacaataacaacaaacccaccaacaccctactggcccttcactactacagaaaatatacgtccactcttcgatgagggcacgaagatgtgtctggctgttggaggatggggatggatcacggggtttgaggttgcccatggatcggagcagaacagaacactattcgcgaagaatctcgctacaattctccatgatcaaggctatgattgtgttgatcctggcggcaatggcattgactacattcagtatcccaatgagaataaaacagacgaaatccaaaactttcctctcttgctgcagacaatcaaggaggccattggggacaaggaactctcgattgcggtaccgggcttacaaaaagacatgataggttttactacggatacaattcctaaaatcatggcaagcgtggacatggtgaatgtcatggcctatgaccttatgaataggcgtgataaaacaacgaaacatcatacgtctgtaaaaggagcactcgagacagtcgagacatatctttcactcggtatggatgcagagaagatgaatcttggtttcgcattgtacgccaaatggttcaagactatcgggacttgcaatcaacccattggttgcacgactgccgagttggaaaatgaagacggctccgacgctggaaactcgagcgctattaccttcttagaaggggtccccgttcttgcgaatggcatagctgataagactgagggcggcgagtggtattgggacccggcaacttccaggtattggacttgggacacgcccgatctcatcgcccagaaattcgacgagattgtgaaggcaagcaagctcggaggcgttatggcttggagtctcggcgaagatcatgcagacttcagttacattcaagcgatccaaaagggactaagctcactgtaa

SEQ ID NO: 263 - protein, 357 aa, Muscodor strobelii
  misc_feature: SGI Peptide ID NO. 559649
  misc_feature (20)..(340): Pfam Id: PF00704 Pfam Desc: Glycosyl hydrolases family 18
  misc_feature (21)..(357): NCBI GI: 126032291 Blast Desc: TPA: chitinase 18-11 [Hypocrea jecorina]
  misc_feature (3)..(356): NCBI GI: 242810742 Blast Desc: class V chitinase, [Talaromyces stipitatus ATCC 10500] gi|218716269|gb|EED15691.1| class V chitinase, [Talaromyces stipitatus ATCC 10500]
  misc_feature (21)..(356): NCBI GI: 212536877 Blast Desc: class V chitinase, [Penicillium marneffei ATCC 18224] gi|210068336|gb|EEA22427.1| class V chitinase, [Penicillium marneffei ATCC 18224]
  misc_feature (1)..(357): NCBI GI: 164425616 Blast Desc: NCU06020 [Neurospora crassa OR74A] gi|157070997|gb|EAA30374.2| NCU06020 [Neurospora crassa OR74A]
  misc_feature (5)..(354): NCBI GI: 146322309 Blast Desc: class V chitinase [Aspergillus fumigatus Af293] gi|129556953|gb|EAL87745.2| class V chitinase, [Aspergillus fumigatus Af293]
  misc_feature (22)..(278): NCBI GI: 256722462 Blast Desc: NECHADRAFT_105955 [Nectria haematococca mpVI 77-13-4]
  misc_feature (30)..(354): NCBI GI: 67515879 Blast Desc: AN0221.2 [Aspergillus nidulans FGSC A4] gi|40746938|gb|EAA66094.1| AN0221.2 [Aspergillus nidulans FGSC A4] gi|259489567|tpe|CBF89945.1| TPA: conserved [Aspergillus FGSC
  misc_feature (11)..(354): NCBI GI: 261358556 Blast Desc: chitinase 18-4 [Verticillium albo-atrum VaMs.102]
  misc_feature (5)..(278): NCBI GI: 260279101 Blast Desc: chitinase [Magnaporthe oryzae]
  misc_feature (13)..(357): NCBI GI: 46110945 Blast Desc: FG02354.1 [Gibberella zeae PH-1]
  misc_feature (77)..(356): SWISSPROT Homolog: EC 3.2.1.14 Chitinase
MFFQKLILTAAVAGSAVVGHRFAVYYDQWHPNAPRKDQTANITHVITAFLDPITITTNPPTPYWPFTTTENIRPLFDEGTKMCLAVGGWGWITGFEVAHGSEQNRTLFAKNLATILHDQGYDCVDPGGNGIDYIQYPNENKTDEIQNFPLLLQTIKEAIGDKELSIAVPGLQKDMIGFTTDTIPKIMASVDMVNVMAYDLMNRRDKTTKHHTSVKGALETVETYLSLGMDAEKMNLGFALYAKWFKTIGTCNQPIGCTTAELENEDGSDAGNSSAITFLEGVPVLANGIADKTEGGEWYWDPATSRYWTWDTPDLIAQKFDEIVKASKLGGVMAWSLGEDHADFSYIQAIQKGLSSL

SEQ ID NO: 264 - DNA, 895 bp, Muscodor strobelii
  misc_feature: SGI EST ID NO. CUFF.667.0
  misc_feature: Variant of the nucleotide sequence at SEQ ID NO 262
aaaaggagcactcgagacagtcgagacatatctttcactcggtatggatgcagagaagatgaatcttggtttcgcattgtacgccaaatggttcaagactatcgggacttgcaatcaacccattggttgcacgactgccgagttggaaaatgaagacggctccgacgctggaaactcgagcgctattaccttcttagaaggggtccccgttcttgcgaatggcatagctgataagactgagggcggcgagtggtattgggacccggcaacttccaggtattggacttgggacacgcccgatctcatcgcccagaaattcgacgagattgtgaaggcaagcaagctcggaggcgttatggcttggagtctcggcgaagatcatgcagacttcagttacattcaagcgatccaaaagggactaagctcactgtaaagctgcacatgggtttgtaaccctagaccaaagggcgtcgagatgcagctctgagagacagcgtgtattgcacctatcaccacctacttcactacctgagtatttcattggatagattaacttcaattcatatgcatcgcgctgtgagacacttgtattgaagaagtgagctctccggggtacgcaatcgaggcgagttggggcaccgctgcatgacactcatataccttcggccattgctacatcaaatggtttcaacccaatcgacgttcgattaacactaagattcaagagtgtactctttacttgattcaacatatatgcaatagtcaggttacactccgcggaaaagtgcccatggccggaagtcttatggtgccatttaattcccgacctgcctaccaacttaagtagcaagggttaccggattgtcgtcctgggctggaacctcttatcattctc

SEQ ID NO: 265 - DNA, 1554 bp, Muscodor strobelii
  misc_feature: SGI cDNA ID NO. 559650
  misc_feature: Encodes the peptide sequence at SEQ ID NO 266
atgggcagggcacccgctcaacgaccagtggtcctcgtggtttcccacggtctgagcggacatctgcaaccaatgcttcgcatagcagccgcgcttcacactctctcatgggatctatacttccaagggccgacagcccacacggagagaattaaggcaacaggagctatattcctcccgctacgaggggccgcagaccttgacgataaagcatactacgaaacccctcctgtcaaggggtacaacaatcgtcattggtcagagcgcgtgatgctagacttccgatatcagtgtatcgagcctttacctgagcaatggagttgcgtaaaagatgcactcaaaacaattcgcgtcaacgagccagagagacaagtggtcgtgctagctgaagcgttcttcctgggaacaatgcccttacactacggtgcatcgctagactcggacttggactcgggcacaaattccaagctcatacggccgaaatctatttgcatatctgtgaccgtaccggcaatccgtagcgttgatctggcgccatcaggctaccccgtaccttacgatcctgctccctcaggccaagcacgaaacgccgcgctctggcgaggatggacaagacgcgcaaaggacctatccgcacttcttgagaccaaaatgcaagaagcaggagccacaagacctatacacgaagtcttcctttcaggtgcaaactacaaatgccactccaaaatcctccagctcggcgtcccaggctttgagtatcctcgaagtgactggccagacggcttcaaattcgctggcctcgtacaaggtagaccgcttccaaagaaagagtcagattacccaatagatgataagcaagagaaacgactagacagaatacccaaagatcctcagaaaataaacgggcaatccacaaagacaccatccgctaacaaaccacctttcccctggtggccaaccctagaatccaactccctgctcccactcaactcgccaacccgcaaaaagataatggtcgtctcccaaggcacagtagaaatgaaccccaaagacctaataattcccaccatcaacgcattctccaaccgtccagacatactcatcatcgtaatcctaggctggaaaggcgccaccctctcactatcctcatcatccatccagggccctaaaaaagcaaacgaagatgaaataccgccaaacacccacatagcagattacctctcctacgacaccgtgctcccacacgctgacgtatgggtccacaacgccggcttcggagccataaaccacggcatcgccaacggggtccctatggtcgttgcgggcgagggtatggacaagacggagaatgcgcgacgggtcgcctggtcaggtattggtataaatttagaaacagcgactccaagtagtgatcaagtacgcgaggctatcgaacatgtactgcgggagaagaagtttgcacaacgggtgcaggtcctggctagggagagcgaagctatagattgctttcaggttattcatgatgagctcatgtcacttactacagtgccttga

SEQ ID NO: 266 - protein, 517 aa, Muscodor strobelii
  misc_feature: SGI Peptide ID NO. 559650
  misc_feature (9)..(483): NCBI GI: 39976197 Blast Desc: MGG_05975 [Magnaporthe grisea 70-15] gi|145011751|gb|EDJ96407.1| MGG_05975 [Magnaporthe grisea 70-15]
  misc_feature (6)..(502): NCBI GI: 145236587 Blast Desc: An06g01140 [Aspergillus niger] gi|134075400|emb|CAK39187.1| protein product [Aspergillus niger]
  misc_feature (8)..(512): NCBI GI: 85115204 Blast Desc: NCU08625 [Neurospora crassa OR74A] gi|28926628|gb|EAA35597.1| [Neurospora crassa OR74A]
  misc_feature (6)..(513): NCBI GI: 256729230 Blast Desc: NECHADRAFT_47739 [Nectria haematococca mpVI 77-13-4]
  misc_feature (4)..(513): NCBI GI: 154309557 Blast Desc: BC1G_07249 [Botryotinia fuckeliana B05.10] gi|150852272|gb|EDN27464.1| BC1G_07249 [Botryotinia fuckeliana B05.10]
  misc_feature (8)..(514): NCBI GI: 156045613 Blast Desc: SS1G_09997 [Sclerotinia sclerotiorum 1980] gi|154694390|gb|EDN94128.1| SS1G_09997 [Sclerotinia sclerotiorum 1980]
  misc_feature (18)..(513): NCBI GI: 46117008 Blast Desc: FG04346.1 [Gibberella zeae PH-1]
  misc_feature (7)..(510): NCBI GI: 39968249 Blast Desc: MGG_02217 [Magnaporthe grisea 70-15] gi|145010100|gb|EDJ94756.1| MGG_02217 [Magnaporthe grisea 70-15]
  misc_feature (7)..(512): NCBI GI: 171677051 Blast Desc: protein product [Podospora anserina] gi|170936593|emb|CAP61252.1| protein product [Podospora anserina]
  misc_feature (3)..(514): NCBI GI: 39948887 Blast Desc: MGG_08724 [Magnaporthe grisea 70-15] gi|145009267|gb|EDJ93978.1| MGG_08724 [Magnaporthe grisea 70-15]
MGRAPAQRPVVLVVSHGLSGHLQPMLRIAAALHTLSWDLYFQGPTAHTERIKATGAIFLPLRGAADLDDKAYYETPPVKGYNNRHWSERVMLDFRYQCIEPLPEQWSCVKDALKTIRVNEPERQVVVLAEAFFLGTMPLHYGASLDSDLDSGTNSKLIRPKSICISVTVPAIRSVDLAPSGYPVPYDPAPSGQARNAALWRGWTRRAKDLSALLETKMQEAGATRPIHEVFLSGANYKCHSKILQLGVPGFEYPRSDWPDGFKFAGLVQGRPLPKKESDYPIDDKQEKRLDRIPKDPQKINGQSTKTPSANKPPFPWWPTLESNSLLPLNSPTRKKIMVVSQGTVEMNPKDLIIPTINAFSNRPDILIIVILGWKGATLSLSSSSIQGPKKANEDEIPPNTHIADYLSYDTVLPHADVWVHNAGFGAINHGIANGVPMVVAGEGMDKTENARRVAWSGIGINLETATPSSDQVREAIEHVLREKKFAQRVQVLARESEAIDCFQVIHDELMSLTTVP

SEQ ID NO: 267 - DNA, 1903 bp, Muscodor strobelii
  misc_feature: SGI EST ID NO. CUFF.675.0
  misc_feature: Variant of the nucleotide sequence at SEQ ID NO 265
cttagaagtgcggtttacagcctaatagtgagacagctagcgggcagcacaacgcgaactgttatgggacctcacctgtacgaatctgtcgccagacttgatcgttaattcgaagacgcccatagagtcacacatccatagatcttgatttgagatcaatgagattcgaaaagagtatatgccgatgaaatgcgcttacagccagatcttgcaccatcagcaatgggcagggcacccgctcaacgaccagtggtcctcgtggtttcccacggtctgagcggacatctgcaaccaatgcttcgcatagcagccgcgcttcacactctctcatgggatctatacttccaagggccgacagcccacacggagagaattaaggcaacaggagctatattcctcccgctacgaggggccgcagaccttgacgataaagcatactacgaaacccctcctgtcaaggggtacaacaatcgtcattggtcagagcgcgtgatgctagacttccgatatcagtgtatcgagcctttacctgagcaatggagttgcgtaaaagatgcactcaaaacaattcgcgtcaacgagccagagagacaagtggtcgtgctagctgaagcgttcttcctgggaacaatgcccttacactacggtgcatcgctagactcggacttggactcgggcacaaattccaagctcatacggccgaaatctatttgcatatctgtgaccgtaccggcaatccgtagcgttgatctggcgccatcaggctaccccgtaccttacgatcctgctccctcaggccaagcacgaaacgccgcgctctggcgaggatggacaagacgcgcaaaggacctatccgcacttcttgagaccaaaatgcaagaagcaggagccacaagacctatacacgaagtcttcctttcaggtgcaaactacaaatgccactccaaaatcctccagctcggcgtcccaggctttgagtatcctcgaagtgactggccagacggcttcaaattcgctggcctcgtacaaggtagaccgcttccaaagaaagagtcagattacccaatagatgataagcaagagaaacgactagacagaatacccaaagatcctcagaaaataaacgggcaatccacaaagacaccatccgctaacaaaccacctttcccctggtggccaaccctagaatccaactccctgctcccactcaactcgccaacccgcaaaaagataatggtcgtctcccaaggcacagtagaaatgaaccccaaagacctaataattcccaccatcaacgcattctccaaccgtccagacatactcatcatcgtaatcctaggctggaaaggcgccaccctctcactatcctcatcatccatccagggccctaaaaaagcaaacgaagatgaaataccgccaaacacccacatagcagattacctctcctacgacaccgtgctcccacacgctgacgtatgggtccacaacgccggcttcggagccataaaccacggcatcgccaacggggtccctatggtcgttgcgggcgagggtatggacaagacggagaatgcgcgacgggtcgcctggtcaggtattggtataaatttagaaacagcgactccaagtagtgatcaagtacgcgaggctatcgaacatgtactgcgggagaagaagtttgcacaacgggtgcaggtcctggctagggagagcgaagctatagattgctttcaggttattcatgatgagctcatgtcacttactacagtgccttgaagagaaagaacggagatggattaggcaagtacttggctttacggtgcctcaggtagtgtctacagatattgcgaagcaatttttggacctaactcagatattcttatcacgaatcttatacgagagg

SEQ ID NO: 268 - DNA, 2334 bp, Muscodor strobelii
  misc_feature: SGI cDNA ID NO. 559651
  misc_feature: Encodes the peptide sequence at SEQ ID NO 269
atgtcgaatgctggcccgccgtctgccggtggtggtgcagggagttccaacttcgcatcgcagcctggtgcacccgcgactccagcaccctcagtaacgacatcgaccacagctatcccgccgcctaacaacgtgccccagccgccgaataatcagaacctcaaccagatagtgacggactatctgctgaagaagggttacaagaggactgaggctaccttccgtcaagaggtgaaagacattgatgagcatggacgccccaagccgaatgaggattcagtgtcagagcacacgttcccggctggcaagtatctgacctcgttcaaattttttgagaactgggtaaacggcggacttgatctttacaaggtttgcacattcttccctttcctacgaattacatgtctcacacctttacagtttgagctaggcaaaatactgtggcctttgtttgtctactcctatcttcgacttgttggtcaaggatcgactgcccatgcccaagagcttatgcagcaatgccgtgagcgctttgaaagctcacactctgatgagcttaaagcgctcgacgtggtgactctggccgcacatgttcgtgagaacgcaaccgccaagctttacctcgacaatcgctacgtgattcccatcaatcaatcactgactggtcagctgtttcactacctgacacaacaccttgacaaatgtggtgccgttgtcctggatatcctgaaccagtattgtcgcgttgagtctgtagatcgcggcccaattgaaccattcagcttcgaggccatctatcgacgagcccgcaaccaggaactggatgaggctgacattcaggagggaattccgggcatgaccaatcggggcggtgttaccaatcgcgatgttcttgagaaccaggcagccttgaagttgggaccgtttcccatggagcctgaattgagagcggatctcatatctgagctcgaagaggatgatgagcttcatcctcccaaggatggtatcaacactctcgtacaggagtttcatgctatggaggccatcaagaaagaggctggagaatcgcccgcccgaacagatattccatatcccccatcgcgtagcagagatgtcgtcatggagatgcagaaggtccgtgagaaccgagatcggttcaggattgagaatcgcactggcggcgccggaccaggactttctgtctgcatgtttactttccacaaccacctcggaagtttctcctgcatggacttctccaaagaccagatgctcgtcgctgtaggaacgatggattcctacatccgagtatggtcccttgatgggaagcccctgaagtcaatattgccgcccgagaaggacttgaaagtcaacaaccgtaagctcattggtcattctgccccggtgtatacggtcgccttttcagacgccattgccaatatagaccgcaatatttatgaaggctaccacaaacccgagactcactcccagatcctgctttctgctggagcggatggacaggttcgcttatggtccttggacgtatgggcctgtctctgcatctacaaaggtcatgatggccctgttcaatgcctttcctggagcccacagggacattacttcgctacgggcggttgggacaagacagtccgggtctgggctcaggatcatgcttctgcgcaacgaattatgatcggtcacgaaacgccgatctcagccattgcctggcaccccaatggcctctatctattctccgcatcagatgagacagataaaacaattcgcatgtggacaattgccaacggtagttgtgttcgggttttcaccggccatactgacttcatctcggcgcttgagtgctctccaaacggcaagattctagcgtcggcagatatcggcggtaacatcttcttttgggatgtggagaaggggaccaggatcaagcgctgtcgtgggcacggccgaggcggcatctggtctctggctttctgcgtggaaggcaccgttcttgtttcgggtggccaagacaacaccgtacgcgtatgggatgttatgatgccagccgagggcagccgtccggccaatcaacaggatggggatggcacaaacgttgcgtctggaggtcaaggtgacggtaaacaaaccggagtaggaacacaacctgctagcaatcctaccactagtaagaagaaagggaaggagaccatgatcaccccagaccagatcagtgccttcctcacgaagaagagtcctgtcctgaagattcaatgcacccgtatgaatcttgttgtcgctggtggatgctactacccggagacgcaagatcgagagcgttga

SEQ ID NO: 269 - protein, 777 aa, Muscodor strobelii
  misc_feature: SGI Peptide ID NO. 559651
  misc_feature (52)..(78): Pfam Id: PF08513 Pfam Desc: LisH
  misc_feature (515)..(553): Pfam Id: PF00400 Pfam Desc: WD domain, G-beta repeat
  misc_feature (601)..(639): Pfam Id: PF00400 Pfam Desc: WD domain, G-beta repeat
  misc_feature (455)..(511): Pfam Id: PF00400 Pfam Desc: WD domain, G-beta repeat
  misc_feature (644)..(682): Pfam Id: PF00400 Pfam Desc: WD domain, G-beta repeat
  misc_feature (400)..(438): Pfam Id: PF00400 Pfam Desc: WD domain, G-beta repeat
  misc_feature (83)..(250): Pfam Id: PF04494 Pfam Desc: WD40 associated region in TFIID subunit
  misc_feature (140)..(250): Pfam Id: PF04494 Pfam Desc: WD40 associated region in TFIID subunit
  misc_feature (557)..(587): Pfam Id: PF00400 Pfam Desc: WD domain, G-beta repeat
  misc_feature (52)..(771): NCBI GI: 16944416 Blast Desc: related to TRANSCRIPTION INITIATION FACTOR TFIID 100 KDA SUBUNIT [Neurospora crassa]
  misc_feature (45)..(771): NCBI GI: 164426529 Blast Desc: NCU04136 [Neurospora crassa OR74A] gi|157071372|gb|EAA32056.2| NCU04136 [Neurospora crassa OR74A]
  misc_feature (46)..(771): NCBI GI: 116198367 Blast Desc: conserved [Chaetomium globosum CBS 148.51] gi|88178618|gb|EAQ86086.1| conserved [Chaetomium globosum CBS 148.51]
  misc_feature (1)..(771): NCBI GI: 171692415 Blast Desc: protein product [Podospora anserina] gi|170946156|emb|CAP72957.1| protein product [Podospora anserina]
  misc_feature (50)..(761): NCBI GI: 256728546 Blast Desc: transcription initiation factor TFIID, subunit TAF5 [Nectria haematococca mpVI 77-13-4]
  misc_feature (50)..(771): NCBI GI: 261360874 Blast Desc: transcription initiation factor TFIID subunit 5 [Verticillium albo-atrum VaMs.102]
  misc_feature (53)..(771): NCBI GI: 145606002 Blast Desc: MGG_06742 [Magnaporthe grisea 70-15] gi|145013738|gb|EDJ98379.1| MGG_06742 [Magnaporthe grisea 70-15]
  misc_feature (22)..(761): NCBI GI: 46110256 Blast Desc: FG02010.1 [Gibberella zeae PH-1]
  misc_feature (45)..(770): NCBI GI: 154309684 Blast Desc: BC1G_07312 [Botryotinia fuckeliana B05.10] gi|150851773|gb|EDN26966.1| BC1G_07312 [Botryotinia fuckeliana B05.10]
  misc_feature (1)..(770): NCBI GI: 156051964 Blast Desc: SS1G_07389 [Sclerotinia sclerotiorum 1980] gi|154705167|gb|EDO04906.1| SS1G_07389 [Sclerotinia sclerotiorum 1980]
MSNAGPPSAGGGAGSSNFASQPGAPATPAPSVTTSTTAIPPPNNVPQPPNNQNLNQIVTDYLLKKGYKRTEATFRQEVKDIDEHGRPKPNEDSVSEHTFPAGKYLTSFKFFENWVNGGLDLYKVCTFFPFLRITCLTPLQFELGKILWPLFVYSYLRLVGQGSTAHAQELMQQCRERFESSHSDELKALDVVTLAAHVRENATAKLYLDNRYVIPINQSLTGQLFHYLTQHLDKCGAVVLDILNQYCRVESVDRGPIEPFSFEAIYRRARNQELDEADIQEGIPGMTNRGGVTNRDVLENQAALKLGPFPMEPELRADLISELEEDDELHPPKDGINTLVQEFHAMEAIKKEAGESPARTDIPYPPSRSRDVVMEMQKVRENRDRFRIENRTGGAGPGLSVCMFTFHNHLGSFSCMDFSKDQMLVAVGTMDSYIRVWSLDGKPLKSILPPEKDLKVNNRKLIGHSAPVYTVAFSDAIANIDRNIYEGYHKPETHSQILLSAGADGQVRLWSLDVWACLCIYKGHDGPVQCLSWSPQGHYFATGGWDKTVRVWAQDHASAQRIMIGHETPISAIAWHPNGLYLFSASDETDKTIRMWTIANGSCVRVFTGHTDFISALECSPNGKILASADIGGNIFFWDVEKGTRIKRCRGHGRGGIWSLAFCVEGTVLVSGGQDNTVRVWDVMMPAEGSRPANQQDGDGTNVASGGQGDGKQTGVGTQPASNPTTSKKKGKETMITPDQISAFLTKKSPVLKIQCTRMNLVVAGGCYYPETQDRER

SEQ ID NO: 270 - DNA, 2806 bp, Muscodor strobelii
  misc_feature: SGI EST ID NO. CUFF.679.0
  misc_feature: Variant of the nucleotide sequence at SEQ ID NO 268
ccactaggccttcacacccactcatatctcaacacttatcagtgggttatttgaaggacataaatacattgcatcagatctcagctccatttaagggatctctgcctgccatgtcgaatgctggcccgccgtctgccggtggtggtgcagggagttccaacttcgcatcgcagcctggtgcacccgcgactccagcaccctcagtaacgacatcgaccacagctatcccgccgcctaacaacgtgccccagccgccgaataatcagaacctcaaccagatagtgacggactatctgctgaagaagggttacaagaggactgaggctaccttccgtcaagaggtgaaagacattgatgagcatggacgccccaagccgaatgaggattcagtgtcagagcacacgttcccggctggcaagtatctgacctcgttcaaattttttgagaactgggtaaacggcggacttgatctttacaagtttgagctaggcaaaatactgtggcctttgtttgtctactcctatcttcgacttgttggtcaaggatcgactgcccatgcccaagagcttatgcagcaatgccgtgagcgctttgaaagctcacactctgatgagcttaaagcgctcgacgtggtgactctggccgcacatgttcgtgagaacgcaaccgccaagctttacctcgacaatcgctacgtgattcccatcaatcaatcactgactggtcagctgtttcactacctgacacaacaccttgacaaatgtggtgccgttgtcctggatatcctgaaccagtattgtcgcgttgagtctgtagatcgcggcccaattgaaccattcagcttcgaggccatctatcgacgagcccgcaaccaggaactggatgaggctgacattcaggagggaattccgggcatgaccaatcggggcggtgttaccaatcgcgatgttcttgagaaccaggcagccttgaagttgggaccgtttcccatggagcctgaattgagagcggatctcatatctgagctcgaagaggatgatgagcttcatcctcccaaggatggtatcaacactctcgtacaggagtttcatgctatggaggccatcaagaaagaggctggagaatcgcccgcccgaacagatattccatatcccccatcgcgtagcagagatgtcgtcatggagatgcagaaggtccgtgagaaccgagatcggttcaggattgagaatcgcactggcggcgccggaccaggactttctgtctgcatgtttactttccacaaccacctcggaagtttctcctgcatggacttctccaaagaccagatgctcgtcgctgtaggaacgatggattcctacatccgagtatggtcccttgatgggaagcccctgaagtcaatattgccgcccgagaaggacttgaaagtcaacaaccgtaagctcattggtcattctgccccggtgtatacggtcgccttttcagacgccattgccaatatagaccgcaatatttatgaaggctaccacaaacccgagactcactcccagatcctgctttctgctggagcggatggacaggttcgcttatggtccttggacgtatgggcctgtctctgcatctacaaaggtcatgatggccctgttcaatgcctttcctggagcccacagggacattacttcgctacgggcggttgggacaagacagtccgggtctgggctcaggatcatgcttctgcgcaacgaattatgatcggtcacgaaacgccgatctcagccattgcctggcaccccaatggcctctatctattctccgcatcagatgagacagataaaacaattcgcatgtggacaattgccaacggtagttgtgttcgggttttcaccggccatactgacttcatctcggcgcttgagtgctctccaaacggcaagattctagcgtcggcagatatcggcggtaacatcttcttttgggatgtggagaaggggaccaggatcaagcgctgtcgtgggcacggccgaggcggcatctggtctctggctttctgcgtggaaggcaccgttcttgtttcgggtggccaagacaacaccgtacgcgtatgggatgttatgatgccagccgagggcagccgtccggccaatcaacaggatggggatggcacaaacgttgcgtctggaggtcaaggtgacggtaaacaaaccggagtaggaacacaacctgctagcaatcctaccactagtaagaagaaagggaaggagaccatgatcaccccagaccagatcagtgccttcctcacgaagaagagtcctgtcctgaagattcaatgcacccgtatgaatcttgttgtcgctggtggatgctactacccggagacgcaagatcgagagcgttgactagccgataaatgatttggtcatttgtatcacagaaaaggcgtttggtccaggtgttcaggattgtacgactagttgggaggaaaattgcgcttgatacccgaaaagctctttatctaggagcactttgcattcttgttgctttcggcaactggcggacacacaggggtgtgactggcgcatgtgcatccagagatgtttactaacaagaaaagaaccacactggaaaaacattgcacacacgtgcccaagacacggagagagaatcctaggagcaaaactagcaaatacagaaccgaagggcccggaataatatacaatgcttcattgtgtctgtgacttcgtagaattaacttgcaaagcagtgaggactgtatatttgtgtacctatcaggccatggagaagaaaaaat

SEQ ID NO: 271 - DNA, 2382 bp, Muscodor strobelii
  misc_feature: SGI cDNA ID NO. 559652
  misc_feature: Encodes the peptide sequence at SEQ ID NO 272
atgtcgaatgctggcccgccgtctgccggtggtggtgcagggagttccaacttcgcatcgcagcctggtgcacccgcgactccagcaccctcagtaacgacatcgaccacagctatcccgccgcctaacaacgtgccccagccgccgaataatcagaacctcaaccagataagcctgagctcaatcgcgagcccgcgccctgtgcccatctcgattggtgatgtggttgccctcatgggcgcggacactcctacgaaacaaggcgacttggtgacggactatctgctgaagaagggttacaagaggactgaggctaccttccgtcaagaggtgaaagacattgatgagcatggacgccccaagccgaatgaggattcagtgtcagagcacacgttcccggctggcaagtatctgacctcgttcaaattttttgagaactgggtaaacggcggacttgatctttacaagtttgagctaggcaaaatactgtggcctttgtttgtctactcctatcttcgacttgttggtcaaggatcgactgcccatgcccaagagcttatgcagcaatgccgtgagcgctttgaaagctcacactctgatgagcttaaagcgctcgacgtggtgactctggccgcacatgttcgtgagaacgcaaccgccaagctttacctcgacaatcgctacgtgattcccatcaatcaatcactgactggtcagctgtttcactacctgacacaacaccttgacaaatgtggtgccgttgtcctggatatcctgaaccagtattgtcgcgttgagtctgtagatcgcggcccaattgaaccattcagcttcgaggccatctatcgacgagcccgcaaccaggaactggatgaggctgacattcaggagggaattccgggcatgaccaatcggggcggtgttaccaatcgcgatgttcttgagaaccaggcagccttgaagttgggaccgtttcccatggagcctgaattgagagcggatctcatatctgagctcgaagaggatgatgagcttcatcctcccaaggatggtatcaacactctcgtacaggagtttcatgctatggaggccatcaagaaagaggctggagaatcgcccgcccgaacagatattccatatcccccatcgcgtagcagagatgtcgtcatggagatgcagaaggtccgtgagaaccgagatcggttcaggattgagaatcgcactggcggcgccggaccaggactttctgtctgcatgtttactttccacaaccacctcggaagtttctcctgcatggacttctccaaagaccagatgctcgtcgctgtaggaacgatggattcctacatccgagtatggtcccttgatgggaagcccctgaagtcaatattgccgcccgagaaggacttgaaagtcaacaaccgtaagctcattggtcattctgccccggtgtatacggtcgccttttcagacgccattgccaatatagaccgcaatatttatgaaggctaccacaaacccgagactcactcccagatcctgctttctgctggagcggatggacaggttcgcttatggtccttggacgtatgggcctgtctctgcatctacaaaggtcatgatggccctgttcaatgcctttcctggagcccacagggacattacttcgctacgggcggttgggacaagacagtccgggtctgggctcaggatcatgcttctgcgcaacgaattatgatcggtcacgaaacgccgatctcagccattgcctggcaccccaatggcctctatctattctccgcatcagatgagacagataaaacaattcgcatgtggacaattgccaacggtagttgtgttcgggttttcaccggccatactgacttcatctcggcgcttgagtgctctccaaacggcaagattctagcgtcggcagatatcggcggtaacatcttcttttgggatgtggagaaggggaccaggatcaagcgctgtcgtgggcacggccgaggcggcatctggtctctggctttctgcgtggaaggcaccgttcttgtttcgggtggccaagacaacaccgtacgcgtatgggatgttatgatgccagccgagggcagccgtccggccaatcaacaggatggggatggcacaaacgttgcgtctggaggtcaaggtgacggtaaacaaaccggagtaggaacacaacctgctagcaatcctaccactagtaagaagaaagggaaggagaccatgatcaccccagaccagatcagtgccttcctcacgaagaagagtcctgtcctgaagattcaatgcacccgtatgaatcttgttgtcgctggtggatgctactacccggagacgcaagatcgagagcgttga

SEQ ID NO: 272 - protein, 793 aa, Muscodor strobelii
  misc_feature: SGI Peptide ID NO. 559652
  misc_feature (531)..(569): Pfam Id: PF00400 Pfam Desc: WD domain, G-beta repeat
  misc_feature (617)..(655): Pfam Id: PF00400 Pfam Desc: WD domain, G-beta repeat
  misc_feature (471)..(527): Pfam Id: PF00400 Pfam Desc: WD domain, G-beta repeat
  misc_feature (660)..(698): Pfam Id: PF00400 Pfam Desc: WD domain, G-beta repeat
  misc_feature (416)..(454): Pfam Id: PF00400 Pfam Desc: WD domain, G-beta repeat
  misc_feature (116)..(266): Pfam Id: PF04494 Pfam Desc: WD40 associated region in TFIID subunit
  misc_feature (90)..(111): Pfam Id: PF08513 Pfam Desc: LisH
  misc_feature (573)..(603): Pfam Id: PF00400 Pfam Desc: WD domain, G-beta repeat
  misc_feature (91)..(787): NCBI GI: 164426529 Blast Desc: NCU04136 [Neurospora crassa OR74A] gi|157071372|gb|EAA32056.2| NCU04136 [Neurospora crassa OR74A]
  misc_feature (83)..(787): NCBI GI: 116198367 Blast Desc: conserved [Chaetomium globosum CBS 148.51] gi|88178618|gb|EAQ86086.1| conserved [Chaetomium globosum CBS 148.51]
  misc_feature (90)..(787): NCBI GI: 16944416 Blast Desc: related to TRANSCRIPTION INITIATION FACTOR TFIID 100 KDA SUBUNIT [Neurospora crassa]
  misc_feature (1)..(787): NCBI GI: 171692415 Blast Desc: protein product [Podospora anserina] gi|170946156|emb|CAP72957.1| protein product [Podospora anserina]
  misc_feature (90)..(777): NCBI GI: 256728546 Blast Desc: transcription initiation factor TFIID, subunit TAF5 [Nectria haematococca mpVI 77-13-4]
  misc_feature (90)..(787): NCBI GI: 261360874 Blast Desc: transcription initiation factor TFIID subunit 5 [Verticillium albo-atrum VaMs.102]
  misc_feature (90)..(787): NCBI GI: 145606002 Blast Desc: MGG_06742 [Magnaporthe grisea 70-15] gi|145013738|gb|EDJ98379.1| MGG_06742 [Magnaporthe grisea 70-15]
  misc_feature (25)..(777): NCBI GI: 46110256 Blast Desc: FG02010.1 [Gibberella zeae PH-1]
  misc_feature (45)..(786): NCBI GI: 154309684 Blast Desc: BC1G_07312 [Botryotinia fuckeliana B05.10] gi|150851773|gb|EDN26966.1| BC1G_07312 [Botryotinia fuckeliana B05.10]
  misc_feature (1)..(786): NCBI GI: 156051964 Blast Desc: SS1G_07389 [Sclerotinia sclerotiorum 1980] gi|154705167|gb|EDO04906.1| SS1G_07389 [Sclerotinia sclerotiorum 1980]
MSNAGPPSAGGGAGSSNFASQPGAPATPAPSVTTSTTAIPPPNNVPQPPNNQNLNQISLSSIASPRPVPISIGDVVALMGADTPTKQGDLVTDYLLKKGYKRTEATFRQEVKDIDEHGRPKPNEDSVSEHTFPAGKYLTSFKFFENWVNGGLDLYKFELGKILWPLFVYSYLRLVGQGSTAHAQELMQQCRERFESSHSDELKALDVVTLAAHVRENATAKLYLDNRYVIPINQSLTGQLFHYLTQHLDKCGAVVLDILNQYCRVESVDRGPIEPFSFEAIYRRARNQELDEADIQEGIPGMTNRGGVTNRDVLENQAALKLGPFPMEPELRADLISELEEDDELHPPKDGINTLVQEFHAMEAIKKEAGESPARTDIPYPPSRSRDVVMEMQKVRENRDRFRIENRTGGAGPGLSVCMFTFHNHLGSFSCMDFSKDQMLVAVGTMDSYIRVWSLDGKPLKSILPPEKDLKVNNRKLIGHSAPVYTVAFSDAIANIDRNIYEGYHKPETHSQILLSAGADGQVRLWSLDVWACLCIYKGHDGPVQCLSWSPQGHYFATGGWDKTVRVWAQDHASAQRIMIGHETPISAIAWHPNGLYLFSASDETDKTIRMWTIANGSCVRVFTGHTDFISALECSPNGKILASADIGGNIFFWDVEKGTRIKRCRGHGRGGIWSLAFCVEGTVLVSGGQDNTVRVWDVMMPAEGSRPANQQDGDGTNVASGGQGDGKQTGVGTQPASNPTTSKKKGKETMITPDQISAFLTKKSPVLKIQCTRMNLVVAGGCYYPETQDRER

SEQ ID NO: 273 - DNA, 2806 bp, Muscodor strobelii; identical to SEQ ID NO: 270
  misc_feature: SGI EST ID NO. CUFF.679.0
  misc_feature: Variant of the nucleotide sequence at SEQ ID NO 271

SEQ ID NO: 274 - DNA, 2433 bp, Muscodor strobelii
  misc_feature: SGI cDNA ID NO. 559653
  misc_feature: Encodes the peptide sequence at SEQ ID NO 275
atgtcgaatgctggcccgccgtctgccggtggtggtgcagggagttccaacttcgcatcgcagcctggtgcacccgcgactccagcaccctcagtaacgacatcgaccacagctatcccgccgcctaacaacgtgccccagccgccgaataatcagaacctcaaccagataagcctgagctcaatcgcgagcccgcgccctgtgcccatctcgattggtgatgtggttgccctcatgggcgcggacactcctacgaaacaaggcgacttggtgacggactatctgctgaagaagggttacaagaggactgaggctaccttccgtcaagaggtgaaagacattgatgagcatggacgccccaagccgaatgaggattcagtgtcagagcacacgttcccggctggcaagtatctgacctcgttcaaattttttgagaactgggtaaacggcggacttgatctttacaaggtttgcacattcttccctttcctacgaattacatgtctcacacctttacagtttgagctaggcaaaatactgtggcctttgtttgtctactcctatcttcgacttgttggtcaaggatcgactgcccatgcccaagagcttatgcagcaatgccgtgagcgctttgaaagctcacactctgatgagcttaaagcgctcgacgtggtgactctggccgcacatgttcgtgagaacgcaaccgccaagctttacctcgacaatcgctacgtgattcccatcaatcaatcactgactggtcagctgtttcactacctgacacaacaccttgacaaatgtggtgccgttgtcctggatatcctgaaccagtattgtcgcgttgagtctgtagatcgcggcccaattgaaccattcagcttcgaggccatctatcgacgagcccgcaaccaggaactggatgaggctgacattcaggagggaattccgggcatgaccaatcggggcggtgttaccaatcgcgatgttcttgagaaccaggcagccttgaagttgggaccgtttcccatggagcctgaattgagagcggatctcatatctgagctcgaagaggatgatgagcttcatcctcccaaggatggtatcaacactctcgtacaggagtttcatgctatggaggccatcaagaaagaggctggagaatcgcccgcccgaacagatattccatatcccccatcgcgtagcagagatgtcgtcatggagatgcagaaggtccgtgagaaccgagatcggttcaggattgagaatcgcactggcggcgccggaccaggactttctgtctgcatgtttactttccacaaccacctcggaagtttctcctgcatggacttctccaaagaccagatgctcgtcgctgtaggaacgatggattcctacatccgagtatggtcccttgatgggaagcccctgaagtcaatattgccgcccgagaaggacttgaaagtcaacaaccgtaagctcattggtcattctgccccggtgtatacggtcgccttttcagacgccattgccaatatagaccgcaatatttatgaaggctaccacaaacccgagactcactcccagatcctgctttctgctggagcggatggacaggttcgcttatggtccttggacgtatgggcctgtctctgcatctacaaaggtcatgatggccctgttcaatgcctttcctggagcccacagggacattacttcgctacgggcggttgggacaagacagtccgggtctgggctcaggatcatgcttctgcgcaacgaattatgatcggtcacgaaacgccgatctcagccattgcctggcaccccaatggcctctatctattctccgcatcagatgagacagataaaacaattcgcatgtggacaattgccaacggtagttgtgttcgggttttcaccggccatactgacttcatctcggcgcttgagtgctctccaaacggcaagattctagcgtcggcagatatcggcggtaacatcttcttttgggatgtggagaaggggaccaggatcaagcgctgtcgtgggcacggccgaggcggcatctggtctctggctttctgcgtggaaggcaccgttcttgtttcgggtggccaagacaacaccgtacgcgtatgggatgttatgatgccagccgagggcagccgtccggccaatcaacaggatggggatggcacaaacgttgcgtctggaggtcaaggtgacggtaaacaaaccggagtaggaacacaacctgctagcaatcctaccactagtaagaagaaagggaaggagaccatgatcaccccagaccagatcagtgccttcctcacgaagaagagtcctgtcctgaagattcaatgcacccgtatgaatcttgttgtcgctggtggatgctactacccggagacgcaagatcgagagcgttga

SEQ ID NO: 275 - protein, 810 aa, Muscodor strobelii
  misc_feature: SGI Peptide ID NO. 559653
  misc_feature (548)..(586): Pfam Id: PF00400 Pfam Desc: WD domain, G-beta repeat
  misc_feature (634)..(672): Pfam Id: PF00400 Pfam Desc: WD domain, G-beta repeat
  misc_feature (488)..(544): Pfam Id: PF00400 Pfam Desc: WD domain, G-beta repeat
  misc_feature (677)..(715): Pfam Id: PF00400 Pfam Desc: WD domain, G-beta repeat
  misc_feature (433)..(471): Pfam Id: PF00400 Pfam Desc: WD domain, G-beta repeat
  misc_feature (116)..(283): Pfam Id: PF04494 Pfam Desc: WD40 associated region in TFIID subunit
  misc_feature (90)..(111): Pfam Id: PF08513 Pfam Desc: LisH
  misc_feature (173)..(283): Pfam Id: PF04494 Pfam Desc: WD40 associated region in TFIID subunit
  misc_feature (590)..(620): Pfam Id: PF00400 Pfam Desc: WD domain, G-beta repeat
  misc_feature (91)..(804): NCBI GI: 164426529 Blast Desc: NCU04136 [Neurospora crassa OR74A] gi|157071372|gb|EAA32056.2| NCU04136 [Neurospora crassa OR74A]
  misc_feature (83)..(804): NCBI GI: 116198367 Blast Desc: conserved [Chaetomium globosum CBS 148.51] gi|88178618|gb|EAQ86086.1| conserved [Chaetomium globosum CBS 148.51]
  misc_feature (90)..(804): NCBI GI: 16944416 Blast Desc: related to TRANSCRIPTION INITIATION FACTOR TFIID 100 KDA SUBUNIT [Neurospora crassa]
  misc_feature (1)..(804): NCBI GI: 171692415 Blast Desc: protein product [Podospora anserina] gi|170946156|emb|CAP72957.1| protein product [Podospora anserina]
  misc_feature (90)..(798): NCBI GI: 256728546 Blast Desc: transcription initiation factor TFIID, subunit TAF5 [Nectria haematococca mpVI 77-13-4]
  misc_feature (90)..(804): NCBI GI: 261360874 Blast Desc: transcription initiation factor TFIID subunit 5 [Verticillium albo-atrum VaMs.102]
  misc_feature (90)..(804): NCBI GI: 145606002 Blast Desc: MGG_06742 [Magnaporthe grisea 70-15] gi|145013738|gb|EDJ98379.1| MGG_06742 [Magnaporthe grisea 70-15]
  misc_feature (25)..(794): NCBI GI: 46110256 Blast Desc: FG02010.1 [Gibberella zeae PH-1]
  misc_feature (45)..(803): NCBI GI: 154309684 Blast Desc: BC1G_07312 [Botryotinia fuckeliana B05.10] gi|150851773|gb|EDN26966.1| BC1G_07312 [Botryotinia fuckeliana B05.10]
  misc_feature (1)..(803): NCBI GI: 156051964 Blast Desc: SS1G_07389 [Sclerotinia sclerotiorum 1980] gi|154705167|gb|EDO04906.1| SS1G_07389 [Sclerotinia sclerotiorum 1980]
MSNAGPPSAGGGAGSSNFASQPGAPATPAPSVTTSTTAIPPPNNVPQPPNNQNLNQISLSSIASPRPVPISIGDVVALMGADTPTKQGDLVTDYLLKKGYKRTEATFRQEVKDIDEHGRPKPNEDSVSEHTFPAGKYLTSFKFFENWVNGGLDLYKVCTFFPFLRITCLTPLQFELGKILWPLFVYSYLRLVGQGSTAHAQELMQQCRERFESSHSDELKALDVVTLAAHVRENATAKLYLDNRYVIPINQSLTGQLFHYLTQHLDKCGAVVLDILNQYCRVESVDRGPIEPFSFEAIYRRARNQELDEADIQEGIPGMTNRGGVTNRDVLENQAALKLGPFPMEPELRADLISELEEDDELHPPKDGINTLVQEFHAMEAIKKEAGESPARTDIPYPPSRSRDVVMEMQKVRENRDRFRIENRTGGAGPGLSVCMFTFHNHLGSFSCMDFSKDQMLVAVGTMDSYIRVWSLDGKPLKSILPPEKDLKVNNRKLIGHSAPVYTVAFSDAIANIDRNIYEGYHKPETHSQILLSAGADGQVRLWSLDVWACLCIYKGHDGPVQCLSWSPQGHYFATGGWDKTVRVWAQDHASAQRIMIGHETPISAIAWHPNGLYLFSASDETDKTIRMWTIANGSCVRVFTGHTDFISALECSPNGKILASADIGGNIFFWDVEKGTRIKRCRGHGRGGIWSLAFCVEGTVLVSGGQDNTVRVWDVMMPAEGSRPANQQDGDGTNVASGGQGDGKQTGVGTQPASNPTTSKKKGKETMITPDQISAFLTKKSPVLKIQCTRMNLVVAGGCYYPETQDRER

SEQ ID NO: 276 - DNA, 2806 bp, Muscodor strobelii; identical to SEQ ID NO: 270
  misc_feature: SGI EST ID NO. CUFF.679.0
  misc_feature: Variant of the nucleotide sequence at SEQ ID NO 274

SEQ ID NO: 277 - DNA, 546 bp, Muscodor strobelii
  misc_feature: SGI cDNA ID NO. 559654
  misc_feature: Encodes the peptide sequence at SEQ ID NO 278
atggagacgaacagcggtgaagcgccgtttgttcctttcaccaaggcggaacggatgcaacagcttggtgagatagacaagaaaacagtgagcttattgacatcggccgcccatgctgtacagtgccttgggaaaagagagtcgcaggacacagacacagccatggccgacaaggaccaatctgagcaattcaaagagttcgccaatgagttcctcacaaccttgcgtgttgtcaacgtcggtgtcaagcgtcagatttggggactcgaggaggccggtatcatctcgctcagcaagaaggaaccagccatcagagaggagggcggggaagttcaagctagcaatgcccgcagtggcctgctcgagccggatgggaatggaaagatcggtggtctggacgtaggttggctcaacagtcgaagcgacaaggtcgagagggatatggaggccgacatgtggcgagaagctgaacagaccttgcgacgtctcatcgatcatcagagtcagcaggcaggacaatccatcgacagcgagatggccgagtga

SEQ ID NO: 278 - protein, 181 aa, Muscodor strobelii
  misc_feature: SGI Peptide ID NO. 559654
  misc_feature (12)..(180): NCBI GI: 39977713 Blast Desc: MGG_06741 [Magnaporthe grisea 70-15] gi|145013739|gb|EDJ98380.1| MGG_06741 [Magnaporthe grisea 70-15]
  misc_feature (12)..(162): NCBI GI: 256728719 Blast Desc: NECHADRAFT_72488 [Nectria haematococca mpVI 77-13-4]
  misc_feature (13)..(162): NCBI GI: 261360875 Blast Desc: conserved [Verticillium albo-atrum VaMs.102]
  misc_feature (10)..(176): NCBI GI: 156051960 Blast Desc: SS1G_07387 [Sclerotinia sclerotiorum 1980] gi|154705165|gb|EDO04904.1| SS1G_07387 [Sclerotinia sclerotiorum 1980]
  misc_feature (12)..(162): NCBI GI: 46110254 Blast Desc: FG02009.1 [Gibberella zeae PH-1]
  misc_feature (10)..(163): NCBI GI: 154309680 Blast Desc: BC1G_07310 [Botryotinia fuckeliana B05.10] gi|150851771|gb|EDN26964.1| BC1G_07310 [Botryotinia fuckeliana B05.10]
  misc_feature (2)..(168): NCBI GI: 67516019 Blast Desc: AN0291.2 [Aspergillus nidulans FGSC A4] gi|40746541|gb|EAA65697.1| AN0291.2 [Aspergillus nidulans FGSC A4] gi|259489482|tpe|CBF89790.1| TPA: conserved [Aspergillus FGSC
  misc_feature (12)..(164): NCBI GI: 85102210 Blast Desc: NCU04135 [Neurospora crassa OR74A] gi|12718227|emb|CAC28771.1| [Neurospora crassa] gi|28922834|gb|EAA32055.1| NCU04135 [Neurospora crassa OR74A]
  misc_feature (9)..(165): NCBI GI: 119497157 Blast Desc: NFIA_021550 [Neosartorya fischeri NRRL 181] gi|119413505|gb|EAW23446.1| conserved [Neosartorya fischeri NRRL 181]
  misc_feature (2)..(165): NCBI GI: 159130537 Blast Desc: conserved [Aspergillus fumigatus A1163]
METNSGEAPFVPFTKAERMQQLGEIDKKTVSLLTSAAHAVQCLGKRESQDTDTAMADKDQSEQFKEFANEFLTTLRVVNVGVKRQIWGLEEAGIISLSKKEPAIREEGGEVQASNARSGLLEPDGNGKIGGLDVGWLNSRSDKVERDMEADMWREAEQTLRRLIDHQSQQAGQSIDSEMAE

SEQ ID NO: 279 - DNA, 1174 bp, Muscodor strobelii
  misc_feature: SGI EST ID NO. CUFF.681.1
  misc_feature: Variant of the nucleotide sequence at SEQ ID NO 277
caacgcgcatccattctacgccatatctaagacatctgacacgcacctataatcttgccgccaaactcattggtgaacatatcagataagtagctttgcgaggcaccaagctaagcacaaagtgaaagaaaacacctttccagaatatcaataaagtagtatccgattctttcgtcggctctccctcgcgatggagacgaacagcggtgaagcgccgtttgttcctttcaccaaggcggaacggatgcaacagcttggtgagatagacaagaaaacagtgagcttattgacatcggccgcccatgctgtacagtgccttgggaaaagagagtcgcaggacacagacacagccatggccgacaaggaccaatctgagcaattcaaagagttcgccaatgagttcctcacaaccttgcgtgttgtcaacgtcggtgtcaagcgtcagatttggggactcgaggaggccggtatcatctcgctcagcaagaaggaaccagccatcagagaggagggcggggaagttcaagctagcaatgcccgcagtggcctgctcgagccggatgggaatggaaagatcggtggtctggacgtaggttggctcaacagtcgaagcgacaaggtcgagagggatatggaggccgacatgtggcgagaagctgaacagaccttgcgacgtctcatcgatcatcagagtcagcaggcaggacaatccatcgacagcgagatggccgagtgatccaagtccttcatgcaaccgagtctacaattagctgaaggaggcccatgcccaccaaaacctattctttcccttatttagttgaagcccgagtgattgtggggtggacaggaagggtatacaacgtggaccgcaaagcctgggtgctgaaacgatggcctgatttgatgtcatttccggcaaatggggacaaactcaggacaattgcattttggtctgccaaagactgtgcaaaaaccaacattcagtggccgaagaggacaaatcaagatctctaattattcctccgaatatacaaaccggcaactcatccttcagccagacttggtctgagttgaacgtttgacgattctgtgacgattctgcaagagaccaaaagactcaggagtcctatagctaataccacgtaatatctattcatgacatttctaaattccg

SEQ ID NO: 280 - DNA, 606 bp, Muscodor strobelii
  misc_feature: SGI cDNA ID NO. 559656
  misc_feature: Reduced expression when VOC is produced
  misc_feature: Encodes the peptide sequence at SEQ ID NO 281
atggcctcccgcctcccctcgacgctcagccggcgtccaaccgccaacctctcccccctctcatcatcatcctcacacacgcccctatcccacacacctctctcccacaccccatcgcgagcagcaaccctcataaagcgacccagacgaccctacacattcacgcaactcgtccaactctccgacggctcaacctacacaatgcggacctcctccccgctcgcactctacaaatcaaccaaggacccacgaaaccacatcctctggcaaccaaccgacaaatcgctccgaaacgtcgaggtcgacgaagcgggtaagctcgcggcgttcaggagtagattcggcagcggttgggatgcgcccgaggccgttgacgagaggagtgtggccgtcgaggaggtggatactagcaggaaggggaagaagggtgagacggttaaggagaaggatgtgcaggttggggatgtgccgaaacagatgaagacgaaggggaaggcagagggtgagggagagggttatggtgatgcgctcgcggatttgatttcggggtatgctgttggggtccctgagttgcccgattctaagcctaagccgaagaagaagtaa

SEQ ID NO: 281 - protein, 201 aa, Muscodor strobelii
  misc_feature: SGI Peptide ID NO. 559656
  misc_feature (1)..(119): NCBI GI: 171692411 Blast Desc: protein product [Podospora anserina] gi|170946154|emb|CAP72955.1| protein product [Podospora anserina]
  misc_feature (1)..(119): NCBI GI: 85102223 Blast Desc: NCU04138 [Neurospora crassa OR74A] gi|12718224|emb|CAC28768.1| related to ribosomal protein YmL36 precursor, mitochondrial [Neurospora crassa] [Neurospora crassa
  misc_feature (4)..(119): NCBI GI: 116198371 Blast Desc: CHGG_07341 [Chaetomium globosum CBS 148.51] gi|88178620|gb|EAQ86088.1| CHGG_07341 [Chaetomium globosum CBS 148.51]
  misc_feature (1)..(130): NCBI GI: 261360871 Blast Desc: conserved [Verticillium albo-atrum VaMs.102]
  misc_feature (40)..(127): NCBI GI: 39977719 Blast Desc: MGG_06744 [Magnaporthe grisea 70-15] gi|145013736|gb|EDJ98377.1| MGG_06744 [Magnaporthe grisea 70-15]
  misc_feature (15)..(137): NCBI GI: 46110260 Blast Desc: FG02012.1 [Gibberella zeae PH-1]
  misc_feature (24)..(151): NCBI GI: 225682529 Blast Desc: conserved [Paracoccidioides brasiliensis Pb03]
  misc_feature (24)..(151): NCBI GI: 226281056 Blast Desc: conserved [Paracoccidioides brasiliensis Pb01]
  misc_feature (24)..(151): NCBI GI: 226289934 Blast Desc: conserved [Paracoccidioides brasiliensis Pb18]
  misc_feature (13)..(185): NCBI GI: 154309676 Blast Desc: BC1G_07308 [Botryotinia fuckeliana B05.10] gi|150851769|gb|EDN26962.1| BC1G_07308 [Botryotinia fuckeliana B05.10]
  misc_feature: Useful for introducing or modulating the production of volatile compounds
MASRLPSTLSRRPTANLSPLSSSSSHTPLSHTPLSHTPSRAATLIKRPRRPYTFTQLVQLSDGSTYTMRTSSPLALYKSTKDPRNHILWQPTDKSLRNVEVDEAGKLAAFRSRFGSGWDAPEAVDERSVAVEEVDTSRKGKKGETVKEKDVQVGDVPKQMKTKGKAEGEGEGYGDALADLISGYAVGVPELPDSKPKPKKK

SEQ ID NO: 282 - DNA, 993 bp, Muscodor strobelii
  misc_feature: SGI cDNA ID NO. 559657
  misc_feature: Reduced expression when VOC is produced
  misc_feature: Encodes the peptide sequence at SEQ ID NO 283
atgtggcaagcggatagcttcggtacccagctccgtaactttctacatcatcgtccgacttgcgcactcgtccttatcgagcatcacaggaggatcaaatggactgctgccatgagagcttctggctgtctgagaggagccactgcttttgatcgagtgctccggcgtcacgagcttctcggagccaagaaagatgaggtcctccaacgaagcgttatccgaacggtcaaggcccacagccccgtcatcacgagacacgatgtgcgcattttcaacaaggtggacgcacctgaaccttccaccgacagtaacaacccaagagtgaagaggttcgacccgagctcaccccgccgtccgctcgtcaggttccacggccacgtctacaagactcccccgcccacgcagacaaagtatgagcccgactcggtcgtcagccgctactacactggagccgaccatcgcgaccatagtcgggacctcttcaggttcaaaaagatccccctcggcgcctctgccgagtggagagcccctgcagccgccgccaacggcccgccgacacagaatggcgagctgcgagacaacttcaaggccgccatggccctcatgacccagcccgccgtcgtcatcacctccgtccgcaactcctaccaggctcagaaggacgccgacgtccccgccgagcagatgaagacgccctcggcctgcgccatgaccgtctcctccttcgcctctctcgccctcagccccgaccccaccgtcaccttcaacgtcaacctccccagcaccacctacgacgccctcgtcggctgcggctacttcaacgcccacatcctcacccccgacgccctcggcgccgacatcgcctctctctgctctggccgcaacagggtcaaccccaactctccgttgaagaagcacatgctggtcgacaccacccacgaacactccctcggtgtcctggccaacctggaccccctatgccgtcgcccataa

SEQ ID NO: 283 - protein, 330 aa, Muscodor strobelii
  misc_feature: SGI Peptide ID NO. 559657
  misc_feature (185)..(289): NCBI GI: 46110262 Blast Desc: FG02013.1 [Gibberella zeae PH-1]
  misc_feature (191)..(295): NCBI GI: 116198373 Blast Desc: CHGG_07342 [Chaetomium globosum CBS 148.51] gi|88178621|gb|EAQ86089.1| CHGG_07342 [Chaetomium globosum CBS 148.51]
  misc_feature (185)..(289): NCBI GI: 256728548 Blast Desc: NECHADRAFT_50576 [Nectria haematococca mpVI 77-13-4]
  misc_feature (190)..(324): NCBI GI: 145606000 Blast Desc: MGG_06745 [Magnaporthe grisea 70-15] gi|145013735|gb|EDJ98376.1| MGG_06745 [Magnaporthe grisea 70-15]
  misc_feature (236)..(288): NCBI GI: 171692409 Blast Desc: protein product [Podospora anserina] gi|170946153|emb|CAP72954.1| protein product [Podospora anserina]
  misc_feature (183)..(288): NCBI GI: 119192460 Blast Desc: CIMG_00607 [Coccidioides immitis RS]
  misc_feature (183)..(288): NCBI GI: 240106084 Blast Desc: CPC735_056470 [Coccidioides posadasii C735 delta SOWgp]
  misc_feature (232)..(300): NCBI GI: 85102227 Blast Desc: NCU04139 [Neurospora crassa OR74A] gi|16944414|emb|CAC28767.2| conserved [Neurospora crassa] gi|28922838|gb|EAA32059.1| [Neurospora crassa OR74A]
  misc_feature (186)..(288): NCBI GI: 258573839 Blast Desc: [Uncinocarpus reesii 1704] gi|237901367|gb|EEP75768.1| [Uncinocarpus reesii 1704]
  misc_feature (184)..(288): NCBI GI: 255947104 Blast Desc: Pc22g02750 [Penicillium chrysogenum Wisconsin 54-1255] gi|211591336|emb|CAP97563.1| Pc22g02750 [Penicillium chrysogenum Wisconsin 54-1255]
  misc_feature: Useful for introducing or modulating the production of volatile compounds
MWQADSFGTQLRNFLHHRPTCALVLIEHHRRIKWTAAMRASGCLRGATAFDRVLRRHELLGAKKDEVLQRSVIRTVKAHSPVITRHDVRIFNKVDAPEPSTDSNNPRVKRFDPSSPRRPLVRFHGHVYKTPPPTQTKYEPDSVVSRYYTGADHRDHSRDLFRFKKIPLGASAEWRAPAAAANGPPTQNGELRDNFKAAMALMTQPAVVITSVRNSYQAQKDADVPAEQMKTPSACAMTVSSFASLALSPDPTVTFNVNLPSTTYDALVGCGYFNAHILTPDALGADIASLCSGRNRVNPNSPLKKHMLVDTTHEHSLGVLANLDPLCRRP

SEQ ID NO: 284 - DNA, 1964 bp, Muscodor strobelii
  misc_feature: SGI EST ID NO. CUFF.993.0
  misc_feature: Variant of the nucleotide sequence at SEQ ID NO 282
cagttatgtggcaagcggatagcttcggtacccagctccgtaactttctacatcatcgtccgacttgcgcactcgtccttatcgagcatcacaggaggatcaaatggactgctgccatgagagcttctggctgtctgagaggagccactgcttttgatcgagtgctccggcgtcacgagcttctcggagccaagaaagatgaggtcctccaacgaagcgttatccgaacggtcaaggcccacagccccgtcatcacgagacacgatgtgcgcattttcaacaaggtggacgcacctgaaccttccaccgacagtaacaacccaagagtgaagaggttcgacccgagctcaccccgccgtccgctcgtcaggttccacggccacgtctacaagactcccccgcccacgcagacaaagtatgagcccgactcggtcgtcagccgctactacactggagccgaccatcgcgaccatagtcgggacctcttcaggttcaaaaagatccccctcggcgcctctgccgagtggagagcccctgcagccgccgccaacggcccgccgacacagaatggcgagctgcgagacaacttcaaggccgccatggccctcatgacccagcccgccgtcgtcatcacctccgtccgcaactcctaccaggctcagaaggacgccgacgtccccgccgagcagatgaagacgccctcggcctgcgccatgaccgtctcctccttcgcctctctcgccctcagccccgaccccaccgtcaccttcaacgtcaacctccccagcaccacctacgacgccctcgtcggctgcggctacttcaacgcccacatcctcacccccgacgccctcggcgccgacatcgcctctctctgctctggccgcaacagggtcaaccccaactctccgttgaagaagcacatgctggtcgacaccacccacgaacactccctcggtgtcctggccaacctggaccccctatgccgtcgcccataacgaagcatcttttggggaggaaagccccaagaacaaaatgtggcccaatcgcaccgaggaaggcatagagccactcgttcgaatatccaatgccggagcagtgcgccgccagttcctcgagcagacactgcctcagtccgatgtagccttggaccagcaggccgtatacaagattcgcggccgcggcgtcatgcgaattctgcgctgcaaagtggtccgcaccattcgatacccccacgtggatcactacagagggagcgccatcgtcatcgctcaaatcatcgacatcgaaagaccgtgggcggaatcggcgttaagccacccgcttgccttgtcctacggcggcagagcataccgagccattggggacaagattgaaccggagggtgagcccgagacgcaagatgacggcgtctccagcgatcaaacgttgcttgacctgaaccgaacggggaacacacccatacccaccaacgaagaactagaaatagagacgaacagcaagcccgcttcaaagccgagccgagcactacgaagctacaacctcgccgcactgcgctatcagaagcgcaaatataagataataaaaaaggaggccaccatgaaaacggaagatggggaagatagcggggcgctcttcctgtcagagtttgaggatttgtttaaatctgctgttaagaatgatgataagggggaaaggagaggggagaagaatacgaatttttaaaaagccgcttcttccgcctcgtacatggatataagcgcaaaaactgcatactctagacactaccatggatcggagagggaggatatgctgtaggaaatacttatctggctggagcatcacggcgcattgtgatgaataaatacttgtagataccctgtattatattgtatctatacggacgcattgtagacaacttatgtatatctaaataggcagatagtgaaaaggagagaattcta

SEQ ID NO: 285 - DNA, 690 bp, Muscodor strobelii
  misc_feature: SGI cDNA ID NO. 559658
  misc_feature: Reduced expression when VOC is produced
  misc_feature: Encodes the peptide sequence at SEQ ID NO 286
atgtggcccaatcgcaccgaggaaggcatagagccactcgttcgaatatccaatgccggagcagtgcgccgccagttcctcgagcagacactgcctcagtccgatgtagccttggaccagcaggccgtatacaagattcgcggccgcggcgtcatgcgaattctgcgctgcaaagtggtccgcaccattcgatacccccacgtggatcactacagagggagcgccatcgtcatcgctcaaatcatcgacatcgaaagaccgtgggcggaatcggcgttaagccacccgcttgccttgtcctacggcggcagagcataccgagccattggggacaagattgaaccggagggtgagcccgagacgcaagatgacggcgtctccagcgatcaaacgttgcttgacctgaaccgaacggggaacacacccatacccaccaacgaagaactagaaatagagacgaacagcaagcccgcttcaaagccgagccgagcactacgaagctacaacctcgccgcactgcgctatcagaagcgcaaatataagataataaaaaaggaggccaccatgaaaacggaagatggggaagatagcggggcgctcttcctgtcagagtttgaggatttgtttaaatctgctgttaagaatgatgataagggggaaaggagaggggagaagaatacgaatttttaa

SEQ ID NO: 286 - protein, 229 aa, Muscodor strobelii
  misc_feature: SGI Peptide ID NO. 559658
  misc_feature: Useful for introducing or modulating the production of volatile compounds
MWPNRTEEGIEPLVRISNAGAVRRQFLEQTLPQSDVALDQQAVYKIRGRGVMRILRCKVVRTIRYPHVDHYRGSAIVIAQIIDIERPWAESALSHPLALSYGGRAYRAIGDKIEPEGEPETQDDGVSSDQTLLDLNRTGNTPIPTNEELEIETNSKPASKPSRALRSYNLAALRYQKRKYKIIKKEATMKTEDGEDSGALFLSEFEDLFKSAVKNDDKGERRGEKNTNF

SEQ ID NO: 287 - DNA, 1964 bp, Muscodor strobelii; identical to SEQ ID NO: 284
  misc_feature: SGI EST ID NO. CUFF.993.0
  misc_feature: Variant of the nucleotide sequence at SEQ ID NO 285

SEQ ID NO: 288 - DNA, 1767 bp, Muscodor strobelii
  misc_feature: SGI cDNA ID NO. 559659
  misc_feature: Encodes the peptide sequence at SEQ ID NO 289
atgcagaagtccaaacccagtttcttccgcccggctcccgggatcctggcaaaagatctattcaagcgagtgcaggtcatacggaccttcattccaggttatatcttattctttgcttcccgtcttctccagatggtatctgctgccggtaacacccagatcttccaaccgattcaaaccgtgactccagaacaagccgagtccatccagcaagaagaaggctggttcaatctcgatagatgggtcgatcgaggcatgttgattcgcgcggggggtacctattattcatgctacgccaacttgacagcagcgctcgagcaagtcggtcagctcaacagcgccgagtataacggcgcggctggtgcgttgagcctgcttccgactgcgggagcattactcggggcgcccacgagagagatgtggctcgtgttcaagctcgttcctctcgctggcattcttagcatgtttctttgtcttggagggtcgattacaccgtctaacgttggggattatgaggatgaaccgttctcgttgactggtttcgtgccgacgaaacctactagagctgttgcaaccgctcggaggacatatccagcagcgcccgaacgccatgacgccacggcaacgattgggtcgcaacacgggtcatattgcggttcacggagcgtgcctagccatcgtggtcttccgctcgaagaggaaaaactgcaggaagactctgagatacgcagatttgtaaccgaagtagggggaagggttaaagatgagggtgggggaagtaatttcttgagggtctgggccggcatgacctttcaattgtggttggtcattgcgattctcaccccgatgtggtacgctcaaagaggtgctgtcatcacctggtggtgtcactcatggggttggatgtggttctggtatgctcttgtcacgatcgttgccattttcgacaatcttgtcgctgctcctttcagcaagagctggaccatccgcgtatcgcgagcacagactggcatcgtactggatccgacagcaagcaagatatacaatcgtatcggcgacaggaatggtctcgaattcctgaagtctggcccgaagatgaatcaaagagttggtttagcgacagctggagggaccatgttctcgcggacatgtttctatgttgtcatatctgtcaaggggatcgacacggcacaccagataggacagatcgttgctaagctgtcaagtgtcgccgtatttgcctttgggacagctttgttcgcttcggccaccctcctgtccatctccatcgcattgctggtattgtccgtcattcttgctgctggggttggcggaagagttctttctctatgggtcgtttctactatgagtcgctatggcaagccaattatccacaagatggtccgtgatgaagaggaagcggccaggtactttgatgctcttgctaaagaagatttacaaatggaggtcgagggccacgttgtctataagggagtcgtggtgacctcgaggcacaagctgttcgcttcttctacctatattggcttattggccaagccattcgatctgacaactctggcatcaaagcatcagcggggttatgtattccccgacacaaacacatcaggactgcagtctccagcccaacagttcccatccattggtagatggcactacggcccagatccgtaccagtatgagatggcacgtttgcattcaggcccaagttatgggcagggtccggatccggccccgcgaattccttaa

SEQ ID NO: 289 - protein, 588 aa, Muscodor strobelii
  misc_feature: SGI Peptide ID NO. 559659
MQKSKPSFFRPAPGILAKDLFKRVQVIRTFIPGYILFFASRLLQMVSAAGNTQIFQPIQTVTPEQAESIQQEEGWFNLDRWVDRGMLIRAGGTYYSCYANLTAALEQVGQLNSAEYNGAAGALSLLPTAGALLGAPTREMWLVFKLVPLAGILSMFLCLGGSITPSNVGDYEDEPFSLTGFVPTKPTRAVATARRTYPAAPERHDATATIGSQHGSYCGSRSVPSHRGLPLEEEKLQEDSEIRRFVTEVGGRVKDEGGGSNFLRVWAGMTFQLWLVIAILTPMWYAQRGAVITWWCHSWGWMWFWYALVTIVAIFDNLVAAPFSKSWTIRVSRAQTGIVLDPTASKIYNRIGDRNGLEFLKSGPKMNQRVGLATAGGTMFSRTCFYVVISVKGIDTAHQIGQIVAKLSSVAVFAFGTALFASATLLSISIALLVLSVILAAGVGGRVLSLWVVSTMSRYGKPIIHKMVRDEEEAARYFDALAKEDLQMEVEGHVVYKGVVVTSRHKLFASSTYIGLLAKPFDLTTLASKHQRGYVFPDTNTSGLQSPAQQFPSIGRWHYGPDPYQYEMARLHSGPSYGQGPDPAPRIP

SEQ ID NO: 290 - DNA, 1305 bp, Muscodor strobelii
  misc_feature: SGI cDNA ID NO. 559660
  misc_feature: Encodes the peptide sequence at SEQ ID NO 291
atggatcaaagaatcgtgtttaaccagaagctcaccaagtctgataagatagtattagagcacctagcaacagacttacgactattttcagagcacaaattgtcaagacggacggataaggcaacagaccagaaaagatgcgaagatagacaagacatatcccgcgaagcacttacccttagcaagctcgacgccttgaacaacccaaaggacgactcgtttgagccgacgatcttttcggggcgtgatcacgaccagaccgattggcaatctgcattcaatcaacttgtccttcgacgttacgttgcagccgcccagtctattgtacgattcgaggcagacgttgtcatgataacgcacctgctactatatttctctacctcagtaccaagtgcactcgtcctcttcttttggaagttcacctggccgcatgccatattgcactttgtcatgcaggtctcgtatatgggaacatatacgttaatgatgcatcagcatattcatatgagaggaattctgcaacgtcgctttgcttttttcgatcgtctgtttccttacatcacggaccctctgatgggccacacctggaactcatatttctaccatcacgttaagcatcatcatcccgagggcaatggaccgggcgatctctcttcaacaattcgttatcaacgcgatgatatctttcactttcttcaatacaccgggcgatttttcctcctcatctggtttgacctacctatgtacttcatccgtaggagacatttcgttactgcggcgaaagccttcttttgggagatcgccacctatggtgctatactctctcttttttggtggcaaccacggccgacgacattcgtattccttatgcccttatttttattacggcttgacctaatgatcggtaattggggtcagcacgctcttgtcgatgcacaagaaccgaactcggattatagatcgagcatcactttgattgatgtcccaagcaatcgctactcattcaatgatggttatcatacatctcatcatctcaatccacttcgacactggcgggatcaccctaacgccttcatcaagggcaagaaggagtatgagtctcaaggtgcccttgtttttcacaatattgactctattatgatctctattagattgctcattaaagactacgagcatctggctaaatgtatggtacccattggcgaagtgcagatggctatgactatggcggatcgagtggcccttttgaaatcctgcacgaggaagtttacagaagaggaaatccgggaaaagttcacaacttga

SEQ ID NO: 291 - protein, 434 aa, Muscodor strobelii
  misc_feature: SGI Peptide ID NO. 559660
  misc_feature (1)..(434): NCBI GI: 256721811 Blast Desc: NECHADRAFT_72904 [Nectria haematococca mpVI 77-13-4]
  misc_feature (4)..(432): NCBI GI: 256734908 Blast Desc: NECHADRAFT_90520 [Nectria haematococca mpVI 77-13-4]
  misc_feature (1)..(432): NCBI GI: 212571695 Blast Desc: acylamide-delta3(E)-desaturase [Gibberella zeae] gi|212571702|gb|ACJ35480.1| acylamide-delta3(E)-desaturase [Gibberella zeae]
  misc_feature (1)..(432): NCBI GI: 46115480 Blast Desc: FG03582.1 [Gibberella zeae PH-1]
  misc_feature (8)..(432): NCBI GI: 240275027 Blast Desc: conserved [Ajellomyces capsulatus H143]
  misc_feature (8)..(432): NCBI GI: 225558588 Blast Desc: conserved [Ajellomyces capsulatus G186AR]
  misc_feature (3)..(432): NCBI GI: 85090366 Blast Desc: NCU09858 [Neurospora crassa OR74A] gi|28919740|gb|EAA29146.1| conserved [Neurospora crassa OR74A]
  misc_feature (1)..(433): NCBI GI: 145230183 Blast Desc: An01g09800 [Aspergillus niger] gi|134055517|emb|CAK37163.1| protein product [Aspergillus niger]
  misc_feature (8)..(432): NCBI GI: 154286452 Blast Desc: conserved [Ajellomyces capsulatus NAm1] gi|150407662|gb|EDN03203.1| conserved [Ajellomyces capsulatus NAm1]
  misc_feature (10)..(432): NCBI GI: 239613991 Blast Desc: conserved [Ajellomyces dermatitidis ER-3]
MDQRIVFNQKLTKSDKIVLEHLATDLRLFSEHKLSRRTDKATDQKRCEDRQDISREALTLSKLDALNNPKDDSFEPTIFSGRDHDQTDWQSAFNQLVLRRYVAAAQSIVRFEADVVMITHLLLYFSTSVPSALVLFFWKFTWPHAILHFVMQVSYMGTYTLMMHQHIHMRGILQRRFAFFDRLFPYITDPLMGHTWNSYFYHHVKHHHPEGNGPGDLSSTIRYQRDDIFHFLQYTGRFFLLIWFDLPMYFIRRRHFVTAAKAFFWEIATYGAILSLFWWQPRPTTFVFLMPLFLLRLDLMIGNWGQHALVDAQEPNSDYRSSITLIDVPSNRYSFNDGYHTSHHLNPLRHWRDHPNAFIKGKKEYESQGALVFHNIDSIMISIRLLIKDYEHLAKCMVPIGEVQMAMTMADRVALLKSCTRKFTEEEIREKFTT

SEQ ID NO: 292 - DNA, 1401 bp, Muscodor strobelii
  misc_feature: SGI cDNA ID NO. 559661
  misc_feature: Reduced expression when VOC is produced
  misc_feature: Encodes the peptide sequence at SEQ ID NO 293
atgatgaggtacgtcaagtcgactgtcccgaatattgaggcccgcatcgcgaaagtactggtctcgaacctgaattcaagacggagcccatggactaacgtgcatacacaacatctaccaaacggctcgaacaaccgtgaccagcacgaccgagatggacactcaactccgcgagaatcccgaagcaatagccgtgttgggccgaaaccgcgaacgaagaaggcacatgatgggtcgattttgacgtatgatgacgagaactccaaatggatccatcgtgacaagctagcaaagatcgagagcgaggaattgcaggcggcggggatcatactgccaaagcccaggtcccagagcaggccgaggcgggatcgaagccaggataagagtctccagaggcgcggaacaaatgactcgtccgatcaacagccgctgccacgggcccggaacaattcggagctaagtcacgataggacgcccgacatcgaagtctccagctgggacttgcgcctgcctgaagagattgccgaagatcccggcgagtactgggttgccccagagtctgccggcacgcggattccagtcgccaaactgagcccggcaccgcttgcagcagatttcctggaccggaatgctcctgtgcttcgcaaacccagcttcccgctgcttgacgaagaggcaagcattgcttatcccaagacacgatcacgacggagcagcagcatctcgaacgttcttgacgattcgccgcccaaggctcagcctggtaaacggtctgtgacagaagggtctcctaaaaaggtcgctgcgggacgaaagacatcggcgcccgtgaaaccgacaacacccggccgccccaagacgcgttcgggatctgctgcccgcagcggctccactacccgcccatcgactcgttccggggagctgtctcctcgcgcaccagaaggcgatccaccatggatgatctctgcataccagcccgacccgcgcttgccaccggaccagcaacttctgccaaccgtggccaagaggttgcagcaagaaaagtgggagcaggaaggtcaatttggcaatgtctacgacaaggaattccgtcccctcaacaacgaggcttttgccaaaccgccagagctggagaagccacaagaagtcgccgaagagcgtcatgaagaatggccgttaagacctgaaaatcggggtccaaccccgagccgtccaggaactagctcatactcgacgatgccgaagattcaagatcatactccactggctagcccaagaatacaacaaaaccccagagctgcctcgcctgctgttaatgtcagtgtacccgacccacctcaggagccggaaaaggaaaaggtggacaagaggtctgggtgtggatgttgcctcgtgatgtag

SEQ ID NO: 293 - protein, 466 aa, Muscodor strobelii
  misc_feature: SGI Peptide ID NO. 559661
  misc_feature (43)..(466): NCBI GI: 256728713 Blast Desc: NECHADRAFT_50573 [Nectria haematococca mpVI 77-13-4]
  misc_feature (33)..(466): NCBI GI: 145605978 Blast Desc: MGG_06768 [Magnaporthe grisea 70-15] gi|145013712|gb|EDJ98353.1| MGG_06768 [Magnaporthe grisea 70-15]
  misc_feature (85)..(466): NCBI GI: 116198391 Blast Desc: CHGG_07351 [Chaetomium globosum CBS 148.51] gi|88178630|gb|EAQ86098.1| CHGG_07351 [Chaetomium globosum CBS 148.51]
  misc_feature (85)..(466): NCBI GI: 171692443 Blast Desc: protein product [Podospora anserina] gi|170946170|emb|CAP72971.1| protein product [Podospora anserina]
  misc_feature (85)..(466): NCBI GI: 46110240 Blast Desc: FG02002.1 [Gibberella zeae PH-1]
  misc_feature (73)..(466): NCBI GI: 154309666 Blast Desc: BC1G_07303 [Botryotinia fuckeliana B05.10] gi|150851764|gb|EDN26957.1| BC1G_07303 [Botryotinia fuckeliana B05.10]
  misc_feature (98)..(375): NCBI GI: 261360856 Blast Desc: conserved [Verticillium albo-atrum VaMs.102]
  misc_feature (72)..(466): NCBI GI: 85103099 Blast Desc: NCU03667 [Neurospora crassa OR74A] gi|7635823|emb|CAB88628.1| [Neurospora crassa] gi|28922989|gb|EAA32207.1| [Neurospora crassa OR74A]
  misc_feature (84)..(466): NCBI GI: 67527940 Blast Desc: AN4214.2 [Aspergillus nidulans FGSC A4] gi|40740123|gb|EAA59313.1| AN4214.2 [Aspergillus nidulans FGSC A4]
  misc_feature (42)..(466): NCBI GI: 212527792 Blast Desc: conserved [Penicillium marneffei ATCC 18224] gi|210073451|gb|EEA27538.1| conserved [Penicillium marneffei ATCC 18224]
  misc_feature: Useful for introducing or modulating the production of volatile compounds
MMRYVKSTVPNIEARIAKVLVSNLNSRRSPWTNVHTQHLPNGSNNRDQHDRDGHSTPRESRSNSRVGPKPRTKKAHDGSILTYDDENSKWIHRDKLAKIESEELQAAGIILPKPRSQSRPRRDRSQDKSLQRRGTNDSSDQQPLPRARNNSELSHDRTPDIEVSSWDLRLPEEIAEDPGEYWVAPESAGTRIPVAKLSPAPLAADFLDRNAPVLRKPSFPLLDEEASIAYPKTRSRRSSSISNVLDDSPPKAQPGKRSVTEGSPKKVAAGRKTSAPVKPTTPGRPKTRSGSAARSGSTTRPSTRSGELSPRAPEGDPPWMISAYQPDPRLPPDQQLLPTVAKRLQQEKWEQEGQFGNVYDKEFRPLNNEAFAKPPELEKPQEVAEERHEEWPLRPENRGPTPSRPGTSSYSTMPKIQDHTPLASPRIQQNPRAASPAVNVSVPDPPQEPEKEKVDKRSGCGCCLVM

SEQ ID NO: 294 - DNA, 3163 bp, Muscodor strobelii
  misc_feature: SGI EST ID NO. CUFF.712.0
  misc_feature: Variant of the nucleotide sequence at SEQ ID NO 292
ctcctcttcgtcttgggagaactacctctccaatctcctgcttgcaatcgtagagacgtgtcgtgcctcgtgtgtgcgtgtgctgccggtgctgcgccaacatcctctaataaactctgttcattgtgcgaggtgatcacgactcgtttgtatgtttggtcagacccaatcgcctgccgtcaccgtgcaattcctctagttccccgcctgagcagtgcgtgacgagccgatctcgaaagccttctttcttagttccagttccaggggcgatgaagaaaaaagcccgagaccttgacatcctctagtctcactcttcttttctggtcatcgtcactgtccgccgctgtccacataatcttcgactatcaaggcactagcagaaagctcaatacctaattccgcagaacgcttccccccatctctaccatttgggccatcacagactgtggccgactgccagttttggcacttggctccaaaccttctcccaacacgcgccgtgtcgtcacgccaatttttcttgtcgagacacgagtcccctctattctcacctacatcattttctccatctcacacgaacacctcagctcgacggccgcgtcggctcgcgactgcttcacccgacgtcttgtcgccactgctcactgcccactcgtgacgtcccacctcagcttggccccttttccttcccaactacacgactgtcgcatccagcaacacacaccataagctctctcacaacccaaccctcaccgtcaacctctatctgtaccgacgttcttttagtctgaatataattgattgatcattggagacgttggacacggtacggctcgggctgccttgacggaccagcatggcggccatttctgcagtatccggcactgcatttacccattctaatgggagtcaagataattattcaacctgggatcacgcatctgccgaccatgatgaggagactgtcagccatcaatttgtagattacgagccgataaactcccagcatacacaacatctaccaaacggctcgaacaaccgtgaccagcacgaccgagatggacactcaactccgcgagaatcccgaagcaatagccgtgttgggccgaaaccgcgaacgaagaaggcacatgatgggtcgattttgacgtatgatgacgagaactccaaatggatccatcgtgacaagctagcaaagatcgagagcgaggaattgcaggcggcggggatcatactgccaaagcccaggtcccagagcaggccgaggcgggatcgaagccaggataagagtctccagaggcgcggaacaaatgactcgtccgatcaacagccgctgccacgggcccggaacaattcggagctaagtcacgataggacgcccgacatcgaagtctccagctgggacttgcgcctgcctgaagagattgccgaagatcccggcgagtactgggttgccccagagtctgccggcacgcggattccagtcgccaaactgagcccggcaccgcttgcagcagatttcctggaccggaatgctcctgtgcttcgcaaacccagcttcccgctgcttgacgaagaggcaagcattgcttatcccaagacacgatcacgacggagcagcagcatctcgaacgttcttgacgattcgccgcccaaggctcagcctggtaaacggtctgtgacagaagggtctcctaaaaaggtcgctgcgggacgaaagacatcggcgcccgtgaaaccgacaacacccggccgccccaagacgcgttcgggatctgctgcccgcagcggctccactacccgcccatcgactcgttccggggagctgtctcctcgcgcaccagaaggcgatccaccatggatgatctctgcataccagcccgacccgcgcttgccaccggaccagcaacttctgccaaccgtggccaagaggttgcagcaagaaaagtgggagcaggaaggtcaatttggcaatgtctacgacaaggaattccgtcccctcaacaacgaggcttttgccaaaccgccagagctggagaagccacaagaagtcgccgaagagcgtcatgaagaatggccgttaagacctgaaaatcggggtccaaccccgagccgtccaggaactagctcatactcgacgatgccgaagattcaagatcatactccactggctagcccaagaatacaacaaaaccccagagctgcctcgcctgctgttaatgtcagtgtacccgacccacctcaggagccggaaaaggaaaaggtggacaagaggtctgggtgtggatgttgcctcgtgatgtagtggtctgtctggaacagtcatactactcggcacatggacccctttcagtgctagaggcgaaccaccgccagtgcgaaatcaccaacctcaacgcgacgacattacgaccatttttcatttgcttagcgttgctttatctttgttgaacactgcatcaacgtacctccttttatttgtaccgggaaattccccccatccccatctctcacctcgcaccgccacgttactcggtctctatatcacctccttatcactaaaaagtcgaatcgattctattaaacttacccaaggctacttccaccattctcgaattttcagtgtgcaggagttcgatcggcgttttctggttggacagaacggatctggagtagagaggcaaggatattcacatcctttttcgtcggaggcgggctaccagtccttcgttgctgtacaaacttgttgtccatgggctattgttttttagtctgtgggctattactattgttttgagaatttattggactgttcagagagacagacagcccgatgcaacaccctttgctactaggagcaaaaactgcatatctacaccgatattgcggggaggtacttactttaataagtcgttggagttagcatgtagaggtgttgccgtctcacacatccgacaggtgattttagataccccctcctggcggatgcgagagatttggtagatagctgagaataagagaatatttgtgagaaagtccctggtcttgcgatgggattaactgtggcgaactctttttggtgccagtagttaccgagtgtgccgtttgtttggcatgatttggtctgggtgttatatccgtcaacttggcaagtaagaggttg

SEQ ID NO: 295 - DNA, 1188 bp, Muscodor strobelii
  misc_feature: SGI cDNA ID NO. 559662
  misc_feature: Encodes the peptide sequence at SEQ ID NO 296
atgtcaaatcctacctcaacagcctcgcagcagaaacgtacgcggagaacacgcttcgtctgcatatccgacacacacaacgccacagtcaagctcccgaaaggcgacgtcctcatccattgcggtgatctgacaaaccaaggcagcttcaccgagctatcaaaacaagtacaatggcttgagaaggccgacttcgaatgcaagatcgtgatagcgggtaatcatgacttgacgctcgactcgaaattctttgcgctacacgggggacttatctataacaaaatacagcaggatcccgagcaatgccaggctttgttaaaggaagcgaagacgctcacatatctggaacatgaaagccgtaccttcaaacttagctcaactgacggcccacgaacaacattctccgtctttggctcaccatatagtccggcatggggcacatgggcttttcagttcccccgggacgatggcggtgttgaagccagagctctttgggaccagatcccactcgacacagatatcttgatcacgcatggcccggcgctcacccactgcgataaatctcggactaatgatttcgctggatgcggctggctgaagcaggcctattggcgtgtaaggccgcgcataacgctttgcgggcacattcacgaggcgagaggcgttgagcgtgtgaagtgggatttaaatttacaacatggagagcttagacgaactacatggcaggatcctcatcctgataccgagaaaaacgcgctcgttgatcttacgatgaagggtggtgcgccgctggataacgatggaagctcgtacaaacctgagaaagatcgtcaggaaataccgaaggcaccaaaagccatgttagatcttgagaaggaatcgcgggagaaatttggcatcccatcggctccgagagcaatgctagggcttgggaacaaggaacctgcgatcccaacagccccgaaagccatgcgagaaggacgacacaatgcggatgcaatggatgtcgattcacctacctttgatgaagatgctgttgccggacgactgggtcgtagagaaacatgcatcataaactgcgcgattcaaacgtccatgtggccccatgcaaaacggctgaataaaccgatcgttgttgatatcgatctaccggtatgggaggatgaggagcccgaaaatacgacttaa

SEQ ID NO: 296 - protein, 395 aa, Muscodor strobelii
  misc_feature: SGI Peptide ID NO. 559662
  misc_feature (17)..(219): Pfam Id: PF00149 Pfam Desc: Calcineurin-like phosphoesterase
  misc_feature (6)..(386): NCBI GI: 116198389 Blast Desc: CHGG_07350 [Chaetomium globosum CBS 148.51] gi|88178629|gb|EAQ86097.1| CHGG_07350 [Chaetomium globosum CBS 148.51]
  misc_feature (19)..(391): NCBI GI: 256728539 Blast Desc: [Nectria haematococca mpVI 77-13-4]
  misc_feature (15)..(389): NCBI GI: 46110242 Blast Desc: FG02003.1 [Gibberella zeae PH-1]
  misc_feature (6)..(386): NCBI GI: 171692445 Blast Desc: protein product [Podospora anserina] gi|170946171|emb|CAP72972.1| protein product [Podospora anserina]
  misc_feature (15)..(388): NCBI GI: 169764935 Blast Desc: [Aspergillus oryzae RIB40] gi|83764793|dbj|BAE54937.1| protein product [Aspergillus oryzae]
  misc_feature (13)..(390): NCBI GI: 159130824 Blast Desc: Ser/Thr protein phosphatase family protein [Aspergillus fumigatus A1163]
  misc_feature (13)..(390): NCBI GI: 146322485 Blast Desc: Ser/Thr protein phosphatase family protein [Aspergillus fumigatus Af293] gi|129557040|gb|EAL88312.2| Ser/Thr protein phosphatase family protein [Aspergillus fumigatus Af293]
  misc_feature (15)..(388): NCBI GI: 238503794 Blast Desc: Ser/Thr protein phosphatase family protein [Aspergillus flavus NRRL3357] gi|220690600|gb|EED46949.1| Ser/Thr protein phosphatase family protein [Aspergillus flavus NRRL3357]
  misc_feature (15)..(393): NCBI GI: 255935207 Blast Desc: Pc13g01860 [Penicillium chrysogenum Wisconsin 54-1255] gi|211583250|emb|CAP91255.1| Pc13g01860 [Penicillium chrysogenum Wisconsin 54-1255]
  misc_feature (15)..(388): NCBI GI: 121702593 Blast Desc: Ser/Thr protein phosphatase family protein [Aspergillus clavatus NRRL 1] gi|119397704|gb|EAW08135.1| Ser/Thr protein phosphatase family protein [Aspergillus clavatus NRRL 1]
MSNPTSTASQQKRTRRTRFVCISDTHNATVKLPKGDVLIHCGDLTNQGSFTELSKQVQWLEKADFECKIVIAGNHDLTLDSKFFALHGGLIYNKIQQDPEQCQALLKEAKTLTYLEHESRTFKLSSTDGPRTTFSVFGSPYSPAWGTWAFQFPRDDGGVEARALWDQIPLDTDILITHGPALTHCDKSRTNDFAGCGWLKQAYWRVRPRITLCGHIHEARGVERVKWDLNLQHGELRRTTWQDPHPDTEKNALVDLTMKGGAPLDNDGSSYKPEKDRQEIPKAPKAMLDLEKESREKFGIPSAPRAMLGLGNKEPAIPTAPKAMREGRHNADAMDVDSPTFDEDAVAGRLGRRETCIINCAIQTSMWPHAKRLNKPIVVDIDLPVWEDEEPENTT

SEQ ID NO: 297 - DNA, 2046 bp, Muscodor strobelii
  misc_feature: SGI EST ID NO. CUFF.717.0
  misc_feature: Variant of the nucleotide sequence at SEQ ID NO 295
tggaatttcaattcgaacgctttgttggtgattgtagcatgtgactctctatgtggaattaggctcctactgatgcctaggacttccatcgtagctaaggaatatttcaggtcttctcgtgccagtgctttccgaacgaaccagcaacgatctatcacagcccgtatcaaaatgtcaaatcctacctcaacagcctcgcagcagaaacgtacgcggagaacacgcttcgtctgcatatccgacacacacaacgccacagtcaagctcccgaaaggcgacgtcctcatccattgcggtgatctgacaaaccaaggcagcttcaccgagctatcaaaacaagtacaatggcttgagaaggccgacttcgaatgcaagatcgtgatagcgggtaatcatgacttgacgctcgactcgaaattctttgcgctacacgggggacttatctataacaaaatacagcaggatcccgagcaatgccaggctttgttaaaggaagcgaagacgctcacatatctggaacatgaaagccgtaccttcaaacttagctcaactgacggcccacgaacaacattctccgtctttggctcaccatatagtccggcatggggcacatgggcttttcagttcccccgggacgatggcggtgttgaagccagagctctttgggaccagatcccactcgacacagatatcttgatcacgcatggcccggcgctcacccactgcgataaatctcggactaatgatttcgctggatgcggctggctgaagcaggcctattggcgtgtaaggccgcgcataacgctttgcgggcacattcacgaggcgagaggcgttgagcgtgtgaagtgggatttaaatttacaacatggagagcttagacgaactacatggcaggatcctcatcctgataccgagaaaaacgcgctcgttgatcttacgatgaagggtggtgcgccgctggataacgatggaagctcgtacaaacctgagaaagatcgtcaggaaataccgaaggcaccaaaagccatgttagatcttgagaaggaatcgcgggagaaatttggcatcccatcggctccgagagcaatgctagggcttgggaacaaggaacctgcgatcccaacagccccgaaagccatgcgagaaggacgacacaatgcggatgcaatggatgtcgattcacctacctttgatgaagatgctgttgccggacgactgggtcgtagagaaacatgcatcataaactgcgcgattcaaacgtccatgtggccccatgcaaaacggctgaataaaccgatcgttgttgatatcgatctaccggtatgggaggatgaggagcccgaaaatacgacttaagcaaaggatgacggacgagatgcagagccgcattcttcgtcaagacaaattgtgagatttggggatttggcccccaacctttgacttcagacttcgggcggaagtgtttcgagaagccacatgcatcgggcgtaaatggtgagacgtgtgtcagactgccggtgatagaaaatagctccgtcaaatcatagggaacgaggcgtaggattcagcagccacagggtctttagttaagagcctcctcacgacagctgaatacccgaggcgccgataggatgggatggaacgacataagatgactggcgtcttctgtgcatttgatcgaaccaattcaatagcaaattggcccgcagcctgctcattctattatctatgattgccgagcaatgcatctaattgtttgtgactttttccggctgatcctgcagccagtgttgtctagagctgtgttgtcgtttttagacatacctccatcactttcgtcgtccaaacaatgatgtagatgtaagtccatgctttttgggttgaagcatctcgagcaggcatgtcatgtactcatgctatatgcttggttattactcgtgtcggaggttcaaggtgattgcgccttggccattgaagttttgtattcgatatcaacgcagattcttatgatacgaaggtccaattcagactactacttctata

SEQ ID NO: 298 - DNA, 1860 bp, Muscodor strobelii
  misc_feature: SGI cDNA ID NO. 559663
  misc_feature: Encodes the peptide sequence at SEQ ID NO 299
atgagtacccaaccggacccgtacaagatcttgggcgtctccaaagacgctcaactgcccgaaatccgctccgcccacaggaaactggtgttgaaatgccatcccgacaagatccaggaccccacgttgaaggaggagaagcagatggagttccagcaagtgcagcaagcttacgaaacactcagcaatgataaattacgcgaggattacgaccgtcaagcccggatcttcgccgacctctcgcgtgagagggaaagagtcacacgaacttcagcaacgcggacgccatcatctacccgcacgccaagacgtgcagagacagcctactacgatgtgaacatcaagactgcatcaccgagagctaatacctttgccgccaggggaagtccatataccatgagagatccaccacggtcatacgaagacaattcatcaggagcccgactgtatgaagagcttggccgccatgcaaggaagactgctagctacgagaaagaaaaaccatcgtctcgtaaagaagacgagcggcgcaggcgagagaaggaagacgagaggttcgaaaaagagaggcttaaggagaaagatgccaagaaggccgagaaggctgagaagcgactgaaagaagagagggagaaattaagggagcgggagcaggagaaggagaaggagaaggctaggaaagaaaaggaggagaagaagaagatcgacaaggagcgagagcgagaacgggagaagcaacgcagacgagatgctgttgagaaagagcgcaagcgttatcccgttgtggctgactctacttccgaagaatcggagtctgacgacgatgtcgtttacgaagtccccccgccaaaggttgaaaggcagaaatcaaatagtagccgcctggctgaagacattgaaccgcctgtggctggcgccgctcgcgaaaggaagatgtccggaaacatggaggccgcgtttcgctatctccaaagatctggtggcaagcctcctagtttgacccgagcacaaacgcttcaagaggagtcattcaagtataatatggcgccggtagcggctcctactcctccgcctgctctagcatcaccttttgctccacccccggccgctgatgttacagacacttctgattcagacgtggctagaagatccagagccaatcctcgcaggatgtcccatgaaacccctaagtcgtcgggagggaagtcctcgcacaagaagtcatcttcgcgagaagaacctgtcgtcatcactagctcacctcggattgtaccctcatttcaaaaatcgcattccgagagacatccgcctcaccggtccaatacagatagctataatcgctctgctcctatgcctgtaccgggccatttgaatcgggctgatacatggtatgaacgtaccgaacgcgaacagcaacgcaatgagcgaagccgctctcgacataacaagtatgccgatgacaccgattccgaggatgaacgagaacgtcgccagcgtcgcagcactcgccgtactacccactctcctgaaccgatgccagcccagacacaccaccacaggtatacggttgcggacggtaaaacgacacgtcaaaaatcataccatgccgctcaggagccgccatcccggtcatacaagtcgtccaaaggaagcgcctatatcacgccgaattcctcttcctctcgcgcacagcgagcatacaagtcttacgacaagtcctacgctcgcgatacgtacgatgatgatcaacctcagtatttcagcaaagtcaagtatgcgaatcagttcaacgaaggagacatcagctacagcaaagtgccctactcaggttcctaccggtcagatgtgtatgcttcctag

SEQ ID NO: 299 - protein, 619 aa, Muscodor strobelii
  misc_feature: SGI Peptide ID NO. 559663
  misc_feature (6)..(71): Pfam Id: PF00226 Pfam Desc: DnaJ domain
  misc_feature (1)..(540): NCBI GI: 46110244 Blast Desc: FG02004.1 [Gibberella zeae PH-1]
  misc_feature (2)..(152): NCBI GI: 261360853 Blast Desc: conserved [Verticillium albo-atrum VaMs.102]
  misc_feature (2)..(236): NCBI GI: 85102253 Blast Desc: NCU04145 [Neurospora crassa OR74A] gi|12718218|emb|CAC28762.1| conserved [Neurospora crassa] gi|28922844|gb|EAA32065.1| NCU04145 [Neurospora crassa OR74A]
  misc_feature (1)..(183): NCBI GI: 171692447 Blast Desc: protein product [Podospora anserina] gi|170946172|emb|CAP72973.1| protein product [Podospora anserina]
  misc_feature (1)..(155): NCBI GI: 156051926 Blast Desc: SS1G_07370 [Sclerotinia sclerotiorum 1980] gi|154705148|gb|EDO04887.1| SS1G_07370 [Sclerotinia sclerotiorum 1980]
  misc_feature (6)..(155): NCBI GI: 154302054 Blast Desc: BC1G_10264 [Botryotinia fuckeliana B05.10] gi|150855656|gb|EDN30848.1| BC1G_10264 [Botryotinia fuckeliana B05.10]
  misc_feature (1)..(254): NCBI GI: 121702591 Blast Desc: DnaJ domain protein [Aspergillus clavatus NRRL 1] gi|119397703|gb|EAW08134.1| DnaJ domain protein [Aspergillus clavatus NRRL 1]
  misc_feature (1)..(221): NCBI GI: 67527921 Blast Desc: AN4206.2 [Aspergillus nidulans FGSC A4] gi|40740115|gb|EAA59305.1| AN4206.2 [Aspergillus nidulans FGSC A4] gi|259481187|tpe|CBF74482.1| TPA: DnaJ domain protein FGSC
  misc_feature (6)..(83): NCBI GI: 145255047 Blast Desc: An18g03870 [Aspergillus niger] gi|134084432|emb|CAK97424.1| protein product [Aspergillus niger]
  misc_feature (6)..(83): NCBI GI: 159130825 Blast Desc: DnaJ domain protein [Aspergillus fumigatus A1163]
MSTQPDPYKILGVSKDAQLPEIRSAHRKLVLKCHPDKIQDPTLKEEKQMEFQQVQQAYETLSNDKLREDYDRQARIFADLSRERERVTRTSATRTPSSTRTPRRAETAYYDVNIKTASPRANTFAARGSPYTMRDPPRSYEDNSSGARLYEELGRHARKTASYEKEKPSSRKEDERRRREKEDERFEKERLKEKDAKKAEKAEKRLKEEREKLREREQEKEKEKARKEKEEKKKIDKEREREREKQRRRDAVEKERKRYPVVADSTSEESESDDDVVYEVPPPKVERQKSNSSRLAEDIEPPVAGAARERKMSGNMEAAFRYLQRSGGKPPSLTRAQTLQEESFKYNMAPVAAPTPPPALASPFAPPPAADVTDTSDSDVARRSRANPRRMSHETPKSSGGKSSHKKSSSREEPVVITSSPRIVPSFQKSHSERHPPHRSNTDSYNRSAPMPVPGHLNRADTWYERTEREQQRNERSRSRHNKYADDTDSEDERERRQRRSTRRTTHSPEPMPAQTHHHRYTVADGKTTRQKSYHAAQEPPSRSYKSSKGSAYITPNSSSSRAQRAYKSYDKSYARDTYDDDQPQYFSKVKYANQFNEGDISYSKVPYSGSYRSDVYAS

SEQ ID NO: 300 - DNA, 1464 bp, Muscodor strobelii
  misc_feature: SGI cDNA ID NO. 559664
  misc_feature: Reduced expression when VOC is produced
  misc_feature: Encodes the peptide sequence at SEQ ID NO 301
atgagagatccaccacggtcatacgaagacaattcatcaggagcccgactgtatgaagagcttggccgccatgcaaggaagactgctagctacgagaaagaaaaaccatcgtctcgtaaagaagacgagcggcgcaggcgagagaaggaagacgagaggttcgaaaaagagaggcttaaggagaaagatgccaagaaggccgagaaggctgagaagcgactgaaagaagagagggagaaattaagggagcgggagcaggagaaggagaaggagaaggctaggaaagaaaaggaggagaagaagaagatcgacaaggagcgagagcgagaacgggagaagcaacgcagacgagatgctgttgagaaagagcgcaagcgttatcccgttgtggctgactctacttccgaagaatcggagtctgacgacgatgtcgtttacgaagtccccccgccaaaggttgaaaggcagaaatcaaatagtagccgcctggctgaagacattgaaccgcctgtggctggcgccgctcgcgaaaggaagatgtccggaaacatggaggccgcgtttcgctatctccaaagatctggtggcaagcctcctagtttgacccgagcacaaacgcttcaagaggagtcattcaagtataatatggcgccggtagcggctcctactcctccgcctgctctagcatcaccttttgctccacccccggccgctgatgttacagacacttctgattcagacgtggctagaagatccagagccaatcctcgcaggatgtcccatgaaacccctaagtcgtcgggagggaagtcctcgcacaagaagtcatcttcgcgagaagaacctgtcgtcatcactagctcacctcggattgtaccctcatttcaaaaatcgcattccgagagacatccgcctcaccggtccaatacagatagctataatcgctctgctcctatgcctgtaccgggccatttgaatcgggctgatacatggtatgaacgtaccgaacgcgaacagcaacgcaatgagcgaagccgctctcgacataacaagtatgccgatgacaccgattccgaggatgaacgagaacgtcgccagcgtcgcagcactcgccgtactacccactctcctgaaccgatgccagcccagacacaccaccacaggtatacggttgcggacggtaaaacgacacgtcaaaaatcataccatgccgctcaggagccgccatcccggtcatacaagtcgtccaaaggaagcgcctatatcacgccgaattcctcttcctctcgcgcacagcgagcatacaagtcttacgacaagtcctacgctcgcgatacgtacgatgatgatcaacctcagtatttcagcaaagtcaagtatgcgaatcagttcaacgaaggagacatcagctacagcaaagtgccctactcaggttcctaccggtcagatgtgtatgcttcctag

SEQ ID NO: 301 - protein, 487 aa, Muscodor strobelii
  misc_feature: SGI Peptide ID NO. 559664
  misc_feature: Useful for introducing or modulating the production of volatile compounds
MRDPPRSYEDNSSGARLYEELGRHARKTASYEKEKPSSRKEDERRRREKEDERFEKERLKEKDAKKAEKAEKRLKEEREKLREREQEKEKEKARKEKEEKKKIDKEREREREKQRRRDAVEKERKRYPVVADSTSEESESDDDVVYEVPPPKVERQKSNSSRLAEDIEPPVAGAARERKMSGNMEAAFRYLQRSGGKPPSLTRAQTLQEESFKYNMAPVAAPTPPPALASPFAPPPAADVTDTSDSDVARRSRANPRRMSHETPKSSGGKSSHKKSSSREEPVVITSSPRIVPSFQKSHSERHPPHRSNTDSYNRSAPMPVPGHLNRADTWYERTEREQQRNERSRSRHNKYADDTDSEDERERRQRRSTRRTTHSPEPMPAQTHHHRYTVADGKTTRQKSYHAAQEPPSRSYKSSKGSAYITPNSSSSRAQRAYKSYDKSYARDTYDDDQPQYFSKVKYANQFNEGDISYSKVPYSGSYRSDVYAS

SEQ ID NO: 302 - DNA, 1662 bp, Muscodor strobelii
  misc_feature: SGI cDNA ID NO. 559665
  misc_feature: Reduced expression when VOC is produced
  misc_feature: Encodes the peptide sequence at SEQ ID NO 303
atgtcgtccacagacatccagttgaacggtaacggccatcacgaccatgtcttgcgcccgcgcccgcgcaagcctcagcatgcccaggtgtctgagctcgctagggaacacagcagcacctctctcaatggcatgctcgaggcaccacaagacctgcactcgggtgtaaccagtggtcgttcaacacctgttccagagaatgctcccgcctcgaccaaggctttgtctagcatacgaaagcaggttcgcgccgagcagcgacgacgtctcttcccgaccatcgagttcgcctcgcgcgtctcccacttcgatcctcagtccgactatcgcgacttccatggcttcttcaacctcttctggatcggcctggccatcctgggcatcacgacgatgctgcgcaactacaaggaaaccgggttccctttgcgaatccagatctggaccttgttcacagtcaagctgtggcacttggccattgccgacttcttgatggttgccagcactgccatcagcttcccggcgcataggatcttcaggaagagtcagggatccatgacatggaacaaaggcgggatggcgttccagagcatatatcaagtcatatggatggccttctggatcgccgtgccatttctcctcgattggacctggacagcccaagtatttctcgtcctgcacaccatggtgttgctgatgaagatgcattcgtatgccttttacaacggacatctctccgagacggaaaagcgcttgcactctctcgacagtccgaagggcgcgtcgaaagaacctgcgtacatgtacccgacggccgacaaccccatgggttccttcgctcacgccgataagacggccgacagcgatagtgacggtgagggtctgtctcagctacgcgaagatctggcccgtgaactgacgagccccatcggcaacgtcacatatccgcgcaatctgacgtgggggaactatattgactatctgctctgcccaacgctgtgctacgaactagagtacccacggaccgaatcgatcgactggacgaacctcatcgccaaaatcactgccacgttcggctgcatcttcctcctgaccatcatctcggaagagttcatcctccccgtgctgcaggagtcgcaagcacgcctcgacagcatcgcatcagtgcccgagaagctcctcatcctggccgagtcgatatcgtggctcctgttcccctttatgctgacgctgctgctcgtcttcctcgtcatcttcgagtacgtgctgggcgcgttcgccgagattacccgcttcgcggaccgccacttctacagcgactggtggaactgctccgactggatggagttcagccgggagtggaacgtgcccgtgtactcgttcctgcggcgccacgtgtacgcaacgtccaagccgagcatcggccgcaacatggctaccttcatcaccttcttcatctcggccgtcggccacgagatcgtcatggcgtgcatcaccaagaagctgcgcgggtacggattcgtctgccagatgctgcagctccctatcgtgatgctgcagcgcatgaaatgggtccgcgcccacaagacggccaacaatgttttgttttggagcagcatgatcttgggccttagtgtgatatgttcactttacgtcctggtctaa

SEQ ID NO: 303 - protein, 553 aa, Muscodor strobelii
  misc_feature: SGI Peptide ID NO. 559665
  misc_feature (208)..(552): Pfam Id: PF03062 Pfam Desc: MBOAT family
  misc_feature (425)..(552): Pfam Id: PF03062 Pfam Desc: MBOAT family
  misc_feature (1)..(553): NCBI GI: 171692449 Blast Desc: protein product [Podospora anserina] gi|170946173|emb|CAP72974.1| protein product [Podospora anserina]
  misc_feature (2)..(553): NCBI GI: 46110268 Blast Desc: FG02016.1 [Gibberella zeae PH-1]
  misc_feature (1)..(553): NCBI GI: 16944412 Blast Desc: related to acyl-CoA sterol acyltransferase [Neurospora crassa]
  misc_feature (1)..(553): NCBI GI: 164426522 Blast Desc: NCU04144 [Neurospora crassa OR74A] gi|157071369|gb|EAA32064.2| NCU04144 [Neurospora crassa OR74A]
  misc_feature (1)..(553): NCBI GI: 39977761 Blast Desc: MGG_06765 [Magnaporthe grisea 70-15] gi|145013716|gb|EDJ98357.1| MGG_06765 [Magnaporthe grisea 70-15]
  misc_feature (2)..(518): NCBI GI: 116198383 Blast Desc: CHGG_07347 [Chaetomium globosum CBS 148.51] gi|88178626|gb|EAQ86094.1| CHGG_07347 [Chaetomium globosum CBS 148.51]
  misc_feature (2)..(553): NCBI GI: 156051928 Blast Desc: SS1G_07371 [Sclerotinia sclerotiorum 1980] gi|154705149|gb|EDO04888.1| SS1G_07371 [Sclerotinia sclerotiorum 1980]
  misc_feature (1)..(553): NCBI GI: 261360865 Blast Desc: sterol O-acyltransferase [Verticillium albo-atrum VaMs.102]
  misc_feature (4)..(553): NCBI GI: 225556657 Blast Desc: sterol O-acyltransferase [Ajellomyces capsulatus G186AR]
  misc_feature (2)..(553): NCBI GI: 189188148 Blast Desc: sterol O-acyltransferase 1 [Pyrenophora tritici-repentis Pt-1C-BFP] gi|187972019|gb|EDU39518.1| sterol O-acyltransferase 1 [Pyrenophora tritici-repentis Pt-1C-BFP]
  misc_feature (55)..(552): SWISSPROT Homolog: EC 2.3.1.26 Sterol O-acyltransferase
  misc_feature: Useful for introducing or modulating the production of volatile compounds
MSSTDIQLNGNGHHDHVLRPRPRKPQHAQVSELAREHSSTSLNGMLEAPQDLHSGVTSGRSTPVPENAPASTKALSSIRKQVRAEQRRRLFPTIEFASRVSHFDPQSDYRDFHGFFNLFWIGLAILGITTMLRNYKETGFPLRIQIWTLFTVKLWHLAIADFLMVASTAISFPAHRIFRKSQGSMTWNKGGMAFQSIYQVIWMAFWIAVPFLLDWTWTAQVFLVLHTMVLLMKMHSYAFYNGHLSETEKRLHSLDSPKGASKEPAYMYPTADNPMGSFAHADKTADSDSDGEGLSQLREDLARELTSPIGNVTYPRNLTWGNYIDYLLCPTLCYELEYPRTESIDWTNLIAKITATFGCIFLLTIISEEFILPVLQESQARLDSIASVPEKLLILAESISWLLFPFMLTLLLVFLVIFEYVLGAFAEITRFADRHFYSDWWNCSDWMEFSREWNVPVYSFLRRHVYATSKPSIGRNMATFITFFISAVGHEIVMACITKKLRGYGFVCQMLQLPIVMLQRMKWVRAHKTANNVLFWSSMILGLSVICSLYVLV

SEQ ID NO: 304 - DNA, 3263 bp, Muscodor strobelii
  misc_feature: SGI EST ID NO. CUFF.770.1
  misc_feature: Variant of the nucleotide sequence at SEQ ID NO 302
gttgacgtaagtagtgcgtcgggcgggtatccaatggtaactccaagacccctactgtcggccaacaaatctttatgacgtcaacgctaaccatcggctgccgagacaaatcgaagagcatcacgattgatcgcgtctggccagattacctccaatactcgcgcaagtaaagaagcatggctgcctgacaaagagtccagtgaaagggggggattcggcattggtttgcctactcaagacggggatgtcttgcgaactgtgttggtggaaccgaggcaacttttgatacatcttcgacacaaatggaagagttgaggccaggcaacatatcaccgcgcctttccatccgactgtacgaatcttgtcagcccctggcccatcagagcaaaatgaagagctgcccgtagaattccattccatcattgcaatgtaatgtatggtttttgtgacaccagtaacaaaggaagtgtggtcctagaaggattcacagcgtggttttccccctcgcgtcattggctctcgcgtgggcttggcttgcgacagcccgcagctttcttacattcccgactctcatcgtcgacggctaccttatatttaggttagttgcaggaggaaggaccgtaggagttggactattgatatgtttcatgccgtagcctgacgcgcttatcttttagtaccttgcctagacctagaattgttcctcgaagctctccactgttgaagcatgctatatgcccccccaccaatatagctttggtagcatagggaaacttactacaatcatcaccgtcgtatcataatctcacacagtcgtgacagtcaccgagcttcattatcttacctccatcgacatcaacaacctttactcttaagcacctgtcaactcaatcctgatctcattatacctcacgccgtcttgttttaagctcatcggccacgttttgcatagttcgtcatcgttccgcttctatttttaactgccgcaaccgaatcctttcgattggccactctgtctcatccgcccatgcgtcaagcttgattttcttgcttttcgccgcgattgactttgggcccccttattgagcagtggtattatagccaagtcgcgcgctcgggcgccacagacgcgaaacatgtcgtccacagacatccagttgaacggtaacggccatcacgaccatgtcttgcgcccgcgcccgcgcaagcctcagcatgcccaggtgtctgagctcgctagggaacacagcagcacctctctcaatggcatgctcgaggcaccacaagacctgcactcgggtgtaaccagtggtcgttcaacacctgttccagagaatgctcccgcctcgaccaaggctttgtctagcatacgaaagcaggttcgcgccgagcagcgacgacgtctcttcccgaccatcgagttcgcctcgcgcgtctcccacttcgatcctcagtccgactatcgcgacttccatggcttcttcaacctcttctggatcggcctggccatcctgggcatcacgacgatgctgcgcaactacaaggaaaccgggttccctttgcgaatccagatctggaccttgttcacagtcaagctgtggcacttggccattgccgacttcttgatggttgccagcactgccatcagcttcccggcgcataggatcttcaggaagagtcagggatccatgacatggaacaaaggcgggatggcgttccagagcatatatcaagtcatatggatggccttctggatcgccgtgccatttctcctcgattggacctggacagcccaagtatttctcgtcctgcacaccatggtgttgctgatgaagatgcattcgtatgccttttacaacggacatctctccgagacggaaaagcgcttgcactctctcgacagtccgaagggcgcgtcgaaagaacctgcgtacatgtacccgacggccgacaaccccatgggttccttcgctcacgccgataagacggccgacagcgatagtgacggtgagggtctgtctcagctacgcgaagatctggcccgtgaactgacgagccccatcggcaacgtcacatatccgcgcaatctgacgtgggggaactatattgactatctgctctgcccaacgctgtgctacgaactagagtacccacggaccgaatcgatcgactggacgaacctcatcgccaaaatcactgccacgttcggctgcatcttcctcctgaccatcatctcggaagagttcatcctccccgtgctgcaggagtcgcaagcacgcctcgacagcatcgcatcagtgcccgagaagctcctcatcctggccgagtcgatatcgtggctcctgttcccctttatgctgacgctgctgctcgtcttcctcgtcatcttcgagtacgtgctgggcgcgttcgccgagattacccgcttcgcggaccgccacttctacagcgactggtggaactgctccgactggatggagttcagccgggagtggaacgtgcccgtgtactcgttcctgcggcgccacgtgtacgcaacgtccaagccgagcatcggccgcaacatggctaccttcatcaccttcttcatctcggccgtcggccacgagatcgtcatggcgtgcatcaccaagaagctgcgcgggtacggattcgtctgccagatgctgcagctccctatcgtgatgctgcagcgcatgaaatgggtccgcgcccacaagacggccaacaatgttttgttttggagcagcatgatcttgggccttagtgtgatatgttcactttacgtcctggtctaaacacgtacgatgcattgatgaggttgtaaatatctagacgctcaggcgaatagagatactgagtactaccagaattcagaagcagatggttacaaaaccctatgagactataaacccctggaaaagtcatcggagttgtatacgggacgggacatggacggataggtagcgtgtctaatattctattagctgtttatttcaatcttagtatttgataccgcgaagagataccattgcaaacaatccaactcaaccataattatccatttttgcaaaagtaaggtgtaatctactcatctccttagtcatctggagcatcgccgatgtatactgcagttcgtcaactgcatctcacccactgcccgtattgtatgttaccaaacgtgtacgagacaagggttcagatgcgcatgcatttcgtacgcattcgagttaggaacaaaacacaatgactgtagcgtgtaa

SEQ ID NO: 305 - DNA, 1695 bp, Muscodor strobelii
  misc_feature: SGI cDNA ID NO. 559666
  misc_feature: Encodes the peptide sequence at SEQ ID NO 306
atgtcgtccacagacatccagttgaacggtaacggccatcacgaccatgtcttgcgcccgcgcccgcgcaagcctcagcatgcccaggtgtctgagctcgctagggaacacagcagcacctctctcaatggcatgctcgaggcaccacaagacctgcactcgggtgtaaccagtggtcgttcaacacctgttccagagaatgctcccgcctcgaccaaggctttgtctagcatacgaaagcaggttcgcgccgagcagcgacgacgtctcttcccgaccatcgagttcgcctcgcgcgtctcccacttcgatcctcagtccgactatcgcgacttccatggcttcttcaacctcttctggatcggcctggccatcctgggcatcacgacgatgctgcgcaactacaaggaaaccgggttccctttgcgaatccagatctggaccttgttcacagtcaagctgtggcacttggccattgccgacttcttgatggttgccagcactgccatcagcttcccggcgcataggatcttcaggaagagtcagggatccatgacatggaacaaaggcgggatggcgttccagagcatatatcaagtcatatggatggccttctggatcgccgtgccatttctcctcgattggacctggacagcccaagtatttctcgtcctgcacaccatggtgttgctgatgaagatgcattcgtatgccttttacaacggacatctctccgagacggaaaagcgcttgcactctctcgacagtccgaagggcgcgtcgaaagaacctgcgtacatgtacccgacggccgacaaccccatgggttccttcgctcacgccgataagacggccgacagcgatagtgacggtgagggtctgtctcagctacgcgaagatctggcccgtgaactgacgagccccatcggcaacgtcacatatccgcgcaatctgacgtgggggaactatattgactatctgctctgcccaacgctgtgctacgaactagagtacccacggaccgaatcgatcgactggacgaacctcatcgccaaaatcactgccacgttcggctgcatcttcctcctgaccatcatctcggaagagttcatcctccccgtgctgcaggagtcgcaagcacgcctcgacagcatcgcatcagtgcccgagaagctcctcatcctggccgagtcgatatcgtggctcctgttcccctttatgctgacgctgctgctcgtcttcctcgtcatcttcgagtacgtgctgggcgcgttcgccgagattacccgcttcgcggaccgccacttctacagcgactggtggaactgctccgactggatggagttcagccgggagtggaacgtgcccgtgtactcgttcctgcggcgccacgtgtacgcaacgtccaagccgagcatcggccgcaacatggctaccttcatcaccttcttcatctcggccgtcggccacgagatcgtcatggcgtgcatcaccaagaagctgcgcgggtacggattcgtctgccagatgctgcagctccctatcgtgatgctgcagcgcatgaaatgggtccgcgcccacaagacggccaacaatgttttgttttggagcagcatgatcttgggccttagtgtggtaaatatgttcactttacgtcctggtctaaacacgtacgatgcattgatgaggttgtaa

SEQ ID NO: 306 - protein, 564 aa, Muscodor strobelii
  misc_feature: SGI Peptide ID NO. 559666
  misc_feature (208)..(552): Pfam Id: PF03062 Pfam Desc: MBOAT family
  misc_feature (425)..(552): Pfam Id: PF03062 Pfam Desc: MBOAT family
  misc_feature (1)..(546): NCBI GI: 171692449 Blast Desc: protein product [Podospora anserina] gi|170946173|emb|CAP72974.1| protein product [Podospora anserina]
  misc_feature (2)..(546): NCBI GI: 46110268 Blast Desc: FG02016.1 [Gibberella zeae PH-1]
  misc_feature (1)..(546): NCBI GI: 16944412 Blast Desc: related to acyl-CoA sterol acyltransferase [Neurospora crassa]
  misc_feature (1)..(546): NCBI GI: 164426522 Blast Desc: NCU04144 [Neurospora crassa OR74A] gi|157071369|gb|EAA32064.2| NCU04144 [Neurospora crassa OR74A]
  misc_feature (1)..(546): NCBI GI: 39977761 Blast Desc: MGG_06765 [Magnaporthe grisea 70-15] gi|145013716|gb|EDJ98357.1| MGG_06765 [Magnaporthe grisea 70-15]
  misc_feature (2)..(518): NCBI GI: 116198383 Blast Desc: CHGG_07347 [Chaetomium globosum CBS 148.51] gi|88178626|gb|EAQ86094.1| CHGG_07347 [Chaetomium globosum CBS 148.51]
  misc_feature (2)..(544): NCBI GI: 156051928 Blast Desc: SS1G_07371 [Sclerotinia sclerotiorum 1980] gi|154705149|gb|EDO04888.1| SS1G_07371 [Sclerotinia sclerotiorum 1980]
  misc_feature (1)..(546): NCBI GI: 261360865 Blast Desc: sterol O-acyltransferase [Verticillium albo-atrum VaMs.102]
  misc_feature (4)..(546): NCBI GI: 225556657 Blast Desc: sterol O-acyltransferase [Ajellomyces capsulatus G186AR]
  misc_feature (7)..(549): NCBI GI: 225681576 Blast Desc: sterol O-acyltransferase [Paracoccidioides brasiliensis Pb03]
  misc_feature (55)..(538): SWISSPROT Homolog: EC 2.3.1.26 Sterol O-acyltransferase
MSSTDIQLNGNGHHDHVLRPRPRKPQHAQVSELAREHSSTSLNGMLEAPQDLHSGVTSGRSTPVPENAPASTKALSSIRKQVRAEQRRRLFPTIEFASRVSHFDPQSDYRDFHGFFNLFWIGLAILGITTMLRNYKETGFPLRIQIWTLFTVKLWHLAIADFLMVASTAISFPAHRIFRKSQGSMTWNKGGMAFQSIYQVIWMAFWIAVPFLLDWTWTAQVFLVLHTMVLLMKMHSYAFYNGHLSETEKRLHSLDSPKGASKEPAYMYPTADNPMGSFAHADKTADSDSDGEGLSQLREDLARELTSPIGNVTYPRNLTWGNYIDYLLCPTLCYELEYPRTESIDWTNLIAKITATFGCIFLLTIISEEFILPVLQESQARLDSIASVPEKLLILAESISWLLFPFMLTLLLVFLVIFEYVLGAFAEITRFADRHFYSDWWNCSDWMEFSREWNVPVYSFLRRHVYATSKPSIGRNMATFITFFISAVGHEIVMACITKKLRGYGFVCQMLQLPIVMLQRMKWVRAHKTANNVLFWSSMILGLSVVNMFTLRPGLNTYDALMRL

SEQ ID NO: 307 - DNA, 3263 bp, Muscodor strobelii; identical to SEQ ID NO: 304
  misc_feature: SGI EST ID NO. CUFF.770.1
  misc_feature: Variant of the nucleotide sequence at SEQ ID NO 305

SEQ ID NO: 308 - DNA, 1680 bp, Muscodor strobelii
  misc_feature: SGI cDNA ID NO. 559667
  misc_feature: Encodes the peptide sequence at SEQ ID NO 309
atggtcgtcgctcatagaatgcagcgcagtcctgtgccaatgtcaccaccgatggtcctcacgccgcctgcgactctgtcgccgcagtctgtcgtgtcgccagccgccccatcgcctgaacccatcgctgtccggagtcacagtctcgagcccgtcaaacccacgcccaaccagatgcaatccgtattctcatcgcaaaccggcgaagcatatcgctctcagcaacatacgtcccaggtatgggagacgcacaaagaagagattcgtaggttgtacctcgaagaaaaccgaccgctaaaagaagtcatggctatcatgcgccaaagggggttcagagctaccgtaaggatgtataagtcacggttcgacaaatggggcttcagcaagaataacaataagaatgaagtggtcaagatgcttcaggttcaacgccagcgaaacgccctcgggaagcgcacgactttccaccggaatggtcgcgaggtcgccatagatgcctatctaaagcgtaaaggcatatctcaatatgacctcgcagaaccaggcttggccgagaacctaccacaacatttacgatgtgttacgccaccaccagagattcctattctaatacagacaggaggggctttatcgctgcaagaacttctgttgcaaacggcgcgagatctgtcatggaactcttactgccctcctgatgtcccccttgttacttctgctgctatctaccgtggcgatgcattacgttgtgcgatcacagacatcactaacgcagactggttgttccatgttgggcactacgagcgaggtggcgtgatgtgcgaggaaggattcaaatctctacatttgatggttacgaaaccgtcaatatacgggttgctccaccttttgatgttccatctcgatgcgtacaacaaaggcattgttaaggaagtttggaggtatctggctgcctatgccgcgacgattcgggcggacggcccattggcaaggctattccaaggcatcttcaagttcatcaatactcatgaattcgaagaatactggcatttaatgttcgaatgcacagagaagcttctcttgcttgacgagcagaatacaggtctaccagagggcacggtcgcccgtctctatccgctggttttcattccacgggctcatcagtacaggaagggaccgtattctcgtctacagagccattgcgactgggatcgtttaagccagggaagtaagccgcggaatccagaggaacaggccattttcgatgccagcgagcttctaatcatcggctcacagagcaattggcaaagcgataggacatttgagctcgctgagtctgtcctcgaaatgtcgaagaaatttgcatacaacgtcgacttctttgtttacattgcgtttactgcgcttgcacgctattatcggtcagatttcaaggcaggtgacccaatcagcagcccaaagcaccagctctctgtatcgtacctggaacaggccgtcaagctgtcagaaggcaagtgggatcccgacatgggttatttcatgggcgacttcgaactgctagagcagtggtaccacgaggcaggcgacacattgatggctgatcttacccatacaagatggagagcctcactcgaaatgataccgaaagattgggcaagaaacaacaagggggttctacgctga

SEQ ID NO: 309 - protein, 559 aa, Muscodor strobelii
  misc_feature: SGI Peptide ID NO. 559667
  misc_feature (20)..(342): NCBI GI: 256728687 Blast Desc: NECHADRAFT_85885 [Nectria haematococca mpVI 77-13-4]
  misc_feature (10)..(342): NCBI GI: 46109922 Blast Desc: FG01843.1 [Gibberella zeae PH-1]
  misc_feature (81)..(198): NCBI GI: 164425649 Blast Desc: NCU06072 [Neurospora crassa OR74A] gi|157071008|gb|EAA30599.2| [Neurospora crassa OR74A]
  misc_feature (117)..(342): NCBI GI: 261359811 Blast Desc: conserved [Verticillium albo-atrum VaMs.102]
  misc_feature (81)..(228): NCBI GI: 116197018 Blast Desc: CHGG_05107 [Chaetomium globosum CBS 148.51] gi|88181020|gb|EAQ88488.1| CHGG_05107 [Chaetomium globosum CBS 148.51]
  misc_feature (113)..(342): NCBI GI: 261360862 Blast Desc: conserved [Verticillium albo-atrum VaMs.102]
  misc_feature (78)..(184): NCBI GI: 256728689 Blast Desc: NECHADRAFT_96871 [Nectria haematococca mpVI 77-13-4]
  misc_feature (76)..(195): NCBI GI: 85092833 Blast Desc: NCU08174 [Neurospora crassa OR74A] gi|28921009|gb|EAA30331.1| [Neurospora crassa OR74A]
  misc_feature (9)..(214): NCBI GI: 156041192 Blast Desc: SS1G_11575 [Sclerotinia sclerotiorum 1980] gi|154695958|gb|EDN95696.1| SS1G_11575 [Sclerotinia sclerotiorum 1980]
  misc_feature (79)..(186): NCBI GI: 145603809 Blast Desc: [Magnaporthe grisea 70-15] gi|145011959|gb|EDJ96615.1| [Magnaporthe grisea 70-15]
MVVAHRMQRSPVPMSPPMVLTPPATLSPQSVVSPAAPSPEPIAVRSHSLEPVKPTPNQMQSVFSSQTGEAYRSQQHTSQVWETHKEEIRRLYLEENRPLKEVMAIMRQRGFRATVRMYKSRFDKWGFSKNNNKNEVVKMLQVQRQRNALGKRTTFHRNGREVAIDAYLKRKGISQYDLAEPGLAENLPQHLRCVTPPPEIPILIQTGGALSLQELLLQTARDLSWNSYCPPDVPLVTSAAIYRGDALRCAITDITNADWLFHVGHYERGGVMCEEGFKSLHLMVTKPSIYGLLHLLMFHLDAYNKGIVKEVWRYLAAYAATIRADGPLARLFQGIFKFINTHEFEEYWHLMFECTEKLLLLDEQNTGLPEGTVARLYPLVFIPRAHQYRKGPYSRLQSHCDWDRLSQGSKPRNPEEQAIFDASELLIIGSQSNWQSDRTFELAESVLEMSKKFAYNVDFFVYIAFTALARYYRSDFKAGDPISSPKHQLSVSYLEQAVKLSEGKWDPDMGYFMGDFELLEQWYHEAGDTLMADLTHTRWRASLEMIPKDWARNNKGVLR

SEQ ID NO: 310 - DNA, 5832 bp, Muscodor strobelii
  misc_feature: SGI EST ID NO. CUFF.751.0
  misc_feature: Variant of the nucleotide sequence at SEQ ID NO 308
tgacattgcatactatgtgaataaatccgacgaagtcaattgcactttttcataatcgcatctacactcagcctactttgcaggaacctttgagctcgcgatacactcaaattagccttgcgaccatgaattgtcgacgcccactgcggctactggccagcaagctaccagcaagacagactgtcagatgcttctcacaattcccatcgggtccctcccaaaccccgcagggagctattccattgccatacatcacagaagtaacctccggtggttggcggacatatgatatcttttcaaagctattacaagagcgcataatctgtctaaatggcggaatagacgacaccgtctccgcttccatagttgcccagctcctctggctcgagtccgacaatcccgagaaaccaatcaccatgtacatacactcgccgggaggctctgtgaccgcaggtctatctatctacgacaccatgagttacatccgatcaccagtatctaccgtttgtctgggccaggcagcgtccatggcctcattattgctcgctggcggtgagaagggcaaacgatttgccctgccacatagcagtattatgatacaccagccgctcggaggtacacaaggccaggcaagcgacatcctgatctacgcaacacaaatcgcgcggacacgggagcaagtcaacaagatatacaggaaacatctaaacgcggcatttgatcacgacaagtatgatcttaaagagatcgaggacatgatggagcgcgacaagtatcttaccgcagacgaggctaaagagctcggaatagtcgacgatattctgtcaaaaagagacgacaagaagttaaaagaaggcgatgcgaaagaggagccgcagagctaaaaagacgtctcaacgtctcgtccaatttgaggaataagccagctgtgataaaacggtccaaacatcaacattgaacgcaaacgccgacgaggcttgtgacaggtcctcactgcaccgtagcgcggtcacgcggtcacaccgtcgcactgcgaaatcctaatgcccagtgcgcagggacctgaagagaagaacactagcatactcgatggcgtagctttgcatcgagaacaacggcgttcgccattgccaagagcagtctcgaaacccaaatgcaagcttgaggctttctgtggggttttgggtaacgccacacccgtgcctgttacagtcttacaatttacgggatagagtgtttgcgtatttgtgtacctgtaattccctgattatattatcactatcctcgatctgcttcggaggtatgtatcgagcgtatcgccaagcatcgatggctgttaccgtccagttcatcatgtcatgccagggttgctattcggacgagggccctggaatgcatcgtactgatccgccgatctgacgagatgagcctcgtggcaacaggggaccctttggagagactacctatttttacctatcgcatgtaaatcaatgccgaacaaatgacaactcataagatcctagtagagatctatcccgcacctcctgcattctttaacgagccaaatggtgaacggctgaccgttgcgcatcgttcgtacctggcatagtccagctggcctgcgcagtcgtgatccaatctgggtaaccatgttcttttgtccggaccctggatctacggatatgtcagggcagcttgacatgtcaatagcactcctgagaagccgttgcccatacgatacactacatcgtaaactgccgtaagagttgaatggaacggcgggtggtggcaggcaaagtgggttaggtagttgcaaactgttaggccgacaggcttatgtattgttgccaacgcttattattggacttgtctctgttcagccctcgacactgatcgaccatgcagccatgtccggcggttcggttttagatctcctgttctgcagctagaaagatggacggcacgctcatacgttattattcggggctctccagtggcgtgcgctttattgcaacgacatattagctttgccacggaggcggataggcccaagttcaccctccaaagtcaaactgcagcctcctcctactatatctggacaagctgtgttctaggcacgatgtcatttgttgtacaaagtaggtgtggaacgaggctttattactaggggacacaaagtttgcctgctagagggcgccaatgcgatcctacacacctcgcaacgaggacctggcctatgctcaattggctaacagcacgtcttattccgcactccgatgcaatgttgacccgagcgtgagggaagggcaaaatagcaaaatgcatagacaatttgccagccggccggtggtcatgtgcagtgaatgcatcctatacataatcacaacgagaccgttctgcgcattcgggacctgccggccatcagctctggtcttccatcggattgtgcaagatcctgatcgccaagcctagcaatattgatgagagaaccccaccgccgaaagacgaagagtcgcgggtatcccatcctggcccagaaatcgacctagttagcaccattcccatttccctctgccccagaatccacgagaacccttcgattccccttcacgaatcacaagttcccggctgtcacaggcgagcccgtggtgcccctgtcatccccgatttccatcctggaaactggtacagattcactagatttacttggatttaccttacatttagcttacctaatctaatccccgtcccatctactgttacatacaccagtaacctcctgcacctccgaaaggggacctttcctcgtattccttcgcacggcatccttcacgtcggcactgcattgcacactcttgatctcttgaatattgtagatagttttgtaaaatcaccattgcttttgtgtcgctttacccaacactgaaccgcggcattccgcgcgccgcttactaggaaatcagagtcatggtgatcagtgcgggaagcgagctggaacgccaaagagtcgccgccatgagcgaatatacctttgttaccaatcattatcatgggccgggcacaactccgagcccgaccatggtcgtcgctcatagaatgcagcgcagtcctgtgccaatgtcaccaccgatggtcctcacgccgcctgcgactctgtcgccgcagtctgtcgtgtcgccagccgccccatcgcctgaacccatcgctgtccggagtcacagtctcgagcccgtcaaacccacgcccaaccagatgcaatccgtattctcatcgcaaaccggcgaagcatatcgctctcagcaacatacgtcccaggtatgggagacgcacaaagaagagattcgtaggttgtacctcgaagaaaaccgaccgctaaaagaagtcatggctatcatgcgccaaagggggttcagagctaccgtaaggatgtataagtcacggttcgacaaatggggcttcagcaagaataacaataagaatgaagtggtcaagatgcttcaggttcaacgccagcgaaacgccctcgggaagcgcacgactttccaccggaatggtcgcgaggtcgccatagatgcctatctaaagcgtaaaggcatatctcaatatgacctcgcagaaccaggcttggccgagaacctaccacaacatttacgatgtgttacgccaccaccagagattcctattctaatacagacaggaggggctttatcgctgcaagaacttctgttgcaaacggcgcgagatctgtcatggaactcttactgccctcctgatgtcccccttgttacttctgctgctatctaccgtggcgatgcattacgttgtgcgatcacagacatcactaacgcagactggttgttccatgttgggcactacgagcgaggtggcgtgatgtgcgaggaaggattcaaatctctacatttgatggttacgaaaccgtcaatatacgggttgctccaccttttgatgttccatctcgatgcgtacaacaaaggcattgttaaggaagtttggaggtatctggctgcctatgccgcgacgattcgggcggacggcccattggcaaggctattccaaggcatcttcaagttcatcaatactcatgaattcgaagaatactggcatttaatgttcgaatgcacagagaagcttctcttgcttgacgagcagaatacaggtctaccagagggcacggtcgcccgtctctatccgctggttttcattccacgggctcatcagtacaggaagggaccgtattctcgtctacagagccattgcgactgggatcgtttaagccagggaagtaagccgcggaatccagaggaacaggccattttcgatgccagcgagcttctaatcatcggctcacagagcaattggcaaagcgataggacatttgagctcgctgagtctgtcctcgaaatgtcgaagaaatttgcatacaacgtcgacttctttgtttacattgcgtttactgcgcttgcacgctattatcggtcagatttcaaggcaggtgacccaatcagcagcccaaagcaccagctctctgtatcgtacctggaacaggccgtcaagctgtcagaaggcaagtgggatcccgacatgggttatttcatgggcgacttcgaactgctagagcagtggtaccacgaggcaggcgacacattgatggctgatcttacccatacaagatggagagcctcactcgaaatgataccgaaagattgggcaagaaacaacaagggggttctacgctgaagaatctcaggttcatctctagccccaactaattcccagctaccgtaaacccatacgatcatcttccaactcggtatatgtcacgctatcgaaagaacttagcgcgcgtgtagatacatacgacgtctcgcaaatccaacgtatcgcgcctcgcagatttgcaacaacagccttgtagcaatcctcagtctaatgtaggcatcgccgcaccatcaagccgcgccgaaagaatgaagaaacgtttgacacctacagccccctacagtacgacaacgctatagcattgtgcacagactggcgcacaaaatttgcgcattggatcggtcgcttgcaataccacagctagcgtgtacataaggtcaggtgctggacttggtgccgtgcaatgggctgcacagatagcacccacaccgaccggctctagaatgtcaaaatagctacgcattgcataccgtgatttcggtagagaacagctcacgcagcgacgctttttaaggcatgagcaggtatcctggcctggctcagtaggatgctacaaatccaaccaacagatacgttttgaagaagacaagggggttgtatagtacagaaaccatgttcatgcattttgtcgcgatgttgtattgtcatagcactattgcattataccattgtaccttagcgagcaagacatcatttacagtacataagtagtcttgaaatatcaaaaaagcaaaagttccaattcatacttatcatctctcgctgtcaccgagtgaacgatcatgtttgatcggcgattcgacccagtgtcgttgaataaccatgcagagcttgcccagaccgttccaagaacgcgaccctaatacctgcaatcacctgaatagagcccggccggcagtcgtttgggccaatgattgcttttggtggctggctgttgggtttcagggtatcgcatattgggtagctccaataacaaatgccagctgggttgatgcgctgcaacatataatttggggtctatagggatacggacggtcggtaattcgcttaacaggtcctatcctgactcgcctggcttccctgctgtagctg

SEQ ID NO: 311 - DNA, 759 bp, Muscodor strobelii
  misc_feature: SGI cDNA ID NO. 559668
  misc_feature: Encodes the peptide sequence at SEQ ID NO 312
atgaattgtcgacgcccactgcggctactggccagcaagctaccagcaagacagactgtcagatgcttctcacaattcccatcgggtccctcccaaaccccgcagggagctattccattgccatacatcacagaagtaacctccggtggttggcggacatatgatatcttttcaaagctattacaagagcgcataatctgtctaaatggcggaatagacgacaccgtctccgcttccatagttgcccagctcctctggctcgagtccgacaatcccgagaaaccaatcaccatgtacatacactcgccgggaggctctgtgaccgcaggtctatctatctacgacaccatgagttacatccgatcaccagtatctaccgtttgtctgggccaggcagcgtccatggcctcattattgctcgctggcggtgagaagggcaaacgatttgccctgccacatagcagtattatgatacaccagccgctcggaggtacacaaggccaggcaagcgacatcctgatctacgcaacacaaatcgcgcggacacgggagcaagtcaacaagatatacaggaaacatctaaacgcggcatttgatcacgacaagtatgatcttaaagagatcgaggacatgatggagcgcgacaagtatcttaccgcagacgaggctaaagagctcggaatagtcgacgatattctgtcaaaaagagacgacaagaagttaaaagaaggcgatgcgaaagaggagccgcagagctaa

SEQ ID NO: 312 - protein, 252 aa, Muscodor strobelii
  misc_feature: SGI Peptide ID NO. 559668
  misc_feature (48)..(236): Pfam Id: PF00574 Pfam Desc: Clp protease
  misc_feature (48)..(193): Pfam Id: PF00574 Pfam Desc: Clp protease
  misc_feature (204)..(236): Pfam Id: PF00574 Pfam Desc: Clp protease
  misc_feature (1)..(248): NCBI GI: 171692433 Blast Desc: protein product [Podospora anserina] gi|170946165|emb|CAP72966.1| protein product [Podospora anserina]
  misc_feature (39)..(248): NCBI GI: 261360843 Blast Desc: ATP-dependent Clp protease proteolytic subunit [Verticillium albo-atrum VaMs.102]
  misc_feature (21)..(238): NCBI GI: 39977745 Blast Desc: MGG_06757 [Magnaporthe grisea 70-15] gi|145013724|gb|EDJ98365.1| MGG_06757 [Magnaporthe grisea 70-15]
  misc_feature (1)..(252): NCBI GI: 255944899 Blast Desc: Pc20g06920 [Penicillium chrysogenum Wisconsin 54-1255] gi|211587952|emb|CAP86021.1| Pc20g06920 [Penicillium chrysogenum Wisconsin 54-1255]
  misc_feature (1)..(246): NCBI GI: 145233903 Blast Desc: An02g11960 [Aspergillus niger] gi|134057262|emb|CAK96425.1| protein product [Aspergillus niger]
  misc_feature (1)..(250): NCBI GI: 238484703 Blast Desc: ATP-dependent Clp protease, proteolytic subunit ClpP [Aspergillus flavus NRRL3357] gi|220701640|gb|EED57978.1| ATP-dependent Clp protease, proteolytic subunit ClpP [Aspergillus
  misc_feature (34)..(251): NCBI GI: 242822497 Blast Desc: ATP-dependent Clp protease, proteolytic subunit ClpP [Talaromyces stipitatus ATCC 10500] gi|218712819|gb|EED12244.1| ATP-dependent Clp protease, proteolytic subunit ClpP [Talaromyces
  misc_feature (34)..(236): NCBI GI: 121705182 Blast Desc: Clp protease, [Aspergillus clavatus NRRL 1] gi|119399000|gb|EAW09428.1| Clp protease, [Aspergillus clavatus NRRL 1]
  misc_feature (20)..(247): NCBI GI: 212546731 Blast Desc: ATP-dependent Clp protease, proteolytic subunit ClpP [Penicillium marneffei ATCC 18224] gi|210065039|gb|EEA19134.1| ATP-dependent Clp protease, proteolytic subunit ClpP [Penicillium
  misc_feature (1)..(240): NCBI GI: 119177332 Blast Desc: ATP-dependent Clp protease proteolytic subunit [Coccidioides immitis RS]
  misc_feature (40)..(242): SWISSPROT Homolog: EC 3.4.21.92 Endopeptidase Clp
MNCRRPLRLLASKLPARQTVRCFSQFPSGPSQTPQGAIPLPYITEVTSGGWRTYDIFSKLLQERIICLNGGIDDTVSASIVAQLLWLESDNPEKPITMYIHSPGGSVTAGLSIYDTMSYIRSPVSTVCLGQAASMASLLLAGGEKGKRFALPHSSIMIHQPLGGTQGQASDILIYATQIARTREQVNKIYRKHLNAAFDHDKYDLKEIEDMMERDKYLTADEAKELGIVDDILSKRDDKKLKEGDAKEEPQS

SEQ ID NO: 313 - DNA, 5832 bp, Muscodor strobelii; identical to SEQ ID NO: 310
  misc_feature: SGI EST ID NO. CUFF.751.0
  misc_feature: Variant of the nucleotide sequence at SEQ ID NO 311

SEQ ID NO: 314 - DNA, 1380 bp, Muscodor strobelii
  misc_feature: SGI cDNA ID NO. 559669
  misc_feature: Encodes the peptide sequence at SEQ ID NO 315
atgatatcatgcactgcgctgcgacatagcagcgcccgaaacggctttgcgcccggcatctggaaacaagccactcgctctatccagacgaaaccacggcggcgcaataatgcggctcctcagctatctgaagagcccgtccgcgacgagagcttcagcatcgactcggaatccaaatctgtagctactgctgtcggtgatctcccattgtcccctctgatggacccttcctattgggaagccactgagaagcacaaaagacccaaaccaaaagcccgtactagcggaaaatctataaactcggtatcacgccagttccgagtcaacccctacgcgctggcgcttgccactcctattcgatacaactcggccacccgtcttccgcttcccaactactttctgcaggacttcaatctcattaacaacccggagactaacactccgtggtgggtgccatacagtctcgcccgaggtcagacgataggcagtgaagttgacacttctgacgccgagctcgatagaatcgaggaagccattcttgccgatgagcaagccgaaatcgaagcggatataggacctacagaggttagccccgaagctggacaaccaggcaccgccaaagaagcgagctcgagagacgaagaagtagacactcatgcaggcgttcctattgctggagaagtgaatacttcaacggacaagaccgataaggtacaacccggtcagccgcatcccgggcagataaggggcccgaaggcatacgttctatctcgtgaagcgctcgtttctgccattggcaagaataattcaggatatggtcaactacagtccaatcttttcggccctggggatagcccctttaagaaatatagttcgagagcaatctggcgcgaggacatgaacgaatttatcatctctcacatgcgccacgccatcgccgaagaccttgcctacctttcgaagctctgcatagaacaggaaagatattacattgtcaaatgcttcggctggaacgatgtgaaattcaaacgcaaaggcgcgttaatatggtttggggatattggacctgaagatagccccaagggcgccggggccccgccagggcaatttgcttcgcatgttatggataccgatcctcctactacagtcgcggtgcataacatgccctttctcctgggcgatgacctggcgaagaaagtccaagatgagtctgctgtgctcaaacagggtaatctgttcatgttgaacggtcgtcgtacaaatgatcttctattgagattatggaaactacagggttatctgtcgccgaaggggttcaacgatgtgattactccgtaccgtaacccgacgaagaatccacgttatatagcttccttttag

SEQ ID NO: 315 - protein, 459 aa, Muscodor strobelii
  misc_feature: SGI Peptide ID NO. 559669
  misc_feature (54)..(407): NCBI GI: 145605990 Blast Desc: MGG_06758 [Magnaporthe grisea 70-15] gi|145013723|gb|EDJ98364.1| MGG_06758 [Magnaporthe grisea 70-15]
  misc_feature (196)..(435): NCBI GI: 116198399 Blast Desc: CHGG_07355 [Chaetomium globosum CBS 148.51] gi|88178634|gb|EAQ86102.1| CHGG_07355 [Chaetomium globosum CBS 148.51]
  misc_feature (53)..(423): NCBI GI: 46110351 Blast Desc: FG02057.1 [Gibberella zeae PH-1]
  misc_feature (50)..(155): NCBI GI: 171692435 Blast Desc: protein product [Podospora anserina] gi|170946166|emb|CAP72967.1| protein product [Podospora anserina]
  misc_feature (250)..(438): NCBI GI: 154316087 Blast Desc: BC1G_03628 [Botryotinia fuckeliana B05.10] gi|150846415|gb|EDN21608.1| BC1G_03628 [Botryotinia fuckeliana B05.10]
  misc_feature (250)..(447): NCBI GI: 156037440 Blast Desc: SS1G_12433 [Sclerotinia sclerotiorum 1980] gi|154697842|gb|EDN97580.1| SS1G_12433 [Sclerotinia sclerotiorum 1980]
  misc_feature (74)..(156): NCBI GI: 154316087 Blast Desc: BC1G_03628 [Botryotinia fuckeliana B05.10] gi|150846415|gb|EDN21608.1| BC1G_03628 [Botryotinia fuckeliana B05.10]
  misc_feature (243)..(435): NCBI GI: 171692435 Blast Desc: protein product [Podospora anserina] gi|170946166|emb|CAP72967.1| protein product [Podospora anserina]
  misc_feature (52)..(155): NCBI GI: 164425366 Blast Desc: NCU04577 [Neurospora crassa OR74A] gi|28950017|emb|CAD70772.1| [Neurospora crassa] gi|157070898|gb|EAA29042.2| [Neurospora crassa OR74A]
  misc_feature (74)..(152): NCBI GI: 156037440 Blast Desc: SS1G_12433 [Sclerotinia sclerotiorum 1980] gi|154697842|gb|EDN97580.1| SS1G_12433 [Sclerotinia sclerotiorum 1980]
MISCTALRHSSARNGFAPGIWKQATRSIQTKPRRRNNAAPQLSEEPVRDESFSIDSESKSVATAVGDLPLSPLMDPSYWEATEKHKRPKPKARTSGKSINSVSRQFRVNPYALALATPIRYNSATRLPLPNYFLQDFNLINNPETNTPWWVPYSLARGQTIGSEVDTSDAELDRIEEAILADEQAEIEADIGPTEVSPEAGQPGTAKEASSRDEEVDTHAGVPIAGEVNTSTDKTDKVQPGQPHPGQIRGPKAYVLSREALVSAIGKNNSGYGQLQSNLFGPGDSPFKKYSSRAIWREDMNEFIISHMRHAIAEDLAYLSKLCIEQERYYIVKCFGWNDVKFKRKGALIWFGDIGPEDSPKGAGAPPGQFASHVMDTDPPTTVAVHNMPFLLGDDLAKKVQDESAVLKQGNLFMLNGRRTNDLLLRLWKLQGYLSPKGFNDVITPYRNPTKNPRYIASF

SEQ ID NO: 316 - DNA, 1643 bp, Muscodor strobelii
  misc_feature: SGI EST ID NO. CUFF.759.0
  misc_feature: Variant of the nucleotide sequence at SEQ ID NO 314
gcgaaatttcaattgttcatgttccattgcgcggtgcatactgtgcatcgtcctgttttatcgcattggtattgacagcccggatatgtcaaagtaacaacaacaaccaaatgaggttatgatatcatgcactgcgctgcgacatagcagcgcccgaaacggctttgcgcccggcatctggaaacaagccactcgctctatccagacgaaaccacggcggcgcaataatgcggctcctcagctatctgaagagcccgtccgcgacgagagcttcagcatcgactcggaatccaaatctgtagctactgctgtcggtgatctcccattgtcccctctgatggacccttcctattgggaagccactgagaagcacaaaagacccaaaccaaaagcccgtactagcggaaaatctataaactcggtatcacgccagttccgagtcaacccctacgcgctggcgcttgccactcctattcgatacaactcggccacccgtcttccgcttcccaactactttctgcaggacttcaatctcattaacaacccggagactaacactccgtggtgggtgccatacagtctcgcccgaggtcagacgataggcagtgaagttgacacttctgacgccgagctcgatagaatcgaggaagccattcttgccgatgagcaagccgaaatcgaagcggatataggacctacagaggttagccccgaagctggacaaccaggcaccgccaaagaagcgagctcgagagacgaagaagtagacactcatgcaggcgttcctattgctggagaagtgaatacttcaacggacaagaccgataaggtacaacccggtcagccgcatcccgggcagataaggggcccgaaggcatacgttctatctcgtgaagcgctcgtttctgccattggcaagaataattcaggatatggtcaactacagtccaatcttttcggccctggggatagcccctttaagaaatatagttcgagagcaatctggcgcgaggacatgaacgaatttatcatctctcacatgcgccacgccatcgccgaagaccttgcctacctttcgaagctctgcatagaacaggaaagatattacattgtcaaatgcttcggctggaacgatgtgaaattcaaacgcaaaggcgcgttaatatggtttggggatattggacctgaagatagccccaagggcgccggggccccgccagggcaatttgcttcgcatgttatggataccgatcctcctactacagtcgcggtgcataacatgccctttctcctgggcgatgacctggcgaagaaagtccaagatgagtctgctgtgctcaaacagggtaatctgttcatgttgaacggtcgtcgtacaaatgatcttctattgagattatggaaactacagggttatctgtcgccgaaggggttcaacgatgtgattactccgtaccgtaacccgacgaagaatccacgttatatagcttccttttagccactcatatacggttgctgaatgatattagcggagcttggcaatttatgagatggctactgtaacaacccgtgtactttatagatcttagctatccctaccatcatagctaaaccttcaatcaacacattgacacactccgtaa

SEQ ID NO: 317 - DNA, 2103 bp, Muscodor strobelii
  misc_feature: SGI cDNA ID NO. 559670
  misc_feature: Reduced expression when VOC is produced
  misc_feature: Encodes the peptide sequence at SEQ ID NO 318
atgtctgagacctttgagttccaggctgagatctctcagctgctctcgctcatcatcaacactgtctactccaacaaggagatcttcttgcgagaactcgtctccaacgcctccgatgccttggacaagatcagatatgaggctctctccgaccccagcaagctcgatgccgagaaggatctccgcatcgacatcatccccgacaaggagaacaagaccctgaccatcaaggataccggtatcggtatgaccaaggctgatctcgtcaacaacctcggaacgatcgcccgctctggtaccaagcagttcatggaggccctgactgccggtgctgatgtctccatgattggccagttcggtgtcggtttctactccgcctaccttgttgccgacaaggtcaccgtcatctccaagcacaacgatgacgagcagtacatctgggagtctgctgccggtggtaccttcagcgtccgccccgacaccgagggtgagcccctcaagcgtggttccaagttcatcctccacctcaaggatgagcagtccgactacctgaacgagagcaagatcaaggaggtcatcaagaagcactctgagttcatctcgtaccccatctacctccacgtcaccaaggagaccgagaaggaggtccctgatgaggatgctgctgaggtcgaagaggttgaggacgacgagaagaagcccaaggttgaggaagtcgatgatgacgaagaggagaagaagcccaagaccaagaaggtcaaggagacctccatcgaggaggaggagctcaacaagcagaagcccatctggactcgcaacccccaggatatcactcaggaggagtatgctgccttctacaagtccctctccaacgactgggaggaccatctcggtgtcaagcacttctccgttgagggtcagcttgagttccgtgccatcctgttcgttcccaagcgtgctcctttcgatctcttcgagaccaagaagaccaagaacaacatcaagctctacgtccgccgtgtcttcatcactgatgacgctactgagctcattcctgagtggctcagcttcatcaagggtgttgtcgactctgaggatctccccttgaacttgtctcgtgagactctccagcagaacaagatcatgaaggtcatcaagaagaacatcgtcaagaaggctctcgagctcttcaacgagattgctgaggacaaggagcagttcgacaagttctacagtgccttctccaagaaccttaagcttggtatccacgaggattcccagaaccgccaaactcttgccaagctcctccgcttcagctctaccaagtctggagatgagcagacctcgctcaccgactacgtcacccgcatggctgagcaccagaagaacatttactacatcactggcgagtccctcaaggctgtccagaagtctcccttcttggatgccctcaaggagaagaacttcgaggttctattcctcgttgaccccattgatgagtacgccatgactcagctgaaggagtttgagaacaagaagcttgttgatatcaccaaggacttcgatctcgaggagactgatgaggagaagaaggcccgtgaggctgaggagaaggagtacgaggagcttgccaaggctctcaagaacgttctcggtgacaaggttgagaaggtcgttgtctcccacaagctggtcggctccccttgcgccatccgtactggccagttcggttggtctgctaacatggagcgtatcatgaaggctcaggctcttcgtgatacctccatgagctcttacatgagctccaagaagactttcgagatctcgcccaagtctgccattatccaggagctcaagaggaaggttgaggctgatggtgagaacgacaagactgtcaagtcgattgtccaacttctgttcgagacctctctgctcgtctccggcttcactattgatgagcctgccggcttcgctgagcgtatccacaagctcgtctccctcggcttgaacctcgaggaggaggctgaggtcgaggaggttcctgccacctctgagactgctgccgccgagaccggcgacagcgccatggaggaggtcgactaa

SEQ ID NO: 318 - protein, 700 aa, Muscodor strobelii
  misc_feature: SGI Peptide ID NO. 559670
  misc_feature (25)..(179): Pfam Id: PF02518 Pfam Desc: Histidine kinase-, DNA gyrase B-, and HSP90-like ATPase
  misc_feature (182)..(700): Pfam Id: PF00183 Pfam Desc: Hsp90 protein
  misc_feature (2)..(700): NCBI GI: 6325016 Blast Desc: Hsp82p [Saccharomyces cerevisiae] gi|123677|sp|P02829.1|HSP82_YEAST RecName: Full=ATP-dependent molecular chaperone HSP82; AltName: Full=Heat shock protein Hsp90
  misc_feature (3)..(700): NCBI GI: 146413489 Blast Desc: PGUG_04670 [Pichia guilliermondii ATCC 6260] gi|146392414|gb|EDK40572.1| PGUG_04670 [Pichia guilliermondii ATCC 6260]
  misc_feature (2)..(700): NCBI GI: 259149917 Blast Desc: Hsp82p [Saccharomyces cerevisiae EC1118]
  misc_feature (2)..(700): NCBI GI: 19115277 Blast Desc: heat shock protein Hsp90 [Schizosaccharomyces pombe] gi|19859479|sp|P41887.2|HSP90_SCHPO RecName: Full=Heat shock protein 90 homolog gi|5824203|emb|CAB54152.1| Hsp90 chaperone
  misc_feature (3)..(700): NCBI GI: 164660058 Blast Desc: MGL_1335 [Malassezia globosa CBS 7966] gi|159105052|gb|EDP43938.1| MGL_1335 [Malassezia globosa CBS 7966]
  misc_feature (1)..(700): NCBI GI: 238843296 Blast Desc: ATP-dependent molecular chaperone HSC82 [Microsporum canis CBS 113480]
  misc_feature (1)..(700): NCBI GI: 194716766 Blast Desc: heat shock protein 90 [Humicola fuscoatra]
  misc_feature (1)..(700): NCBI GI: 256728549 Blast Desc: [Nectria haematococca mpVI 77-13-4]
  misc_feature (1)..(700): NCBI GI: 171692405 Blast Desc: protein product [Podospora anserina] gi|6016265|sp|O43109.1|HSP90_PODAN RecName: Full=Heat shock protein 90 homolog; AltName: Full=Suppressor of vegetative MOD-E
  misc_feature (1)..(700): NCBI GI: 145605988 Blast Desc: MGG_06759 [Magnaporthe grisea 70-15] gi|145013722|gb|EDJ98363.1| MGG_06759 [Magnaporthe grisea 70-15]
  misc_feature: Useful for introducing or modulating the production of volatile compounds
MSETFEFQAEISQLLSLIINTVYSNKEIFLRELVSNASDALDKIRYEALSDPSKLDAEKDLRIDIIPDKENKTLTIKDTGIGMTKADLVNNLGTIARSGTKQFMEALTAGADVSMIGQFGVGFYSAYLVADKVTVISKHNDDEQYIWESAAGGTFSVRPDTEGEPLKRGSKFILHLKDEQSDYLNESKIKEVIKKHSEFISYPIYLHVTKETEKEVPDEDAAEVEEVEDDEKKPKVEEVDDDEEEKKPKTKKVKETSIEEEELNKQKPIWTRNPQDITQEEYAAFYKSLSNDWEDHLGVKHFSVEGQLEFRAILFVPKRAPFDLFETKKTKNNIKLYVRRVFITDDATELIPEWLSFIKGVVDSEDLPLNLSRETLQQNKIMKVIKKNIVKKALELFNEIAEDKEQFDKFYSAFSKNLKLGIHEDSQNRQTLAKLLRFSSTKSGDEQTSLTDYVTRMAEHQKNIYYITGESLKAVQKSPFLDALKEKNFEVLFLVDPIDEYAMTQLKEFENKKLVDITKDFDLEETDEEKKAREAEEKEYEELAKALKNVLGDKVEKVVVSHKLVGSPCAIRTGQFGWSANMERIMKAQALRDTSMSSYMSSKKTFEISPKSAIIQELKRKVEADGENDKTVKSIVQLLFETSLLVSGFTIDEPAGFAERIHKLVSLGLNLEEEAEVEEVPATSETAAAETGDSAMEEVD

SEQ ID NO: 319 - DNA, 2935 bp, Muscodor strobelii
  misc_feature: SGI EST ID NO. CUFF.2051.1
  misc_feature: Variant of the nucleotide sequence at SEQ ID NO 317
atatttttctgccctctcctcccatcttcctctcgtcaaactcatctctcttcattcctctcacatcttctctttcgttcactgcaagagcgaagagcccatccgtttgatacccagaaccccagctcttaactcccttcacacatccgaccttcccccacttcccacgtacacacagtcaagatgtctgagacctttgagttccaggctgagatctctcagctgctctcgctcatcatcaacactgtctactccaacaaggagatcttcttgcgagaactcgtctccaacgcctccgatgccttggacaagatcagatatgaggctctctccgaccccagcaagctcgatgccgagaaggatctccgcatcgacatcatccccgacaaggagaacaagaccctgaccatcaaggataccggtatcggtatgaccaaggctgatctcgtcaacaacctcggaacgatcgcccgctctggtaccaagcagttcatggaggccctgactgccggtgctgatgtctccatgattggccagttcggtgtcggtttctactccgcctaccttgttgccgacaaggtcaccgtcatctccaagcacaacgatgacgagcagtacatctgggagtctgctgccggtggtaccttcagcgtccgccccgacaccgagggtgagcccctcaagcgtggttccaagttcatcctccacctcaaggatgagcagtccgactacctgaacgagagcaagatcaaggaggtcatcaagaagcactctgagttcatctcgtaccccatctacctccacgtcaccaaggagaccgagaaggaggtccctgatgaggatgctgctgaggtcgaagaggttgaggacgacgagaagaagcccaaggttgaggaagtcgatgatgacgaagaggagaagaagcccaagaccaagaaggtcaaggagacctccatcgaggaggaggagctcaacaagcagaagcccatctggactcgcaacccccaggatatcactcaggaggagtatgctgccttctacaagtccctctccaacgactgggaggaccatctcggtgtcaagcacttctccgttgagggtcagcttgagttccgtgccatcctgttcgttcccaagcgtgctcctttcgatctcttcgagaccaagaagaccaagaacaacatcaagctctacgtccgccgtgtcttcatcactgatgacgctactgagctcattcctgagtggctcagcttcatcaagggtgttgtcgactctgaggatctccccttgaacttgtctcgtgagactctccagcagaacaagatcatgaaggtcatcaagaagaacatcgtcaagaaggctctcgagctcttcaacgagattgctgaggacaaggagcagttcgacaagttctacagtgccttctccaagaaccttaagcttggtatccacgaggattcccagaaccgccaaactcttgccaagctcctccgcttcagctctaccaagtctggagatgagcagacctcgctcaccgactacgtcacccgcatggctgagcaccagaagaacatttactacatcactggcgagtccctcaaggctgtccagaagtctcccttcttggatgccctcaaggagaagaacttcgaggttctattcctcgttgaccccattgatgagtacgccatgactcagctgaaggagtttgagaacaagaagcttgttgatatcaccaaggacttcgatctcgaggagactgatgaggagaagaaggcccgtgaggctgaggagaaggagtacgaggagcttgccaaggctctcaagaacgttctcggtgacaaggttgagaaggtcgttgtctcccacaagctggtcggctccccttgcgccatccgtactggccagttcggttggtctgctaacatggagcgtatcatgaaggctcaggctcttcgtgatacctccatgagctcttacatgagctccaagaagactttcgagatctcgcccaagtctgccattatccaggagctcaagaggaaggttgaggctgatggtgagaacgacaagactgtcaagtcgattgtccaacttctgttcgagacctctctgctcgtctccggcttcactattgatgagcctgccggcttcgctgagcgtatccacaagctcgtctccctcggcttgaacctcgaggaggaggctgaggtcgaggaggttcctgccacctctgagactgctgccgccgagaccggcgacagcgccatggaggaggtcgactaagcgcctcagggtaccaatcgggaacgggaatgactaaaaagcacattggagtttggatgggatcgggctaaaggtgttgctgtttctagcacttcgcgtcgtttaatccttcatacccgcatgtaacgggcagctccaggctattcagcttggtactaggtctgcctggtacagcatatgtactctaccataatgccttcatgagatacaggacggaatcaccatccgtagacgaatacaaaaaagaagttaaattaagcattgctctctgatcgtgactttcgcagatactaatggctcaataaaatcttaacaatttccattgatggtagattcaaatacatgttgtgctgatatgtcgtgtaatgatccatgactgccccaaatggtcaggaacgcatctaccgttcactagtagtgataagccattacagctgcttgtttcaatacactccgagcttgagatttacgcgtctgagttcaaggaactggtgcggtgtactccttgtctaggcatctctattctcgccgcatgcgattgctatattgtggcatgagttactaagccttgcagattgcgttccatcctccgactagtgtctcgttaccgcttacgaaagatgagggatcgagtctagttggttgaacg

SEQ ID NO: 320 - DNA, 2922 bp, Muscodor strobelii
  misc_feature: SGI cDNA ID NO. 559671
  misc_feature: Encodes the peptide sequence at SEQ ID NO 321
atgggtctgtcgaatcccgtcgccttccggcccttcgccgtgtctttctggaccaccgtcacttatctcgctctcctcatcccgctcattattattcacgagaccgtgccctcacctcctggtagcccgaccttatactacggcctgaatctgaccaaagcatggatcgatctgactacactgtcgcggtcctaccatcccttcaacagccgaaagaatgacgaaatccacaattggcttctgctcgagctgaacgagatcaaggagcggaactgggcaggcaacgactcgggcatggtcgtcttggaggatgttgcgtcgaatatcaccacttcggactccatctggggcggcaacggcaagaccggcagctactttgagggcaagaatatcattgtctacatccgaggagatgatgatcctgcagggccgtggtgggaagatggccgttaccattctgaccgagtcatcggcagaggcggtgtgctgctgaacgcgcactatgactctgtctcgactggctatggtgcaaccgatgatggcatgggcgttatcaccacaatggctttagtcgattacttctctcgtcccgaaaatcgaccagagagaggcatcgttgccttgcttaacaacaacgaggaagactttctatggggcgcacaagcatttggaaacagtcccttcatgccgttttgtcacacctttctcaatctcgaaggcgccggagctggtggccgcgctacgctcttccggacaaccgacgccgaggtaacagctgcttacaaaggcagtccgaatccgttcggcagcgtagtgtcatccgatgccttcggtaccggagcgattcggagcaacactgattacatcgtcttcaatggcgtgtatggtatgagaggtctcgatctcgccttctatcgcccccgtgccaggtatcatacaaaccaggatgatgcgaaacatacttcgagggctagtctgtggcatatgcttagtaactctcttcatacgatggaatatttgtcaggtaacaccggacagaagttcattggaaatcgtggagatggtgaccgttccaaggtcttcaatggcaacggaaactccggcgtatggttcgatctgttcggaaagtctctcgctctattcgagctgcgaacattctttgcttggtcccttacactacttatcgcctcaccactgatattgatagccatcacctatgtcctaatacaccaagggaagtattatttcttctcttcaaagttttctccttatgaaggagcagagctcgaacccgtccagcttggtgggcgaaaaggaatgtgcagattcccctttgctctaatcattgctggagtattggtagtaggggctgcttaccttgtaacaaaggttaatccgctcatcatctatagcagtgaatacgcagtatgggccatgatgatctcgttgttctacttcgtcttttggacgatcatggcaggagccaatttcgccagaccgagtgccctacaccggggctattcgatcttctggctctttactatcggatgggtcattcttgtcattaacactgtatttgaggatcgcttccggattgcttctggctatagcttcgtgtttttcgaagctgctgcctttcttgcatccttgatctcacttctcgacttgttaggggtaccgtccaaggaaaagtttgcccaacatgttcacggagcacacgatgaagtggatcatggggcagaacatatggcttctcaccaacaagaagcacaccagactaatgggtctggcgatgctgcagacgacggtggcgatgaagagggcgaggcaccagctgcatcagaaacgacacctttgattggcgatacctccttcgggcaagcttacagaagagcattatccagctcagacacgaaatcagtagaccaaaagggtcagccttatggatacgaacagttatggtcaggcaagttcacgagttggacttggatcatacaatttttacttcttggtccgttcttaatcgtcttgacagctcaaaatggtttgcttttaggctctgcagtatcacagacgggatcagatggaggaagcttactgctaccgtatttgatcacggcattttccagcatcatgttgctcctacctgtcacacctttcattcaccgcatcacacatcacgtccccctctttttcctggttgttttcatcgccacgttgatctacaatctggccgctttccccttctctgtagacaaccgatacaaggtctacttccagcagacagtagatctcgatactggctcgacaaaagtccattatgttgggttagaggaatacgtgaagatgacaattgacgacattccatctgctatgggcaaagaagtcacatgtgatcttaggacgagctcacgaagtggtctgtacgattgctcgtacaatggtgttgatattcctcccaatgtcgtgagagctaaccccatcggagtcccgcctgagatggggtatgctacatggctgacgtacaatattacgcgtgacgaaggcgcgactaaggcgcgatttgaaattgatggcaaggagacgagatcatgtgccatcacgtttgagaaaccgatctcggggtttaaagtcagaggcggtacttccccggatgcgagatttggtgttcttccggataagggcttggaaaaggttaaactctatcgacgagattgggtcacgccttgggttgttgatgttgagtgggaaaagggagatgatgatggcattgatggcagggtcgtttgtagttgggatgatgttaatacggccggtacacttcccgcgtacgatgaggggttgcaatactctccggcttgggttgggctcacgaagttgtcgaccgggttgtgtgagggtagcaaagcttttaaggcgtga

SEQ ID NO: 321 - protein, 973 aa, Muscodor strobelii
  misc_feature: SGI Peptide ID NO. 559671
  misc_feature (160)..(327): Pfam Id: PF04389 Pfam Desc: Peptidase family M28
  misc_feature (1)..(969): NCBI GI: 156037764 Blast Desc: SS1G_12596 [Sclerotinia sclerotiorum 1980] gi|154698004|gb|EDN97742.1| SS1G_12596 [Sclerotinia sclerotiorum 1980]
  misc_feature (3)..(971): NCBI GI: 171692421 Blast Desc: protein product [Podospora anserina] gi|170946159|emb|CAP72960.1| protein product [Podospora anserina]
  misc_feature (1)..(969): NCBI GI: 154304296 Blast Desc: BC1G_08418 [Botryotinia fuckeliana B05.10] gi|150854220|gb|EDN29412.1| BC1G_08418 [Botryotinia fuckeliana B05.10]
  misc_feature (3)..(972): NCBI GI: 164426532 Blast Desc: NCU04133 [Neurospora crassa OR74A] gi|157071373|gb|EAA32053.2| [Neurospora crassa OR74A]
  misc_feature (3)..(972): NCBI GI: 16944418 Blast Desc: conserved [Neurospora crassa]
  misc_feature (1)..(972): NCBI GI: 256728766 Blast Desc: [Nectria haematococca mpVI 77-13-4]
  misc_feature (1)..(972): NCBI GI: 46110395 Blast Desc: FG02079.1 [Gibberella zeae PH-1]
  misc_feature (3)..(972): NCBI GI: 145605996 Blast Desc: MGG_06752 [Magnaporthe grisea 70-15] gi|145013728|gb|EDJ98369.1| MGG_06752 [Magnaporthe grisea 70-15]
  misc_feature (1)..(971): NCBI GI: 261360876 Blast Desc: peptidase family M28 family [Verticillium albo-atrum VaMs.102]
  misc_feature (3)..(972): NCBI GI: 116198361 Blast Desc: CHGG_07336 [Chaetomium globosum CBS 148.51] gi|88178615|gb|EAQ86083.1| CHGG_07336 [Chaetomium globosum CBS 148.51]
MGLSNPVAFRPFAVSFWTTVTYLALLIPLIIIHETVPSPPGSPTLYYGLNLTKAWIDLTTLSRSYHPFNSRKNDEIHNWLLLELNEIKERNWAGNDSGMVVLEDVASNITTSDSIWGGNGKTGSYFEGKNIIVYIRGDDDPAGPWWEDGRYHSDRVIGRGGVLLNAHYDSVSTGYGATDDGMGVITTMALVDYFSRPENRPERGIVALLNNNEEDFLWGAQAFGNSPFMPFCHTFLNLEGAGAGGRATLFRTTDAEVTAAYKGSPNPFGSVVSSDAFGTGAIRSNTDYIVFNGVYGMRGLDLAFYRPRARYHTNQDDAKHTSRASLWHMLSNSLHTMEYLSGNTGQKFIGNRGDGDRSKVFNGNGNSGVWFDLFGKSLALFELRTFFAWSLTLLIASPLILIAITYVLIHQGKYYFFSSKFSPYEGAELEPVQLGGRKGMCRFPFALIIAGVLVVGAAYLVTKVNPLIIYSSEYAVWAMMISLFYFVFWTIMAGANFARPSALHRGYSIFWLFTIGWVILVINTVFEDRFRIASGYSFVFFEAAAFLASLISLLDLLGVPSKEKFAQHVHGAHDEVDHGAEHMASHQQEAHQTNGSGDAADDGGDEEGEAPAASETTPLIGDTSFGQAYRRALSSSDTKSVDQKGQPYGYEQLWSGKFTSWTWIIQFLLLGPFLIVLTAQNGLLLGSAVSQTGSDGGSLLLPYLITAFSSIMLLLPVTPFIHRITHHVPLFFLVVFIATLIYNLAAFPFSVDNRYKVYFQQTVDLDTGSTKVHYVGLEEYVKMTIDDIPSAMGKEVTCDLRTSSRSGLYDCSYNGVDIPPNVVRANPIGVPPEMGYATWLTYNITRDEGATKARFEIDGKETRSCAITFEKPISGFKVRGGTSPDARFGVLPDKGLEKVKLYRRDWVTPWVVDVEWEKGDDDGIDGRVVCSWDDVNTAGTLPAYDEGLQYSPAWVGLTKLSTGLCEGSKAFKA

SEQ ID NO: 322 - DNA, 3518 bp, Muscodor strobelii
  misc_feature: SGI EST ID NO. CUFF.767.0
  misc_feature: Variant of the nucleotide sequence at SEQ ID NO 320
tgcctcagctacccgcctccaacccttcacgaaggtatcatgtgacgggcttgggagccttcaatcgcgtcgttagatcgtatggatatgagagaccctcagattcgatccctagactcacctcgtatgccttatcctctctcaactttctctagctagcttgttccagctgggcatgtcctatgtcctaagcagtctcttctcgactatcttggaagcttgcttccccacctcgagcttgtttccaatctcgtcactggccctctcgccgcagcaacaccaccgctcgatcgtgtagcgtgtgacactctcataggttgaacaaattcgatcctgctctttgcagccagccatgggtctgtcgaatcccgtcgccttccggcccttcgccgtgtctttctggaccaccgtcacttatctcgctctcctcatcccgctcattattattcacgagaccgtgccctcacctcctggtagcccgaccttatactacggcctgaatctgaccaaagcatggatcgatctgactacactgtcgcggtcctaccatcccttcaacagccgaaagaatgacgaaatccacaattggcttctgctcgagctgaacgagatcaaggagcggaactgggcaggcaacgactcgggcatggtcgtcttggaggatgttgcgtcgaatatcaccacttcggactccatctggggcggcaacggcaagaccggcagctactttgagggcaagaatatcattgtctacatccgaggagatgatgatcctgcagggccgtggtgggaagatggccgttaccattctgaccgagtcatcggcagaggcggtgtgctgctgaacgcgcactatgactctgtctcgactggctatggtgcaaccgatgatggcatgggcgttatcaccacaatggctttagtcgattacttctctcgtcccgaaaatcgaccagagagaggcatcgttgccttgcttaacaacaacgaggaagactttctatggggcgcacaagcatttggaaacagtcccttcatgccgttttgtcacacctttctcaatctcgaaggcgccggagctggtggccgcgctacgctcttccggacaaccgacgccgaggtaacagctgcttacaaaggcagtccgaatccgttcggcagcgtagtgtcatccgatgccttcggtaccggagcgattcggagcaacactgattacatcgtcttcaatggcgtgtatggtatgagaggtctcgatctcgccttctatcgcccccgtgccaggtatcatacaaaccaggatgatgcgaaacatacttcgagggctagtctgtggcatatgcttagtaactctcttcatacgatggaatatttgtcaggtaacaccggacagaagttcattggaaatcgtggagatggtgaccgttccaaggtcttcaatggcaacggaaactccggcgtatggttcgatctgttcggaaagtctctcgctctattcgagctgcgaacattctttgcttggtcccttacactacttatcgcctcaccactgatattgatagccatcacctatgtcctaatacaccaagggaagtattatttcttctcttcaaagttttctccttatgaaggagcagagctcgaacccgtccagcttggtgggcgaaaaggaatgtgcagattcccctttgctctaatcattgctggagtattggtagtaggggctgcttaccttgtaacaaaggttaatccgctcatcatctatagcagtgaatacgcagtatgggccatgatgatctcgttgttctacttcgtcttttggacgatcatggcaggagccaatttcgccagaccgagtgccctacaccggggctattcgatcttctggctctttactatcggatgggtcattcttgtcattaacactgtatttgaggatcgcttccggattgcttctggctatagcttcgtgtttttcgaagctgctgcctttcttgcatccttgatctcacttctcgacttgttaggggtaccgtccaaggaaaagtttgcccaacatgttcacggagcacacgatgaagtggatcatggggcagaacatatggcttctcaccaacaagaagcacaccagactaatgggtctggcgatgctgcagacgacggtggcgatgaagagggcgaggcaccagctgcatcagaaacgacacctttgattggcgatacctccttcgggcaagcttacagaagagcattatccagctcagacacgaaatcagtagaccaaaagggtcagccttatggatacgaacagttatggtcaggcaagttcacgagttggacttggatcatacaatttttacttcttggtccgttcttaatcgtcttgacagctcaaaatggtttgcttttaggctctgcagtatcacagacgggatcagatggaggaagcttactgctaccgtatttgatcacggcattttccagcatcatgttgctcctacctgtcacacctttcattcaccgcatcacacatcacgtccccctctttttcctggttgttttcatcgccacgttgatctacaatctggccgctttccccttctctgtagacaaccgatacaaggtctacttccagcagacagtagatctcgatactggctcgacaaaagtccattatgttgggttagaggaatacgtgaagatgacaattgacgacattccatctgctatgggcaaagaagtcacatgtgatcttaggacgagctcacgaagtggtctgtacgattgctcgtacaatggtgttgatattcctcccaatgtcgtgagagctaaccccatcggagtcccgcctgagatggggtatgctacatggctgacgtacaatattacgcgtgacgaaggcgcgactaaggcgcgatttgaaattgatggcaaggagacgagatcatgtgccatcacgtttgagaaaccgatctcggggtttaaagtcagaggcggtacttccccggatgcgagatttggtgttcttccggataagggcttggaaaaggttaaactctatcgacgagattgggtcacgccttgggttgttgatgttgagtgggaaaagggagatgatgatggcattgatggcagggtcgtttgtagttgggatgatgttaatacggccggtacacttcccgcgtacgatgaggggttgcaatactctccggcttgggttgggctcacgaagttgtcgaccgggttgtgtgagggtagcaaagcttttaaggcgtgaggacagcaaggttgagaggagacgggatcttggacatgagattggcgaactttctgatacgcgcatactggcctggacgaggtcgtttgaggagttgggagttttgcattgattggttgtatgattatgatacttttcctgatggcttggagctgtacatacataggggataccctatttacctacttgcatacatctacctattgatacttgaccgactatgtgcattttagtcttcatagtg

SEQ ID NO: 323 - DNA, 1176 bp, Muscodor strobelii
  misc_feature: SGI cDNA ID NO. 559672
  misc_feature: Elevated expression when VOC is produced
  misc_feature: Encodes the peptide sequence at SEQ ID NO 324
atggcttctcaccaacaagaagcacaccagactaatgggtctggcgatgctgcagacgacggtggcgatgaagagggcgaggcaccagctgcatcagaaacgacacctttgattggcgatacctccttcgggcaagcttacagaagagcattatccagctcagacacgaaatcagtagaccaaaagggtcagccttatggatacgaacagttatggtcaggcaagttcacgagttggacttggatcatacaatttttacttcttggtccgttcttaatcgtcttgacagctcaaaatggtttgcttttaggctctgcagtatcacagacgggatcagatggaggaagcttactgctaccgtatttgatcacggcattttccagcatcatgttgctcctacctgtcacacctttcattcaccgcatcacacatcacgtccccctctttttcctggttgttttcatcgccacgttgatctacaatctggccgctttccccttctctgtagacaaccgatacaaggtctacttccagcagacagtagatctcgatactggctcgacaaaagtccattatgttgggttagaggaatacgtgaagatgacaattgacgacattccatctgctatgggcaaagaagtcacatgtgatcttaggacgagctcacgaagtggtctgtacgattgctcgtacaatggtgttgatattcctcccaatgtcgtgagagctaaccccatcggagtcccgcctgagatggggtatgctacatggctgacgtacaatattacgcgtgacgaaggcgcgactaaggcgcgatttgaaattgatggcaaggagacgagatcatgtgccatcacgtttgagaaaccgatctcggggtttaaagtcagaggcggtacttccccggatgcgagatttggtgttcttccggataagggcttggaaaaggttaaactctatcgacgagattgggtcacgccttgggttgttgatgttgagtgggaaaagggagatgatgatggcattgatggcagggtcgtttgtagttgggatgatgttaatacggccggtacacttcccgcgtacgatgaggggttgcaatactctccggcttgggttgggctcacgaagttgtcgaccgggttgtgtgagggtagcaaagcttttaaggcgtga

SEQ ID NO: 324 - protein, 391 aa, Muscodor strobelii
  misc_feature: SGI Peptide ID NO. 559672
  misc_feature (33)..(387): NCBI GI: 156037764 Blast Desc: SS1G_12596 [Sclerotinia sclerotiorum 1980] gi|154698004|gb|EDN97742.1| SS1G_12596 [Sclerotinia sclerotiorum 1980]
  misc_feature (3)..(387): NCBI GI: 154304296 Blast Desc: BC1G_08418 [Botryotinia fuckeliana B05.10] gi|150854220|gb|EDN29412.1| BC1G_08418 [Botryotinia fuckeliana B05.10]
  misc_feature (11)..(389): NCBI GI: 171692421 Blast Desc: protein product [Podospora anserina] gi|170946159|emb|CAP72960.1| protein product [Podospora anserina]
  misc_feature (32)..(390): NCBI GI: 16944418 Blast Desc: conserved [Neurospora crassa]
  misc_feature (32)..(390): NCBI GI: 164426532 Blast Desc: NCU04133 [Neurospora crassa OR74A] gi|157071373|gb|EAA32053.2| [Neurospora crassa OR74A]
  misc_feature (23)..(390): NCBI GI: 116198361 Blast Desc: CHGG_07336 [Chaetomium globosum CBS 148.51] gi|88178615|gb|EAQ86083.1| CHGG_07336 [Chaetomium globosum CBS 148.51]
  misc_feature (40)..(390): NCBI GI: 145605996 Blast Desc: MGG_06752 [Magnaporthe grisea 70-15] gi|145013728|gb|EDJ98369.1| MGG_06752 [Magnaporthe grisea 70-15]
  misc_feature (16)..(389): NCBI GI: 261360876 Blast Desc: peptidase family M28 family [Verticillium albo-atrum VaMs.102]
  misc_feature (16)..(390): NCBI GI: 256728766 Blast Desc: [Nectria haematococca mpVI 77-13-4]
  misc_feature (14)..(389): NCBI GI: 240108136 Blast Desc: Peptidase family M28 protein [Coccidioides posadasii C735 delta SOWgp]
  misc_feature: Useful for introducing or modulating the production of volatile compounds
MASHQQEAHQTNGSGDAADDGGDEEGEAPAASETTPLIGDTSFGQAYRRALSSSDTKSVDQKGQPYGYEQLWSGKFTSWTWIIQFLLLGPFLIVLTAQNGLLLGSAVSQTGSDGGSLLLPYLITAFSSIMLLLPVTPFIHRITHHVPLFFLVVFIATLIYNLAAFPFSVDNRYKVYFQQTVDLDTGSTKVHYVGLEEYVKMTIDDIPSAMGKEVTCDLRTSSRSGLYDCSYNGVDIPPNVVRANPIGVPPEMGYATWLTYNITRDEGATKARFEIDGKETRSCAITFEKPISGFKVRGGTSPDARFGVLPDKGLEKVKLYRRDWVTPWVVDVEWEKGDDDGIDGRVVCSWDDVNTAGTLPAYDEGLQYSPAWVGLTKLSTGLCEGSKAFKA

SEQ ID NO: 325 - DNA, 3518 bp, Muscodor strobelii; identical to SEQ ID NO: 322
  misc_feature: SGI EST ID NO. CUFF.767.0
  misc_feature: Variant of the nucleotide sequence at SEQ ID NO 323

SEQ ID NO: 326 - DNA, 1716 bp, Muscodor strobelii
  misc_feature: SGI cDNA ID NO. 559673
  misc_feature: Reduced expression when VOC is produced
  misc_feature: Encodes the peptide sequence at SEQ ID NO 327
atgtcgtggagaaatcaaggaatcacaggttccaacaacatcccgctgggtactcgccgccgctttggtggcgacgatggtgctgaagccactacgcctgctactgacagtggctacagcaatggcgatcgcgacatgaagcgcggtcgcagccctgagcccagaggtgaggcagacggaccgcgccgccgcaaaaagcgaaaccgatggggcgacgccgccgagaacaaagccgccggcctgatgggcctcccgacggccatcgtcgccaacatgaccagcgagcagctcgaagcctacactctgcatctgcgtatcgaggagatcagccagaagctgcgcatcgacgatgtcgtgccagctgacggtgacagatccccctcgcccccgccgcagtacgacaaccatggtcgccgtgtcaacactcgagagtaccggtaccgcaagcgcctcgaggacgagcgccacaagctcatcgagaaggccatgaagaccatccccaactaccacccgccccaggactaccgccgcccgaccaagacccaggagaaagtctacgtgccggttaatgactacccggagattaacttcattggtctgctcattggtccgcgtggtaacacactgaagaagatggagacagaatccggagccaagattgccatccgcggaaagggttccgtcaaggaaggcaagggccgatccgacgcagcacacgccagcaaccaggaggaagatcttcactgccttatcatggcagacactgaggaaaaggttaacaaggccaagaagctgatccacaacgtcatcgagactgccgcatccattcccgagggacagaacgagctcaaacgcaaccagcttcgtgagctcgccgccttgaacggtactcttcgtgacgatgaaaaccaagcctgccagaactgtggccagatcggccatcgcaaatacgactgtcccgagaaacagaatttcactgccaacatcatctgtcgtgtctgtggtaacgcgggtcacatggccagagactgtcctgacagacagaaaggtgctagctggcgcaacgacggccctcgtcctgctggtcgcatcggtgccggagactctgttgacgctgaatacgagcaattcatgcaagaacttggcggcggatccggtggtcctcctgcccgcatcgaagccggcccaggctcgtacaacaataacaacggtggcggcaacgagtcggcgaagccttggcagcgtggacccactggcgctgctgctccctggcgcactcgcaacgaagaccgcggtcatgaagaacgtggaggcggcggtggaggggctgctccttggcgcgagcgcggtaaccgtggtggcgagcaccatggaggcgatcactatggcggccacaataactacaacagtggctcgtctgctcctggctctgctccatggcaccaaggcggtagcagcggcggcaacagcggcggccagtctggatatcccggataccctggttatggcggatatggtggcagtgcggctccgggtatgggaccgcctcccggacttcccggcaactcgttgggcgcaccgcctggacttcctggcaacctgaacgccttgatccagcagtacgctggcggtgctccccctccaccaccgagcggtgatgcaccaccaccccctcctagcgaccagccgcctccgcctcctccccctggtgcttaa

SEQ ID NO: 327 - protein, 571 aa, Muscodor strobelii
  misc_feature: SGI Peptide ID NO. 559673
  misc_feature (194)..(266): Pfam Id: PF00013 Pfam Desc: KH domain
  misc_feature (329)..(346): Pfam Id: PF00098 Pfam Desc: Zinc knuckle
  misc_feature (304)..(321): Pfam Id: PF00098 Pfam Desc: Zinc knuckle
  misc_feature (196)..(266): Pfam Id: PF00013 Pfam Desc: KH domain
  misc_feature (1)..(541): NCBI GI: 46110397 Blast Desc: FG02080.1 [Gibberella zeae PH-1]
  misc_feature (1)..(482): NCBI GI: 85102104 Blast Desc: NCU04110 [Neurospora crassa OR74A] gi|74620782|sp|Q8NIW7.1|BBP_NEUCR RecName: Full=Branchpoint-bridging protein gi|21622330|emb|CAD36971.1| to
  misc_feature (1)..(544): NCBI GI: 261360877 Blast Desc: branchpoint-bridging protein [Verticillium albo-atrum VaMs.102]
  misc_feature (1)..(482): NCBI GI: 116198359 Blast Desc: CHGG_07335 [Chaetomium globosum CBS 148.51] gi|88178614|gb|EAQ86082.1| CHGG_07335 [Chaetomium globosum CBS 148.51]
  misc_feature (1)..(455): NCBI GI: 39977727 Blast Desc: MGG_06748 [Magnaporthe grisea 70-15] gi|145013732|gb|EDJ98373.1| MGG_06748 [Magnaporthe grisea 70-15]
  misc_feature (1)..(541): NCBI GI: 154309844 Blast Desc: BC1G_07392 [Botryotinia fuckeliana B05.10] gi|150851853|gb|EDN27046.1| BC1G_07392 [Botryotinia fuckeliana B05.10]
  misc_feature (1)..(431): NCBI GI: 171692423 Blast Desc: protein product [Podospora anserina] gi|170946160|emb|CAP72961.1| protein product [Podospora anserina]
  misc_feature (1)..(541): NCBI GI: 156051578 Blast Desc: SS1G_07196 [Sclerotinia sclerotiorum 1980] gi|154704974|gb|EDO04713.1| SS1G_07196 [Sclerotinia sclerotiorum 1980]
  misc_feature (1)..(463): NCBI GI: 119187441 Blast Desc: CIMG_03768 [Coccidioides immitis RS]
  misc_feature (1)..(463): NCBI GI: 240108195 Blast Desc: Zinc knuckle domain containing protein [Coccidioides posadasii C735 delta SOWgp]
  misc_feature: Useful for introducing or modulating the production of volatile compounds
MSWRNQGITGSNNIPLGTRRRFGGDDGAEATTPATDSGYSNGDRDMKRGRSPEPRGEADGPRRRKKRNRWGDAAENKAAGLMGLPTAIVANMTSEQLEAYTLHLRIEEISQKLRIDDVVPADGDRSPSPPPQYDNHGRRVNTREYRYRKRLEDERHKLIEKAMKTIPNYHPPQDYRRPTKTQEKVYVPVNDYPEINFIGLLIGPRGNTLKKMETESGAKIAIRGKGSVKEGKGRSDAAHASNQEEDLHCLIMADTEEKVNKAKKLIHNVIETAASIPEGQNELKRNQLRELAALNGTLRDDENQACQNCGQIGHRKYDCPEKQNFTANIICRVCGNAGHMARDCPDRQKGASWRNDGPRPAGRIGAGDSVDAEYEQFMQELGGGSGGPPARIEAGPGSYNNNNGGGNESAKPWQRGPTGAAAPWRTRNEDRGHEERGGGGGGAAPWRERGNRGGEHHGGDHYGGHNNYNSGSSAPGSAPWHQGGSSGGNSGGQSGYPGYPGYGGYGGSAAPGMGPPPGLPGNSLGAPPGLPGNLNALIQQYAGGAPPPPPSGDAPPPPPSDQPPPPPPPGA

SEQ ID NO: 328 - DNA, 2297 bp, Muscodor strobelii
  misc_feature: SGI EST ID NO. CUFF.1418.3
  misc_feature: Variant of the nucleotide sequence at SEQ ID NO 326
ggctaaaagacttagattgccactgtgctgcgtcgctagtgaggatttattaaattcctatgcaacctctccgcgtgcccatctctccctctccaacccacgtctgacacaatacatcgaggattcgatcgcatacgcatcgcctcaacgcccaacatgtcgtggagaaatcaaggaatcacaggttccaacaacatcccgctgggtactcgccgccgctttggtggcgacgatggtgctgaagccactacgcctgctactgacagtggctacagcaatggcgatcgcgacatgaagcgcggtcgcagccctgagcccagaggtgaggcagacggaccgcgccgccgcaaaaagcgaaaccgatggggcgacgccgccgagaacaaagccgccggcctgatgggcctcccgacggccatcgtcgccaacatgaccagcgagcagctcgaagcctacactctgcatctgcgtatcgaggagatcagccagaagctgcgcatcgacgatgtcgtgccagctgacggtgacagatccccctcgcccccgccgcagtacgacaaccatggtcgccgtgtcaacactcgagagtaccggtaccgcaagcgcctcgaggacgagcgccacaagctcatcgagaaggccatgaagaccatccccaactaccacccgccccaggactaccgccgcccgaccaagacccaggagaaagtctacgtgccggttaatgactacccggagattaacttcattggtctgctcattggtccgcgtggtaacacactgaagaagatggagacagaatccggagccaagattgccatccgcggaaagggttccgtcaaggaaggcaagggccgatccgacgcagcacacgccagcaaccaggaggaagatcttcactgccttatcatggcagacactgaggaaaaggttaacaaggccaagaagctgatccacaacgtcatcgagactgccgcatccattcccgagggacagaacgagctcaaacgcaaccagcttcgtgagctcgccgccttgaacggtactcttcgtgacgatgaaaaccaagcctgccagaactgtggccagatcggccatcgcaaatacgactgtcccgagaaacagaatttcactgccaacatcatctgtcgtgtctgtggtaacgcgggtcacatggccagagactgtcctgacagacagaaaggtgctagctggcgcaacgacggccctcgtcctgctggtcgcatcggtgccggagactctgttgacgctgaatacgagcaattcatgcaagaacttggcggcggatccggtggtcctcctgcccgcatcgaagccggcccaggctcgtacaacaataacaacggtggcggcaacgagtcggcgaagccttggcagcgtggacccactggcgctgctgctccctggcgcactcgcaacgaagaccgcggtcatgaagaacgtggaggcggcggtggaggggctgctccttggcgcgagcgcggtaaccgtggtggcgagcaccatggaggcgatcactatggcggccacaataactacaacagtggctcgtctgctcctggctctgctccatggcaccaaggcggtagcagcggcggcaacagcggcggccagtctggatatcccggataccctggttatggcggatatggtggcagtgcggctccgggtatgggaccgcctcccggacttcccggcaactcgttgggcgcaccgcctggacttcctggcaacctgaacgccttgatccagcagtacgctggcggtgctccccctccaccaccgagcggtgatgcaccaccaccccctcctagcgaccagccgcctccgcctcctccccctggtgcttaagtgcagccggcgtgtgctgtcgaaggatcggcctggactactctcggatactaacacgccatcgtgcgtttcggtggctggcttatctccatatcacacagattgaatggtcgaccatgtggcatttcgcactaacttgagcaactacaaacggcttgttgacgacaatgttgctgatttctaggaacattgacagctctcggagtcgcaggtgaatagcactagatctcacaggtccagctggccatctgaagttcagagctttcgcatgtattaataggtgatcagcactaactcataggtatcaacattctatcggtaaaggcactatgtacgtaataaaaagaaaactaaaatgcgcgagagctttttgcttaagcaaatgttgtgtgctgtcgaaacctaagattgacacctgaaaatgc

SEQ ID NO: 329 - DNA, 759 bp, Muscodor strobelii
  misc_feature: SGI cDNA ID NO. 559674
  misc_feature: Elevated expression when VOC is produced
  misc_feature: Encodes the peptide sequence at SEQ ID NO 330
atggcgacaccaaccgacatccatctctatacggctcaaacgcccaatggtatcaaggtttctgtcctcctagaggagctaggattacaatataagcacaccgctatccagttcagcaagaacgagcagaaggagccatggttcctcgccatcaaccccaatggcagaattcccgcgatgacggataccctcaacggcaagcaaatccgtatcttcgagagcggtgctatgatgcagtaccttgtagatcagtatgataaggaccacaaagtgtcttacccctttggtactgaagaatattatgagacgaacagctggcttatgtggcagatgggcggcctgggccctatgcaaggccagctgaaccatttcaaccgatacgcccctgagaagattcagtacggcatcgatcgataccgaggcgaggttcgccgactgtaccgaaccatggaggacacgctgaaaacgtccaaatcgggctatctcgttggtgacaagtgtaccattgcagatattgcatgctggggttgggtcgccggagccaagaacaccggagttgatatcgatgagttcccagcgctgaaggagtgggttcagcggatgttgaagcgccctggtcttgagaaaggccgacatgtgccctcgaagcacggatatgaagattctcaaaagatgactgaggaagattttgagaagaaggcagcagccaaccgtggatggattttgcaaggacagaaagatgaccagaagaagcagtaa

SEQ ID NO: 330 - protein, 252 aa, Muscodor strobelii
  misc_feature: SGI Peptide ID NO. 559674
  misc_feature (107)..(205): Pfam Id: PF00043 Pfam Desc: Glutathione S-transferase, C-terminal domain
  misc_feature (5)..(83): Pfam Id: PF02798 Pfam Desc: Glutathione S-transferase, N-terminal domain
  misc_feature (140)..(205): Pfam Id: PF00043 Pfam Desc: Glutathione S-transferase, C-terminal domain
  misc_feature (3)..(252): NCBI GI: 116198357 Blast Desc: CHGG_07334 [Chaetomium globosum CBS 148.51] gi|88178613|gb|EAQ86081.1| CHGG_07334 [Chaetomium globosum CBS 148.51]
  misc_feature (3)..(251): NCBI GI: 256728538 Blast Desc: [Nectria haematococca mpVI 77-13-4]
  misc_feature (5)..(251): NCBI GI: 46110236 Blast Desc: FG02000.1 [Gibberella zeae PH-1]
  misc_feature (5)..(251): NCBI GI: 85102100 Blast Desc: NCU04109 [Neurospora crassa OR74A] gi|21622329|emb|CAD36970.1| conserved [Neurospora crassa] gi|28922808|gb|EAA32029.1| NCU04109 [Neurospora crassa OR74A]
  misc_feature (1)..(251): NCBI GI: 270268069 Blast Desc: glutathione S-transferase [Hypocrea virens]
  misc_feature (1)..(251): NCBI GI: 156051576 Blast Desc: glutathione S-transferase [Sclerotinia sclerotiorum 1980] gi|154704973|gb|EDO04712.1| glutathione S-transferase [Sclerotinia sclerotiorum 1980]
  misc_feature (1)..(251): NCBI GI: 12001978 Blast Desc: AF061253_1 glutathione S-transferase [Botryotinia fuckeliana]
  misc_feature (5)..(251): NCBI GI: 171692425 Blast Desc: protein product [Podospora anserina] gi|170946161|emb|CAP72962.1| protein product [Podospora anserina]
  misc_feature (1)..(251): NCBI GI: 39977725 Blast Desc: MGG_06747 [Magnaporthe grisea 70-15] gi|145013733|gb|EDJ98374.1| MGG_06747 [Magnaporthe grisea 70-15]
  misc_feature (1)..(251): NCBI GI: 119491761 Blast Desc: glutathione S-transferase GstA [Neosartorya fischeri NRRL 181] gi|119411535|gb|EAW21478.1| glutathione S-transferase GstA [Neosartorya fischeri NRRL 181]
  misc_feature (12)..(206): SWISSPROT Homolog: EC 2.5.1.18 Glutathione transferase
  misc_feature: Useful for introducing or modulating the production of volatile compounds
MATPTDIHLYTAQTPNGIKVSVLLEELGLQYKHTAIQFSKNEQKEPWFLAINPNGRIPAMTDTLNGKQIRIFESGAMMQYLVDQYDKDHKVSYPFGTEEYYETNSWLMWQMGGLGPMQGQLNHFNRYAPEKIQYGIDRYRGEVRRLYRTMEDTLKTSKSGYLVGDKCTIADIACWGWVAGAKNTGVDIDEFPALKEWVQRMLKRPGLEKGRHVPSKHGYEDSQKMTEEDFEKKAAANRGWILQGQKDDQKKQ

SEQ ID NO: 331 - DNA, 1085 bp, Muscodor strobelii
  misc_feature: SGI EST ID NO. CUFF.780.1
  misc_feature: Variant of the nucleotide sequence at SEQ ID NO 329
ttcaccccgaggtctcagcccatgacgacatttgatttctaatcacccttctgtatgagcagaattgctactcgcatggaagtgaatttttcctcattgtaacaagatatataactccgtggattgaacttgaatttacgaactcaagccaagccttgcaatatcatcaccaagaacaatacgtccagtctatcaattcgtgaccactcaaaatggcgacaccaaccgacatccatctctatacggctcaaacgcccaatggtatcaaggtttctgtcctcctagaggagctaggattacaatataagcacaccgctatccagttcagcaagaacgagcagaaggagccatggttcctcgccatcaaccccaatggcagaattcccgcgatgacggataccctcaacggcaagcaaatccgtatcttcgagagcggtgctatgatgcagtaccttgtagatcagtatgataaggaccacaaagtgtcttacccctttggtactgaagaatattatgagacgaacagctggcttatgtggcagatgggcggcctgggccctatgcaaggccagctgaaccatttcaaccgatacgcccctgagaagattcagtacggcatcgatcgataccgaggcgaggttcgccgactgtaccgaaccatggaggacacgctgaaaacgtccaaatcgggctatctcgttggtgacaagtgtaccattgcagatattgcatgctggggttgggtcgccggagccaagaacaccggagttgatatcgatgagttcccagcgctgaaggagtgggttcagcggatgttgaagcgccctggtcttgagaaaggccgacatgtgccctcgaagcacggatatgaagattctcaaaagatgactgaggaagattttgagaagaaggcagcagccaaccgtggatggattttgcaaggacagaaagatgaccagaagaagcagtaagatagatgcatgtttatacccctagtcatgtcaacaaagacagcatttctatgaaatgatatgtttgtgtttagaatttatatcagatatgtttatgagatgtatgtgttccac

SEQ ID NO: 332 - DNA, 3324 bp, Muscodor strobelii
  misc_feature: SGI cDNA ID NO. 559675
  misc_feature: Encodes the peptide sequence at SEQ ID NO 333
atggtcaattccagatccgcaacgtatcagaagggctgctggacatgcaaagtccatgatgccggccatttcgccctggcgactttcaaccaaactaccaatctaataagagatctgcttatgagcatgactctatcgtatgatacgctcccgggacatggtctcttttgtgcgcttctcgctttctcatccctccgtcgtagcggactacatgaagagaccatgaagttcaaagtcgccgccctgcgagccctttcggcctctgcgcaggaggcggcaaaggggtgggttgaagccgtccagcatgtggcgacgttgatggtgttatgtgctttcgagatcctgcttccgactgaaagctctaccgaatggctttggtatattcgtggtgccatgaggattgtccaagaagcacatcttgaaagtaagctaggcgacataggcatcggcagtctacttgagtgggtttactaccatcacacactttctcgatttaccgtgaaaaattggcgtcacaaacccaccatagacatttctagagagcctgaaggttctctgttccgaagtttcccatatagatattcagaagcagcggacccattgacagcttcttgtaacaaccacactctcgcaatcttaaacttgcttgcagagatatgcgatacattacttgacccccacgacccgcgaagtcgcgatgataaatacaaggaacggcttaaacagttcgaggtcaagatcaacagcctcgtcacctcaccaccatcccaaaacccagaagccccagtgactgaccacacggaacccccgatatccgtccaattataccagaccgccaccctggtatatctcgtccgagcatcgcaagacccagaggaaccaatggcgaatctggattcgataacgaagagcgcattcgcaggtccgatcaaagcccaatattgcgatcatctcttccctcttttcatcctagcctgcgaagcgcacactgatgagcagagaactgcaatattgaatttgtttgataggacggagaaagtggatcatgtgcgcagtctacacaatctgaaggcccagattcagtcgttttgggttcaacgggatctttatgctgatagcgaccttgttgtggactatcttggattgatgaaaactgtgctgctattaagcacgtacaataagaggggagggacgcgcaggaccgtaccggctgttgtactgcaaatgtcgatctcagagaaccctgtttataacgcccatgcagcttgggcaacgacaaggctgtaccaagcgttgcgagatggcatctcagatagctttggaatgcatgggatgggctggaagcggcgggacatgaaccaaatgtttgaccgtagctacaaagcacgtctatactctaaagcacgcgaaaagacccccatagacctgactggtcgagctgctgagtatttgtcttctactgtctatcaatatttacctttaaagcatgacagcgacttgcgactcctgcgtctgcttccgggcgaggagaagtcgcctgttgcatgcgaagtaatacacgtaaacagcaaatgcatgccggaaggatctgcgactggtgtctcttacgaagcactttcgtatacatggggcccgaaagtgcttcacacaatgagctgcaatggtaacgcgatgattatctccgagaacctctggctggctctccaaaggcttcgacgactggattcggatcgttggctttgggtagacgctgtttgcatcaatcaatccgatgatattgaaaagtcaaagcaggtcagtcgaatggaccgcgtttatcaagacgcaagtcaggttattgtctggttaggtgaagcagtgagcggtactgctgcggcgttcgaactggtccatcgactgagtcgctttatacctatgaactctcatgctaccgatgtggttccgccgttgagttctcgcgatctttctgcgtatggcttacctccaacagaatcttcagtttggaaatcgttggacgagcttctttggcgggagtggtactttcgagtatggatcctccaagaagtgatcttggcgaagagagtacaaatagcctgcggtctgctgacagaaagatatgaaaccttcacccgtgctgcacaattcatcgttagccgttctttgacccctttggtgggagtcgatccatttgcgcttctcaatatcgtgggcgtgggaactgagatccgagcacgagttgctcatccaatcgatgttgctcccagagattcgttgctcaccgtgctttgtcaagctcggaacagcaactccactgatccaagagataaaatttttggggtctttggtcttgtcgcgaaccacgaagaaattaatgcaaagagcacggtcgagccggactataccaaatccgttgctgatttgtataccgaaacagctgcagaccatatccgcgcgtttgaacatttagatattctgagtgcggttgaacccgaatactatcgtatcaatacccagttgccttcatgggttgcagactggcaagtccacccgcctaccacatccttttgtagtttgggtagatttgatggatttactgctgggggtcgatcgatagcatcaccacaatcgtgttccattcgaggcacggtcttacgtgtccaaggccgcgagattgacaaatgtacacatattgcggatactttcctcgatcatttgccttcttcaggttctataaaaggcgtaagtgagaaagctattggacaggcggtttacaacttttacatgcgacgccgttggttacaatggaagaaattggcctataagcttggagacccctacctaacaggcgagaaaatcgaggaggcgtacgcgcgaacgatcactgctaattcttttgctttctgcaacgatggcagtgaagatacatcgacgatcgatcaatatagggcctttgaagacatatggaagaacgaactagcggctgggcctaatggtgggggcctcgaccaagcagcactatctcctgatagactcgagcagggactccgattcatggaggagtacaaagaagctgcttacggacgccgtttctttctcacccagaaaggattcatgggactttgccatccaacagtccgcgctggtgatctggttgtgttgctttccggtggtaaaacaccatatattctaaagccgcgaggttttgggaagaatgggtacagatttagaggcgaatgttatgtccgcggtcttatgaatggagagggcatggaggacgctaagtacggtatacttggaaaggagagatggtttcagctggagtaa

SEQ ID NO: 333 - protein, 1107 aa, Muscodor strobelii
  misc_feature: SGI Peptide ID NO. 559675
  misc_feature (536)..(688): Pfam Id: PF06985 Pfam Desc: Heterokaryon incompatibility protein (HET)
  misc_feature (10)..(384): NCBI GI: 256721370 Blast Desc: NECHADRAFT_82373 [Nectria haematococca mpVI 77-13-4]
  misc_feature (489)..(1102): NCBI GI: 226287224 Blast Desc: conserved [Paracoccidioides brasiliensis Pb18]
  misc_feature (489)..(1102): NCBI GI: 225683598 Blast Desc: [Paracoccidioides brasiliensis Pb03]
  misc_feature (24)..(406): NCBI GI: 256730463 Blast Desc: NECHADRAFT_73999 [Nectria haematococca mpVI 77-13-4]
  misc_feature (446)..(1102): NCBI GI: 239612306 Blast Desc: conserved [Ajellomyces dermatitidis ER-3]
  misc_feature (431)..(1102): NCBI GI: 261202540 Blast Desc: conserved [Ajellomyces dermatitidis SLH14081] gi|239590581|gb|EEQ73162.1| conserved [Ajellomyces dermatitidis SLH14081]
  misc_feature (491)..(1095): NCBI GI: 261360716 Blast Desc: ankyrin and HET domain-containing protein [Verticillium albo-atrum VaMs.102]
  misc_feature (490)..(1088): NCBI GI: 256721874 Blast Desc: NECHADRAFT_88090 [Nectria haematococca mpVI 77-13-4]
  misc_feature (482)..(1096): NCBI GI: 46135655 Blast Desc: FG09350.1 [Gibberella zeae PH-1]
  misc_feature (465)..(1090): NCBI GI: 119179507 Blast Desc: CIMG_08498 [Coccidioides immitis RS]
MVNSRSATYQKGCWTCKVHDAGHFALATFNQTTNLIRDLLMSMTLSYDTLPGHGLFCALLAFSSLRRSGLHEETMKFKVAALRALSASAQEAAKGWVEAVQHVATLMVLCAFEILLPTESSTEWLWYIRGAMRIVQEAHLESKLGDIGIGSLLEWVYYHHTLSRFTVKNWRHKPTIDISREPEGSLFRSFPYRYSEAADPLTASCNNHTLAILNLLAEICDTLLDPHDPRSRDDKYKERLKQFEVKINSLVTSPPSQNPEAPVTDHTEPPISVQLYQTATLVYLVRASQDPEEPMANLDSITKSAFAGPIKAQYCDHLFPLFILACEAHTDEQRTAILNLFDRTEKVDHVRSLHNLKAQIQSFWVQRDLYADSDLVVDYLGLMKTVLLLSTYNKRGGTRRTVPAVVLQMSISENPVYNAHAAWATTRLYQALRDGISDSFGMHGMGWKRRDMNQMFDRSYKARLYSKAREKTPIDLTGRAAEYLSSTVYQYLPLKHDSDLRLLRLLPGEEKSPVACEVIHVNSKCMPEGSATGVSYEALSYTWGPKVLHTMSCNGNAMIISENLWLALQRLRRLDSDRWLWVDAVCINQSDDIEKSKQVSRMDRVYQDASQVIVWLGEAVSGTAAAFELVHRLSRFIPMNSHATDVVPPLSSRDLSAYGLPPTESSVWKSLDELLWREWYFRVWILQEVILAKRVQIACGLLTERYETFTRAAQFIVSRSLTPLVGVDPFALLNIVGVGTEIRARVAHPIDVAPRDSLLTVLCQARNSNSTDPRDKIFGVFGLVANHEEINAKSTVEPDYTKSVADLYTETAADHIRAFEHLDILSAVEPEYYRINTQLPSWVADWQVHPPTTSFCSLGRFDGFTAGGRSIASPQSCSIRGTVLRVQGREIDKCTHIADTFLDHLPSSGSIKGVSEKAIGQAVYNFYMRRRWLQWKKLAYKLGDPYLTGEKIEEAYARTITANSFAFCNDGSEDTSTIDQYRAFEDIWKNELAAGPNGGGLDQAALSPDRLEQGLRFMEEYKEAAYGRRFFLTQKGFMGLCHPTVRAGDLVVLLSGGKTPYILKPRGFGKNGYRFRGECYVRGLMNGEGMEDAKYGILGKERWFQLE

SEQ ID NO: 334 - DNA, 1652 bp, Muscodor strobelii
  misc_feature: SGI EST ID NO. CUFF.808.2
  misc_feature: Variant of the nucleotide sequence at SEQ ID NO 332
caaatgcatcttagcctgccggcgttaagcaccaattattaactccagccactactcgcatcccttaataagatcgacatggtcaattccagatccgcaacgtatcagaagggctgctggacatgcaaagatcggaaaatacaatgtgaccgaggagtgcctgcttgtcagaagtgcgtgcgaagtaacagggactgcgaggggtatggtccgcgtttgtcatggccaagggtcaacgacaagaagcgtgctatcacggggccatcaccggcaagaagaagagtaacggctcacagcgaagatcacttattcgtccataccgtctttagagacttagaagtgtttcagcaactatcgatgcggaaagcagttcactgccccgacatacggcagcatcacccacgattattaagacaaccacagcaaaagatcaagcatgcggatcttgtattttacttccatgatgccggccatttcgccctggcgactttcaaccaaactaccaatctaataagagatctgcttatgagcatgactctatcgtatgatacgctcccgggacatggtctcttttgtgcgcttctcgctttctcatccctccgtcgtagcggactacatgaagagaccatgaagttcaaagtcgccgccctgcgagccctttcggcctctgcgcaggaggcggcaaaggggtgggttgaagccgtccagcatgtggcgacgttgatggtgttatgtgctttcgagatcctgcttccgactgaaagctctaccgaatggctttggtatattcgtggtgccatgaggattgtccaagaagcacatcttgaaagtaagctaggcgacataggcatcggcagtctacttgagtgggtttactaccatcacacactttctcgatttaccgtgaaaaattggcgtcacaaacccaccatagacatttctagagagcctgaaggttctctgttccgaagtttcccatatagatattcagaagcagcggacccattgacagcttcttgtaacaaccacactctcgcaatcttaaacttgcttgcagagatatgcgatacattacttgacccccacgacccgcgaagtcgcgatgataaatacaaggaacggcttaaacagttcgaggtcaagatcaacagcctcgtcacctcaccaccatcccaaaacccagaagccccagtgactgaccacacggaacccccgatatccgtccaattataccagaccgccaccctggtatatctcgtccgagcatcgcaagacccagaggaaccaatggcgaatctggattcgataacgaagagcgcattcgcaggtccgatcaaagcccaatattgcgatcatctcttccctcttttcatcctagcctgcgaagcgcacactgatgagcagagaactgcaatattgaatttgtttgataggacggagaaagtggatcatgtgcgcagtctacacaatctgaaggcccagattcagtcgttttgggttcaacgggatctttatgctgatagcgaccttgttgtggactatcttggattgatgaaaactgtggttagctctgatactacacttccttcatatgtgtaaagtccggttggatagacagattgaaatggaaagaactattattgaatcacccg

SEQ ID NO: 335 - DNA, 909 bp, Muscodor strobelii
  misc_feature: SGI cDNA ID NO. 559676
  misc_feature: Encodes the peptide sequence at SEQ ID NO 336
atggctacctacttgatcacgcaggcgacgggcatgcaggctcgatggaccatcacccatctcctcgcagcaagtgccaaagtgcatgctcttgtgcgcgatcttgagaaggcatctgcaattccgcttttgaggtctgagggtgtgacgcttttcaaaggagaaagcgtcaacctcgaggaagtactcaaggctgcccaaggctgccaaggagcattcttgaacacgtttccgattcccggcgtagaaactgaacaagccaagacggttgtcgaagcttgcaagaaagctggaatcaaaatcatagtggctaccaccacattcggtaccgacaaaccagaagtgtgggataatgagcaaggagataaaattggtctccgtgattactacaagtccaaaaagtcaatcgaggatgctgtacgtggtggtaacttcgaagcttacacgattgttcggccgggtttcatccatattgattatatgactccccattctcttggcaactttggccggcttgcgtcgcacggaatcatagaccatgcttttgatgatggtgccaggctacctcagacggattgttctgatgtaggcagatatgccgcggccgcattactggacccagccaagtttggcggtcaagagatcacagttatcaacgagaacatgaccattgatgaagccgccgctattgtaagcaaggttagcggcagaaaagtgaccacagagaaaggggagcccactatctttggtcaaagatttcacttcttggcaaatgccaatgacttccacgacctcgcggctgtagctagacaaaatggagtcaagttcggtatgccctttgggtcactcgaagcagcgttgcaaagagatagggaatggctcgtggagtcattgccggcctctgcttag

SEQ ID NO: 336 - protein, 302 aa, Muscodor strobelii
  misc_feature: SGI Peptide ID NO. 559676
  misc_feature (5)..(243): Pfam Id: PF05368 Pfam Desc: NmrA-like family
  misc_feature (5)..(100): Pfam Id: PF05368 Pfam Desc: NmrA-like family
  misc_feature (195)..(243): Pfam Id: PF05368 Pfam Desc: NmrA-like family
  misc_feature (1)..(300): NCBI GI: 256721343 Blast Desc: NECHADRAFT_94852 [Nectria haematococca mpVI 77-13-4]
  misc_feature (1)..(300): NCBI GI: 256730123 Blast Desc: NECHADRAFT_45232 [Nectria haematococca mpVI 77-13-4]
  misc_feature (1)..(300): NCBI GI: 39966172 Blast Desc: MGG_10017 [Magnaporthe grisea 70-15] gi|145015353|gb|EDJ99889.1| MGG_10017 [Magnaporthe grisea 70-15]
  misc_feature (1)..(299): NCBI GI: 261195006 Blast Desc: NmrA family protein [Ajellomyces dermatitidis SLH14081] gi|239587779|gb|EEQ70422.1| NmrA family protein [Ajellomyces dermatitidis SLH14081]
  misc_feature (1)..(299): NCBI GI: 239610726 Blast Desc: NmrA family protein [Ajellomyces dermatitidis ER-3]
  misc_feature (41)..(298): NCBI GI: 212538911 Blast Desc: conserved [Penicillium marneffei ATCC 18224] gi|210069353|gb|EEA23444.1| conserved [Penicillium marneffei ATCC 18224]
  misc_feature (2)..(292): NCBI GI: 169763854 Blast Desc: [Aspergillus oryzae RIB40] gi|238489829|ref|XP_002376152.1| NAD dependent epimerase/dehydratase, [Aspergillus flavus NRRL3357] protein NAD
  misc_feature (3)..(242): NCBI GI: 169775371 Blast Desc: [Aspergillus oryzae RIB40] gi|83770016|dbj|BAE60151.1| protein product [Aspergillus oryzae]
  misc_feature (3)..(242): NCBI GI: 238495981 Blast Desc: NAD dependent epimerase/dehydratase, [Aspergillus flavus NRRL3357] gi|220694106|gb|EED50450.1| NAD dependent epimerase/dehydratase, [Aspergillus flavus NRRL3357]
  misc_feature (5)..(292): NCBI GI: 242811463 Blast Desc: NAD dependent epimerase/dehydratase, [Talaromyces stipitatus ATCC 10500] gi|218714093|gb|EED13516.1| NAD dependent epimerase/dehydratase, [Talaromyces stipitatus ATCC 10500]
MATYLITQATGMQARWTITHLLAASAKVHALVRDLEKASAIPLLRSEGVTLFKGESVNLEEVLKAAQGCQGAFLNTFPIPGVETEQAKTVVEACKKAGIKIIVATTTFGTDKPEVWDNEQGDKIGLRDYYKSKKSIEDAVRGGNFEAYTIVRPGFIHIDYMTPHSLGNFGRLASHGIIDHAFDDGARLPQTDCSDVGRYAAAALLDPAKFGGQEITVINENMTIDEAAAIVSKVSGRKVTTEKGEPTIFGQRFHFLANANDFHDLAAVARQNGVKFGMPFGSLEAALQRDREWLVESLPASA

SEQ ID NO: 337 - DNA, 2202 bp, Muscodor strobelii
  misc_feature: SGI cDNA ID NO. 559677
  misc_feature: Encodes the peptide sequence at SEQ ID NO 338
atgaagacgtcttctgcattgcttctttcatcttcggcctcggccgccatgcttgagcctcgtgcgagtgatccttgtgctgctctaacaccgcttcttaaccagagtacaatcattcctggtcaagcggctgcggattgtctttcttcttttcctttcaatgacaccgctgcccatactttcctcgaggagatcagaaaatacgttcaatttcagtcaaccatcgaaatactccagaacccacccgaaacatataattcgcaagcgtatgacattctcggagctttagatcagatcgccagtcgttactacgacaatcattttcagttcgacctcgacctcattcgtgctttcaactccgcaaatgatgggcatttttgggttaccccttgcacgaggacgcctttcacattttacagagaggaagtcggtcttgtgtcaatatcaaaggatggtttagctgtaccagagatctacgcgggctccgacttgaagcctcttgcagcgggtattgaaaccgtttctcctgtcgaaaagatcaatgaccagaatgtgacggagttcctccaagaaatcgcttcgactcagacctttcaagatcccgatgcacgatggaatgtgcttttcaacaaccttgcggccgccaatctggccaactgggggaattacacgtatttcggtcgatttacaaccgatcagttcgtttggccgggcgtcaactcaacaacccttcagttcaagaacggctcaacgctcgagcttacaacatacgcaaaatacaactttgacgtatttcctcagtcgaccgaacatatgtatgaaatcacatgcacaccaaatcaagcatccagcagttcttcaaaacgaagctctttggctacgcgcactctgatcgacggtcatagcaagcgccaagacagttccgagcctacaaagaccgcgactccgctgggatatggaacgccctttctccgggacccctataatcaaatggttggctatttcttagatgaggagactactgtcatgttgataccatcatttgagagtggctcgagcgacttgctcattgcagacacggctacaaaaatcgtggaccgagctgtttcttctgggcggacgaaaatgatcattgacctaactgccaatagcggtggtagtattacacaaggatttgatctcttcaagctcttctttcccgacctattcccatactcggggactcgaatgaggaatcacgaagggttagaaatcctactcgacgtttacagaatagacagtgcagaccagtgccctaacgatgtcagccctttctgcccaggggcttgggtgactccggatcaaaagtcgagcttcgattccatcagcacattcatagagggagatgtacagtacgatgtcaatgttacaaacccattgatcgcgaacttcaactacacccagtctacaatccggggcttcagctcagattacccagcgaatgatacacgaccctttgatgcgaaggacattgtcatcatcagtgatggccagtgtacttcaacttgcactacattcaccaacttaatgacttgggttggcaacgtcacatcggttacctttggtggaagacctgcgactgggccaatgcaagtgatgggtggtgtacgcggtgcccaatcctatcacttcgatactcttgacgatgtcattgcaactgcttcgaatatcacacaaagcaacgatggggtcctatcagaaagtcagcttgagaaggcaagagagtcattgcctataggtttgaagaatctgccattctacgtcgatggtggaggtttcaatctccgcaacgcatatcaggagggcgacgacgaactccctctacagttccagtaccaagcctcggactgcagattgttctacacagctgagaatatcttgagacccaataccacatggattgctgcgaagaacgcaatctggggcgatggcttgtgtgtcgcaaattccactgggggtaagaattcaatttacgaccggaggggtgagtcgagcccttataaggagcagggaagcggaacgggttcgagtggtaccggtggaaacaatgaaaccaccgggactggcgatggtcctttcggttccactgctcatcatttgcagactagcggaagcatcatcgctctcagcgttttcgctgccgctttcacgatcttcatgtga

SEQ ID NO: 338 - protein, 733 aa, Muscodor strobelii
  misc_feature: SGI Peptide ID NO. 559677
  misc_feature (24)..(728): NCBI GI: 256728048 Blast Desc: NECHADRAFT_83467 [Nectria haematococca mpVI 77-13-4]
  misc_feature (33)..(672): NCBI GI: 238506413 Blast Desc: peptidase S41 family protein [Aspergillus flavus NRRL3357] gi|220689121|gb|EED45472.1| peptidase S41 family protein [Aspergillus flavus NRRL3357]
  misc_feature (33)..(672): NCBI GI: 169785417 Blast Desc: [Aspergillus oryzae RIB40] gi|83775917|dbj|BAE66036.1| protein product [Aspergillus oryzae]
  misc_feature (14)..(676): NCBI GI: 212546941 Blast Desc: peptidase S41 family protein [Penicillium marneffei ATCC 18224] gi|210065144|gb|EEA19239.1| peptidase S41 family protein [Penicillium marneffei ATCC 18224]
  misc_feature (40)..(663): NCBI GI: 255956727 Blast Desc: Pc21g21410 [Penicillium chrysogenum Wisconsin 54-1255] gi|211590827|emb|CAP97038.1| Pc21g21410 [Penicillium chrysogenum Wisconsin 54-1255]
  misc_feature (32)..(663): NCBI GI: 148793083 Blast Desc: [Penicillium chrysogenum]
  misc_feature (51)..(663): NCBI GI: 119494237 Blast Desc: NFIA_007940 [Neosartorya fischeri NRRL 181] gi|119412176|gb|EAW22117.1| conserved [Neosartorya fischeri NRRL 181]
  misc_feature (21)..(657): NCBI GI: 255951022 Blast Desc: Pc22g23870 [Penicillium chrysogenum Wisconsin 54-1255] gi|211593295|emb|CAP99675.1| Pc22g23870 [Penicillium chrysogenum Wisconsin 54-1255]
  misc_feature (39)..(660): NCBI GI: 85093666 Blast Desc: NCU05765 [Neurospora crassa OR74A] gi|28921191|gb|EAA30504.1| conserved [Neurospora crassa OR74A]
  misc_feature (8)..(592): NCBI GI: 121700527 Blast Desc: peptidase, S41 family, [Aspergillus clavatus NRRL 1] gi|119396671|gb|EAW07102.1| peptidase, S41 family, [Aspergillus clavatus NRRL 1]
MKTSSALLLSSSASAAMLEPRASDPCAALTPLLNQSTIIPGQAAADCLSSFPFNDTAAHTFLEEIRKYVQFQSTIEILQNPPETYNSQAYDILGALDQIASRYYDNHFQFDLDLIRAFNSANDGHFWVTPCTRTPFTFYREEVGLVSISKDGLAVPEIYAGSDLKPLAAGIETVSPVEKINDQNVTEFLQEIASTQTFQDPDARWNVLFNNLAAANLANWGNYTYFGRFTTDQFVWPGVNSTTLQFKNGSTLELTTYAKYNFDVFPQSTEHMYEITCTPNQASSSSSKRSSLATRTLIDGHSKRQDSSEPTKTATPLGYGTPFLRDPYNQMVGYFLDEETTVMLIPSFESGSSDLLIADTATKIVDRAVSSGRTKMIIDLTANSGGSITQGFDLFKLFFPDLFPYSGTRMRNHEGLEILLDVYRIDSADQCPNDVSPFCPGAWVTPDQKSSFDSISTFIEGDVQYDVNVTNPLIANFNYTQSTIRGFSSDYPANDTRPFDAKDIVIISDGQCTSTCTTFTNLMTWVGNVTSVTFGGRPATGPMQVMGGVRGAQSYHFDTLDDVIATASNITQSNDGVLSESQLEKARESLPIGLKNLPFYVDGGGFNLRNAYQEGDDELPLQFQYQASDCRLFYTAENILRPNTTWIAAKNAIWGDGLCVANSTGGKNSIYDRRGESSPYKEQGSGTGSSGTGGNNETTGTGDGPFGSTAHHLQTSGSIIALSVFAAAFTIFM

SEQ ID NO: 339 - DNA, 552 bp, Muscodor strobelii
  misc_feature: SGI EST ID NO. CUFF.788.0
  misc_feature: Variant of the nucleotide sequence at SEQ ID NO 337
ttgctaacaagagaggctagagccaaataaaacatcctggccaagagcctcgtcgaacatcaattatgagtgattccgttcattatatatatagagaactgattgccaatgttccttagatgttggatagttctcaaccattggttctaggctccaatctcaaatcggcacgatgaagacgtcttctgcattgcttctttcatcttcggcctcggccgccatgcttgagcctcgtgcgagtgatccttgtgctgctctaacaccgcttcttaaccagagtacaatcattcctggtcaagcggctgcggattgtctttcttcttttcctttcaatgacaccgctgcccatactttcctcgaggagatcagaaaatacgttcaatttcagtcaaccatcgaaatactccagaacccacccgaaacatataattcgcaagcgtatgacattctcggagctttagatcagatcgccagtcgttactacgacaatcattttcagttcgacctcgacctcattcgtgctttcaactccgcaaatgatgggcatttttg

SEQ ID NO: 340 - DNA, 1086 bp, Muscodor strobelii
  misc_feature: SGI cDNA ID NO. 559678
  misc_feature: Encodes the peptide sequence at SEQ ID NO 341
atggtgacttcaaccagaccccccaagaatgccttcgtacggcacgcaagaaaagtatacaacccaatcggcttttcaaaaggttacaatttcattctttggttcatctttgttggagcactgttcggattctcgcttgctcgacttgagtatctggacttcaatggcatattctgcagccccaacgggcagggtggtgccttgcctggcgagtgttactattacacgaacttcgatcgctataaatatggcattatcatccacttagctacggttgttcccggaagcctgcttgcttgtttccagtttgtgccctggatacgatatcatgcgctcctctttcatcgtatcaatgggtatattgtcgttcttctggccatgattggcactgctgccgctttggtcatcgctcgacgctctgttggcggcggtgtcgaaattcaagtagccgccgggactttagctgttttgttcgtcggatccttagttttggcctatatcaacatcaagcgccttcaaattgagcaacaccgtgcttggatgatccgcgcttgggcttatggtggtgttatcattaccactcgtatcggtctcatcgtcggcgcacaggtggtgactgcggtgggtggctactatgctcctgaaccctgcgacaagatcaactgggcacttgggcagaatgatactctttcagcttatcccgaatgcgccgcgttctattctggcgcgaatctcaatcagcaaacagtcgtgaaggccgatttctccggtagtaatgttatggaaattggcgctgcactcaccgtgaattttggcgccgcactttggtttgcactcgctctccatgccgtcggcgcagaactatatctgcgtctgacgccggccgagggtgaacgtctgagaaagatttcttatcagcgacagctggaggcgggaatgagaaacccaggtagagctggtattactgctgatcggctaggtgacgctgagaaatgggttcccaatcagcctaagtcgaatgaaaatggaagcgaagaatctttggaagtagttgcaaaaccacaacagtctcatggctccgcctaa

SEQ ID NO: 341 - protein, 361 aa, Muscodor strobelii
  misc_feature: SGI Peptide ID NO. 559678
  misc_feature (1)..(347): NCBI GI: 258576531 Blast Desc: conserved [Uncinocarpus reesii 1704] gi|237902713|gb|EEP77114.1| conserved [Uncinocarpus reesii 1704]
  misc_feature (1)..(342): NCBI GI: 256723217 Blast Desc: NECHADRAFT_97190 [Nectria haematococca mpVI 77-13-4]
  misc_feature (1)..(351): NCBI GI: 46115334 Blast Desc: FG03509.1 [Gibberella zeae PH-1]
  misc_feature (1)..(342): NCBI GI: 261204894 Blast Desc: conserved [Ajellomyces dermatitidis SLH14081] gi|239592243|gb|EEQ74824.1| conserved [Ajellomyces dermatitidis SLH14081] gi|239611600|gb|EEQ88587.1| conserved [Ajellomyces
  misc_feature (1)..(348): NCBI GI: 39970837 Blast Desc: MGG_02885 [Magnaporthe grisea 70-15] gi|145017292|gb|EDK01655.1| MGG_02885 [Magnaporthe grisea 70-15]
  misc_feature (1)..(347): NCBI GI: 169598280 Blast Desc: SNOG_01941 [Phaeosphaeria nodorum SN15] gi|160704367|gb|EAT90153.2| SNOG_01941 [Phaeosphaeria nodorum SN15]
  misc_feature (1)..(348): NCBI GI: 145236120 Blast Desc: protein product [Aspergillus niger] gi|134075159|emb|CAK96472.1| protein product [Aspergillus niger]
  misc_feature (2)..(346): NCBI GI: 116191143 Blast Desc: CHGG_05289 [Chaetomium globosum CBS 148.51] gi|88181202|gb|EAQ88670.1| CHGG_05289 [Chaetomium globosum CBS 148.51]
  misc_feature (9)..(348): NCBI GI: 171685362 Blast Desc: protein product [Podospora anserina] gi|170942642|emb|CAP68294.1| protein product [Podospora anserina]
  misc_feature (7)..(353): NCBI GI: 189208899 Blast Desc: conserved [Pyrenophora tritici-repentis Pt-1C-BFP] gi|187976875|gb|EDU43501.1| conserved [Pyrenophora tritici-repentis Pt-1C-BFP]
MVTSTRPPKNAFVRHARKVYNPIGFSKGYNFILWFIFVGALFGFSLARLEYLDFNGIFCSPNGQGGALPGECYYYTNFDRYKYGIIIHLATVVPGSLLACFQFVPWIRYHALLFHRINGYIVVLLAMIGTAAALVIARRSVGGGVEIQVAAGTLAVLFVGSLVLAYINIKRLQIEQHRAWMIRAWAYGGVIITTRIGLIVGAQVVTAVGGYYAPEPCDKINWALGQNDTLSAYPECAAFYSGANLNQQTVVKADFSGSNVMEIGAALTVNFGAALWFALALHAVGAELYLRLTPAEGERLRKISYQRQLEAGMRNPGRAGITADRLGDAEKWVPNQPKSNENGSEESLEVVAKPQQSHGSA

SEQ ID NO: 342 - DNA, 1749 bp, Muscodor strobelii
  misc_feature: SGI EST ID NO. CUFF.800.0
  misc_feature: Variant of the nucleotide sequence at SEQ ID NO 340
cgggactttagctgttttgttcgtcggatccttagttttggcctatatcaacatcaagcgccttcaaattgagcaacaccgtgcttggatgatccgcgcttgggcttatggtggtgttatcattaccactcgtatcggtctcatcgtcggcgcacaggtggtgactgcggtgggtggctactatgctcctgaaccctgcgacaagatcaactgggcacttgggcagaatgatactctttcagcttatcccgaatgcgccgcgttctattctggcgcgaatctcaatcagcaaacagtcgtgaaggccgatttctccggtagtaatgttatggaaattggcgctgcactcaccgtgaattttggcgccgcactttggtttgcactcgctctccatgccgtcggcgcagaactatatgtatgtcgtttcttcctctgatctgtatcatacgtatctggctaactcgatcatagctgcgtctgacgccggccgagggtgaacgtctgagaaagatttcttatcagcgacagctggaggcgggaatgagaaacccaggtagagctggtattactgctgatcggctaggtgacgctgagaaatgggttcccaatcagcctaagtcgaatgaaaatggaagcgaagaatctttggaagtagttgcaaaaccacaacagtctcatggctccgcctaacccttttcacttgaacattcacatccacacagcatagcgttgcgtttacttggtaatttagatatcgggacatttgtattaggcggcactttcagattgaatttctcatttgaattcttgttatataactttcttgtaaccaaaagggcatatgttgaaacattgataatcatccaatgatttctagatattttctagaacaattcatgacacagactcatacatgtgatactacgtcgcgccctttctcagaaatcacattgacttcactgacgacacgaatcatgccctcattgtcggagtgctccatccagctcccctgatcttcaggcgcggcagaaatcgacacaggaggctggaaaggtgttctagtcagcatcgccagttcgagattataaatcatcttctccctatgctgtatcgccgaggacctatccgtcgatcctttcgaacctgatgacgcagactgtccactgttgctcaacctatagacagagttcctgttcacaacccatttgacgaagccctcgcctatggggtacagggtaggaacagtaccacagactattatcagcgccacttccgtgctaaaccaaatcaatgcgttggtcaactcccacgtaatgtctaaaggatcggccgtcgcgaaaagcactgttttcgccagcgccgcaccaccagtgaataaagtaagccctagggcgaagatgagaattaagcgccgtcgtagcggcatatggagctgccagataatgcgaacaggaagcaatgagaatacaaagtcggaaaaggcctgccaggatgcagacagaacgttgaatgcaaacacggctttggcgtcgatacaatgcgcacgtacagcaatgtcgtaattccagagagctcgtgggtcgccgcattggaacagactcagggcaatgtctatgatagcggtgagggccgtcgaaacgatgacgaaccagattatccatttgtgccattttgacgtgggaccgatgatacgtaagagggtaatgccaattgctattttgccaattccggtacaggccactcccgtcg

SEQ ID NO: 343 - DNA, 1146 bp, Muscodor strobelii
  misc_feature: SGI cDNA ID NO. 559679
  misc_feature: Elevated expression when VOC is produced
  misc_feature: Encodes the peptide sequence at SEQ ID NO 344
atggcgtcacaaataccgcccggttttgagttacctcctgatgaagatcgtcgagatgtccttctgacagtatggtggatagaattcgcgattggatcgttgttcatgttgttgcggcttgccgctcgttggtcgagacggagtctgggtatagatgatctgttcatgactattgcttggcttatatatatcggtgataccgttgctgtcaacgaatatgctgtcaaaggaatcacacgccatctcgtatacctcgcacctgacgagatatcccatgcatatatgctggacataatcatccaagcgacgggagtggcctgtaccggaattggcaaaatagcaattggcattaccctcttacgtatcatcggtcccacgtcaaaatggcacaaatggataatctggttcgtcatcgtttcgacggccctcaccgctatcatagacattgccctgagtctgttccaatgcggcgacccacgagctctctggaattacgacattgctgtacgtgcgcattgtatcgacgccaaagccgtgtttgcattcaacgttctgtctgcatcctggcaggccttttccgactttgtattctcattgcttcctgttcgcattatctggcagctccatatgccgctacgacggcgcttaattctcatcttcgccctagggcttactttattcactggtggtgcggcgctggcgaaaacagtgcttttcgcgacggccgatcctttagacattacgtgggagttgaccaacgcattgatttggtttagcacggaagtggcgctgataatagtctgtggtactgttcctaccctgtaccccataggcgagggcttcgtcaaatgggttgtgaacaggaactctgtctataggttgagcaacagtggacagtctgcgtcatcaggttcgaaaggatcgacggataggtcctcggcgatacagcatagggagaagatgatttataatctcgaactggcgatgctgactagaacacctttccagcctcctgtgtcgatttctgccgcgcctgaagatcaggggagctggatggagcactccgacaatgagggcatgattcgtgtcgtcagtgaagtcaatgtgatttctgagaaagggcgcgacgtagtatcacatgtatga

SEQ ID NO: 344 - protein, 381 aa, Muscodor strobelii
  misc_feature: SGI Peptide ID NO. 559679
  misc_feature (5)..(309): NCBI GI: 116201117 Blast Desc: CHGG_08443 [Chaetomium globosum CBS 148.51] gi|88176961|gb|EAQ84429.1| CHGG_08443 [Chaetomium globosum CBS 148.51]
  misc_feature (12)..(320): NCBI GI: 145228449 Blast Desc: An01g00890 [Aspergillus niger] gi|134054622|emb|CAK43467.1| protein product [Aspergillus niger]
  misc_feature (14)..(308): NCBI GI: 154321179 Blast Desc: [Botryotinia fuckeliana B05.10] gi|150852002|gb|EDN27194.1| [Botryotinia fuckeliana B05.10]
  misc_feature (20)..(312): NCBI GI: 159124175 Blast Desc: conserved [Aspergillus fumigatus A1163]
  misc_feature (8)..(376): NCBI GI: 121715876 Blast Desc: conserved [Aspergillus clavatus NRRL 1] gi|119403704|gb|EAW14121.1| conserved [Aspergillus clavatus NRRL 1]
  misc_feature (1)..(277): NCBI GI: 67538988 Blast Desc: AN5664.2 [Aspergillus nidulans FGSC A4] gi|40743567|gb|EAA62757.1| AN5664.2 [Aspergillus nidulans FGSC A4] gi|259484863|tpe|CBF81448.1| TPA: conserved [Aspergillus FGSC
  misc_feature (7)..(312): NCBI GI: 154320884 Blast Desc: [Botryotinia fuckeliana B05.10] gi|150853603|gb|EDN28795.1| [Botryotinia fuckeliana B05.10]
  misc_feature (47)..(344): NCBI GI: 242783189 Blast Desc: conserved [Talaromyces stipitatus ATCC 10500] gi|218720293|gb|EED19712.1| conserved [Talaromyces stipitatus ATCC 10500]
  misc_feature (10)..(377): NCBI GI: 238840019 Blast Desc: integral membrane protein [Microsporum canis CBS 113480]
  misc_feature (1)..(312): NCBI GI: 242798118 Blast Desc: conserved [Talaromyces stipitatus ATCC 10500] gi|218716449|gb|EED15870.1| conserved [Talaromyces stipitatus ATCC 10500]
  misc_feature: Useful for introducing or modulating the production of volatile compounds
MASQIPPGFELPPDEDRRDVLLTVWWIEFAIGSLFMLLRLAARWSRRSLGIDDLFMTIAWLIYIGDTVAVNEYAVKGITRHLVYLAPDEISHAYMLDIIIQATGVACTGIGKIAIGITLLRIIGPTSKWHKWIIWFVIVSTALTAIIDIALSLFQCGDPRALWNYDIAVRAHCIDAKAVFAFNVLSASWQAFSDFVFSLLPVRIIWQLHMPLRRRLILIFALGLTLFTGGAALAKTVLFATADPLDITWELTNALIWFSTEVALIIVCGTVPTLYPIGEGFVKWVVNRNSVYRLSNSGQSASSGSKGSTDRSSAIQHREKMIYNLELAMLTRTPFQPPVSISAAPEDQGSWMEHSDNEGMIRVVSEVNVISEKGRDVVSHV

SEQ ID NO: 345 - DNA, 2175 bp, Muscodor strobelii
  misc_feature: SGI EST ID NO. CUFF.801.1
  misc_feature: Variant of the nucleotide sequence at SEQ ID NO 343
gtgtctttggggatgttggagataaggttattgacacggccaagctcttgtttcggtctatcgctggtgccatcaagttggtgaggttggccaagatgatgattgatggtcgtgtgttatatatctgtaatcatgatggcgtctattctctggttctagttcttagggagtttcccgactgattgcggccgatgtagactgaactatgttgttgggaacgcgacgccgaagatttattctatagagacacgcatactagcgtcattcgatggcgtcacaaataccgcccggttttgagttacctcctgatgaagatcgtcgagatgtccttctgacagtatggtggatagaattcgcgattggatcgttgttcatgttgttgcggcttgccgctcgttggtcgagacggagtctgggtatagatgatctgttcatgactattgcttggcttatatatatcggtgataccgttgctgtcaacgaatatgctgtcaaaggaatcacacgccatctcgtatacctcgcacctgacgagatatcccatgcatatatgctggacataatcatccaagcgacgggagtggcctgtaccggaattggcaaaatagcaattggcattaccctcttacgtatcatcggtcccacgtcaaaatggcacaaatggataatctggttcgtcatcgtttcgacggccctcaccgctatcatagacattgccctgagtctgttccaatgcggcgacccacgagctctctggaattacgacattgctgtacgtgcgcattgtatcgacgccaaagccgtgtttgcattcaacgttctgtctgcatcctggcaggccttttccgactttgtattctcattgcttcctgttcgcattatctggcagctccatatgccgctacgacggcgcttaattctcatcttcgccctagggcttactttattcactggtggtgcggcgctggcgaaaacagtgcttttcgcgacggccgatcctttagacattacgtgggagttgaccaacgcattgatttggtttagcacggaagtggcgctgataatagtctgtggtactgttcctaccctgtaccccataggcgagggcttcgtcaaatgggttgtgaacaggaactctgtctataggttgagcaacagtggacagtctgcgtcatcaggttcgaaaggatcgacggataggtcctcggcgatacagcatagggagaagatgatttataatctcgaactggcgatgctgactagaacacctttccagcctcctgtgtcgatttctgccgcgcctgaagatcaggggagctggatggagcactccgacaatgagggcatgattcgtgtcgtcagtgaagtcaatgtgatttctgagaaagggcgcgacgtagtatcacatgtatgagtctgtgtcatgaattgttctagaaaatatctagaaatcattggatgattatcaatgtttcaacatatgcccttttggttacaagaaagttatataacaagaattcaaatgagaaattcaatctgaaagtgccgcctaatacaaatgtcccgatatctaaattaccaagtaaacgcaacgctatgctgtgtggatgtgaatgttcaagtgaaaagggttaggcggagccatgagactgttgtggttttgcaactacttccaaagattcttcgcttccattttcattcgacttaggctgattgggaacccatttctcagcgtcacctagccgatcagcagtaataccagctctacctgggtttctcattcccgcctccagctgtcgctgataagaaatctttctcagacgttcaccctcggccggcgtcagacgcagctatgatcgagttagccagatacgtatgatacagatcagaggaagaaacgacatacatatagttctgcgccgacggcatggagagcgagtgcaaaccaaagtgcggcgccaaaattcacggtgagtgcagcgccaatttccataacattactaccggagaaatcggccttcacgactgtttgctgattgagattcgcgccagaatagaacgcggcgcattcgggataagctgaaagagtatcattctgcccaagtgcccagttgatcttgtcgcagggttcaggagcatagtagccacccaccgcagtcaccacctgtgcgccga

SEQ ID NO: 346 - DNA, 1587 bp, Muscodor strobelii
  misc_feature: SGI cDNA ID NO. 559680
  misc_feature: Encodes the peptide sequence at SEQ ID NO 347
atgcgtcctgagcccctttcactgaaaaactcaacatcgaccaccactgagtatcgggaagatggtgcaccgcctcccccagcccaccgaacattaagtaccaaaaagtcaccaactctctcgccccctgtcgatgatattgctggtttgaaacggcgaggctcgtcaccgctcaagcatgagtactatccatctgatgtatcgtcagagagctcattcacatcagaatcggacaatgacgactcttactccgatgagtcgtctgacgacgagctcgaagctactgacatgccagatgcgattcctgccatcagcatcaggaaggaaatcgacgatcacgcagatgaaagtgtgctaagcctcacaccatctgcatcggcctcacaagcagagatacctcaacctaccggcaaagggccggactatctctttcaatccctagccacgatttcctactgggacaataagcacggttgctggaaagatctgtggccggatatttgctccgttgtgaccacccctggtttgatagaagcctttccttaccgtcgcaaccaaacatcatccggcgaagcttcacaggaggaagataggccattgatcgccctagatcttacgcctttggtaatgcttcgaaatagcacagctcttgacctcgaaataagatctccggtcttgaattatgcacgcttatatccgaaggtggccaaggcagaatcatctttcttccgatttcgagcaacctcatttaaagactgcgagtctctttatatggctgtacaccgtgctcggctagacaatgcaaaatacaaagctcttgaagaagagactcgaatcagggcgttcggccaaaaccaatctgcagaacccgacgccgatgggaatagccagcgtcgtagctggttcggccgtaagaacagctaccgtgcttcagctcgagccccttcccaatctgcaggcagtacatcgcattcgagcgcatctgcctcgtcattccttaagaggttgatgggtggtggcggccaattcaatatcgcgatgtcttccatcgaccgccaatctcgattcggcagtggcgaaaactcactctacacctcatcctcatcgggcgcacctcgttcaccatctgtgagtgccgccaatagtggaaatacgatgagggtgagtctcacgaccagcaacctcaaaatcaggttgcatcttcttatctctgccagtaaatgggaagaccacggcaattgttatctcgagatcacccgtccggatcaagggacaagacagaacctgaggaaatatcagggtatggaaaaacgtatcatagtgactagcatccctaagaaagatgagaccaagcgtcgtgtgatccttgatatcgtgctaggtagccggtgtttctcgcggctcggaagtcgtggcattcttctcaacgtttgggaagaagtgcgtgatgaaagtggcgaaatgggcgttgtgcccaaaggtggtggaagtggtggaaacgtcaacaagtggtgttttcagtgcgcgtctgtagtggaagccagctggatctttggacttgtcacgcaggaagtcgttattgtttga

SEQ ID NO: 347 - protein, 528 aa, Muscodor strobelii
  misc_feature: SGI Peptide ID NO. 559680
  misc_feature (1)..(526): NCBI GI: 261360841 Blast Desc: conserved [Verticillium albo-atrum VaMs.102]
  misc_feature (9)..(527): NCBI GI: 145605513 Blast Desc: MGG_11758 [Magnaporthe grisea 70-15] gi|145013328|gb|EDJ97969.1| MGG_11758 [Magnaporthe grisea 70-15]
  misc_feature (1)..(526): NCBI GI: 256728510 Blast Desc: NECHADRAFT_85880 [Nectria haematococca mpVI 77-13-4]
  misc_feature (1)..(528): NCBI GI: 46109930 Blast Desc: FG01847.1 [Gibberella zeae PH-1]
  misc_feature (15)..(525): NCBI GI: 116198341 Blast Desc: CHGG_07326 [Chaetomium globosum CBS 148.51] gi|88178605|gb|EAQ86073.1| CHGG_07326 [Chaetomium globosum CBS 148.51]
  misc_feature (15)..(525): NCBI GI: 171692391 Blast Desc: protein product [Podospora anserina] gi|170946144|emb|CAP72945.1| protein product [Podospora anserina]
  misc_feature (27)..(524): NCBI GI: 85103176 Blast Desc: NCU03685 [Neurospora crassa OR74A] gi|16415983|emb|CAB88610.2| related to glucan 1, 4-alpha-glucosidase [Neurospora crassa] NCU03685 [Neurospora
  misc_feature (20)..(521): NCBI GI: 156037542 Blast Desc: SS1G_12485 [Sclerotinia sclerotiorum 1980] gi|154697893|gb|EDN97631.1| SS1G_12485 [Sclerotinia sclerotiorum 1980]
  misc_feature (57)..(521): NCBI GI: 154316179 Blast Desc: BC1G_03675 [Botryotinia fuckeliana B05.10] gi|150846461|gb|EDN21654.1| BC1G_03675 [Botryotinia fuckeliana B05.10]
  misc_feature (37)..(521): NCBI GI: 258563130 Blast Desc: [Uncinocarpus reesii 1704] gi|237907817|gb|EEP82218.1| [Uncinocarpus reesii 1704]
MRPEPLSLKNSTSTTTEYREDGAPPPPAHRTLSTKKSPTLSPPVDDIAGLKRRGSSPLKHEYYPSDVSSESSFTSESDNDDSYSDESSDDELEATDMPDAIPAISIRKEIDDHADESVLSLTPSASASQAEIPQPTGKGPDYLFQSLATISYWDNKHGCWKDLWPDICSVVTTPGLIEAFPYRRNQTSSGEASQEEDRPLIALDLTPLVMLRNSTALDLEIRSPVLNYARLYPKVAKAESSFFRFRATSFKDCESLYMAVHRARLDNAKYKALEEETRIRAFGQNQSAEPDADGNSQRRSWFGRKNSYRASARAPSQSAGSTSHSSASASSFLKRLMGGGGQFNIAMSSIDRQSRFGSGENSLYTSSSSGAPRSPSVSAANSGNTMRVSLTTSNLKIRLHLLISASKWEDHGNCYLEITRPDQGTRQNLRKYQGMEKRIIVTSIPKKDETKRRVILDIVLGSRCFSRLGSRGILLNVWEEVRDESGEMGVVPKGGGSGGNVNKWCFQCASVVEASWIFGLVTQEVVIV

SEQ ID NO: 348 - DNA, 6557 bp, Muscodor strobelii
  misc_feature: SGI EST ID NO. CUFF.827.0
  misc_feature: Variant of the nucleotide sequence at SEQ ID NO 346
tctcccgctctgttggactcgacatgtggtttggcatgtggaaagcatcatcgtcagcttgcgtggtccttagcccccgccttcgctccttctatcccttctaagctgcattgtattttcaagagagtaacaaacacacgattggcaggcgtgctaagctgcaaacacactgttaatagccaacttgggccggtcaaagtttaattacctacctagttcaaaacggcgacagctttgtgtgcagtcaacaccatagctgtccaagcttatgcaggtcctgatgttatgttcatacagccagtaccaatagcttgagattccattcatttgcgctgccagttatctcagagtttgcatgccgttgcacccttcgtttcgtctcaactaccagcatcgtggcagccctcttgagtccaaatagagttcggctagataaactgcttcaccagcctcttcgacgcaaggctatcatgatttcaggtatggcattacatcctccttcgcacttttcaatttatctgtgtactgctgtgttatatgccatgctgtcgccatgtgctttgacacttgtagtgtctttcatctcactcttttgtggcgatcgccgcccatccattccacatggcaccaataggaatgtttacaatgtctctaacatgccgtgtgccccaatttccagaccatgaccgtaccaaagccaacagacgacgagactaactcgtcaaattccccatccactccggaggctgcccctgaccaaacagcaactcccaacggcacatcgacggacacgaatgatgccgaccctgcagcccccgccgaggatggcagcccgaccaaaactcccggtgctgctcggcgtcgggcagccactctgaaacagcctccttcgctcttgaccgatttcttgctaggacgacaatcaccagcgcgcattgcagcggacaagcaggcagcgcgggacgcactgaagcggcggaagagtctggagcagatcaaggtcgagatgcgggaggctgctgtgcagcgtgtccaagctccaggtggcgtgcgcgatcgagtaacaaaatggcagaaagccaatgcagctgccatgaccgctgcagatcctctggctacgcctactgaaccaagtgaggtgaatatacaggtggacactgaaagcgtgacggaagaagatcgcgtgagaattaagatgcgccagaaaaagagagtacctatgaaagttgtccacgcggaaaaaagtgcagagggagaagagggtgctgtgaacgaacaagagagaggtgtatcagccagtccgcctaagaagcgagtcgtgagcgacaccaattgggttaagaagcagaacaaaaagagccctccccggaaagcatcaccgaaggtcgcacagatgaaagacacaggcgctccgctaccaaagggctttttggcccggcctactcctaatcagcctgtctctcagaaaattcaagactgggccagcaaggtagaaatacccgatcatccaccgaagagacacagtacacccaggtctgttgccgctaaatctgtggacagtgatggcatacgtgtgaggccaatggcgagcgagagtgacgtgacaagcggtgtctctggcacgacgcggagtacaggggcatcggaatccttgaagtcaacagcaataacagacgatgggatccgagtcagacccctcagggcaaaaagagaaccagatgatggcatcagagtcaggccgataaagagcaccctacctgatgacggtattcgcgtgcgacccggccgacccagccgaccagtgtccagagaagcaagcactgttcgagcttcctctgtgcaaacgtcgaaagtcacaggtactgaaataactgattcggatctgaccggcacatctcgagatcgatcgccatcaccctcaaccatgacagagacgaagatggaggctccacctcccaaaactcgaaagccgaagaaatccgcctctccacctcgaccgaagaggaggaattctggctctcgaaagcggcgcgcactgagccaggcagagacaggaaccaccatgaccgaagatgtgtcagacagtgagtcctggaccagtggttcagacgtcgagtctgacataccgtccactttgccacctaagtctctcgcagatattcccttcgggtattcagctttctccgaattagacttagccactggtcgaggacgaccatccacgaggaagcccaagactaagaggcagccaagcttcaagggcgctactaacgtccttaaaaaaggccctcaacggagctctcaacgagggaaagaaaattctgacagaaacggttgatccaccaaagccggtggtcaatcagccaccaaatattgagaaatggctcaatcatacaatcgatcctttcgtcgagggacaggaaacctcgacacaggagccccaaagaaaatcagtcgagaaggaatgggctgaagaaagcaaaacaaggcgctcgacatcatcctctcgtaaagaatcaactgtgttagacgagtacgagcccagcactactactgctgctaagtctaagcctatctctggaagtcaacgtgaggaatctggtaccgaaggatcatcgactcttccagctagcagcctaaagaggagccgagccacaaggaacgcatcatctcccttgaagaccaacgcaaaaaaagggttcaaagaaaagctccttgatgctttccgtggcgaatctgcccctcacccaccgcctcctctagaatatgcgagctatgagaaggtagcagatgatgaaagtgaaataactgcagactatcacgaacgctctgcagagactagacgaagtcgatcttcgtacgacgacgatgactattcctcagtatccgattcctctgtgtcagcagaaccagcgaagcccaaagcaagctcttcgtatcctaaacgtcgagcaccgccaacaaagggtatacacgagctctcgacgattttgtctgatgctgaaacgcttagtacactcgaatcagatctttcatccatagtatcggactctactgtcacgcaaaccactatgacacgaagtacaggccttactaggagttcggctgtatctaggaaacgaagtcagaagtccggtctgaaaaggagattaaccaagcactctgacctggtgtcagcactatccctaccggacgacacggctgtgccgagtcgaagtaggagtcttcgatcaaccggtagtgtaagacgggcatccaaccaccttcgcgaagcgaccgtcgatggacttctacaagagtttgtacacgatgagaatctgtactcgagagaactgaaaaccctagtagatggtgtgattccggttcttctctcgcaatttgttcatcgtcaaggtgagacggcaaatgatctgttcaattcctcaaaggcaaattcaaaagaggatccccttccaaaggccgtcgtgaatatgggcattgctctcgagaagctgaaaaaacaccaccgacgctgcccgcttattgacatacatagactaccagagtggctcgagattgtcacccccgtctacgaaaattatcttagcgtttggcgccttggattccaaggcattattgtgaacttagctcccgcgtcacctgatgacgaagattcacttatcggtgctctgccacgaaatgaggaaggcgatgttctcaacgaggatggtgaccgcatcgacgtcgctcatcttctcaaacgtcctctggttcgaataaaatggataaccaagttcattcaaggctatcgagccgtcacgaagacaacgcaacacgagacactggcagaaaaatgggaagccttgcaagaaaaggctcgtaagagacataaggaggaagtcgcgcggattgttgatgacgatgccaaaaatactgacccgagccttgctcgtgagttgaaaacgatgggaccgctagacaatgtccgcatagatcgtttccgtcaggtttatgcgaaggatcagttctcccttgatctgcgacattcgaatggacaacgactggaatgtcaggttgagcttgtcttcagagacaatcaactgttcaaatcagatcctggcgacctcttgattcgagaaacagggaatggtggccgttcatggctactattcgcccctatcactggcaatcatctctccgcacgacaaggagatgacaagcatcaattgattgtgatgattagagggtacaaagatgaatggttcgagctcgtcacgttaacgactgattgtgaagagcaagtccaggactggatggagattctggggagctcacctgtgcctccggccatcaaaaacacgatttcaaccggatcacgaaataccgtgctatcaccaagttctatgactacagacagacctttgggtgaaaggaagagatcctcccaaagaaagtctctctctataaatctcgcgtccgagaaagagcaccaagaaaaaccgaaaacgccgacgcgatatcatcagagacagccaagctccccaggtagccctataccagcttcgtattcaacgtctcctacttcatcctccggaaagacagcaacccaggatacatatatagaacgccgacgtttctcttccccgcatattcaagatgtagcagagcacagatctcgcccatcgagagaggatatgcgtcctgagcccctttcactgaaaaactcaacatcgaccaccactgagtatcgggaagatggtgcaccgcctcccccagcccaccgaacattaagtaccaaaaagtcaccaactctctcgccccctgtcgatgatattgctggtttgaaacggcgaggctcgtcaccgctcaagcatgagtactatccatctgatgtatcgtcagagagctcattcacatcagaatcggacaatgacgactcttactccgatgagtcgtctgacgacgagctcgaagctactgacatgccagatgcgattcctgccatcagcatcaggaaggaaatcgacgatcacgcagatgaaagtgtgctaagcctcacaccatctgcatcggcctcacaagcagagatacctcaacctaccggcaaagggccggactatctctttcaatccctagccacgatttcctactgggacaataagcacggttgctggaaagatctgtggccggatatttgctccgttgtgaccacccctggtttgatagaagcctttccttaccgtcgcaaccaaacatcatccggcgaagcttcacaggaggaagataggccattgatcgccctagatcttacgcctttggtaatgcttcgaaatagcacagctcttgacctcgaaataagatctccggtcttgaattatgcacgcttatatccgaaggtggccaaggcagaatcatctttcttccgatttcgagcaacctcatttaaagactgcgagtctctttatatggctgtacaccgtgctcggctagacaatgcaaaatacaaagctcttgaagaagagactcgaatcagggcgttcggccaaaaccaatctgcagaacccgacgccgatgggaatagccagcgtcgtagctggttcggccgtaagaacagctaccgtgcttcagctcgagccccttcccaatctgcaggcagtacatcgcattcgagcgcatctgcctcgtcattccttaagaggttgatgggtggtggcggccaattcaatatcgcgatgtcttccatcgaccgccaatctcgattcggcagtggcgaaaactcactctacacctcatcctcatcgggcgcacctcgttcaccatctgtgagtgccgccaatagtggaaatacgatgagggtgagtctcacgaccagcaacctcaaaatcaggttgcatcttcttatctctgccagtaaatgggaagaccacggcaattgttatctcgagatcacccgtccggatcaagggacaagacagaacctgaggaaatatcagggtatggaaaaacgtatcatagtgactagcatccctaagaaagatgagaccaagcgtcgtgtgatccttgatatcgtgctaggtagccggtgtttctcgcggctcggaagtcgtggcattcttctcaacgtttgggaagaagtgcgtgatgaaagtggcgaaatgggcgttgtgcccaaaggtggtggaagtggtggaaacgtcaacaagtggtgttttcagtgcgcgtctgtagtggaagccagctggatctttggacttgtcacgcaggaagtcgttattgtttgattttgattttgttactgatacccttccttacatgatatcctttcttttgtttggcggtggtgtacgagttgcatggcggaaatgggttgcattttagccgcgtgagggcacgcacagtagcatagagcgatcggagtaaaaactggctttcggttgcttagagatggaattggcatttgacggcggtgggttgcttttactccagggttctgatacactgtttaataagcccatggtgtttccaggtacatactatacacctgttcaatcttgaccattattctgtgactatttctt

SEQ ID NO: 349 - DNA, 555 bp, Muscodor strobelii
  misc_feature: SGI cDNA ID NO. 559681
  misc_feature: Encodes the peptide sequence at SEQ ID NO 350
atgcatttctcagcgatactcagccttgtcttcgtcgcttgcggctcagccgagctgaccacacccactcccacaaatatggcccgcgcaacaaaatcaagcggaggagacgacgactgcgacagttccattctatctgtgtactcagggctccccacgccgccgccagttatcagcgcagccgtaacgggtcttcaattttacaacacggatctgtcccaaatctgcgcataccaatcgaaggcaccgtcctcagcgcagagcgcgtatacctcctataataacgccgtttattcgtatctcgaagaccacagctctgagatcgtgtcgcttgcctccaagtgcgacgacgatagcactagcacttcagcagtgccggtgtcaaagcagttcgacgatatcctagctgcttactcaaccttctccgagtcgggatgctcaacaacagccggttcgcccactaccacctcacccacgggcgccgcgccgaaggagacgggacgagccgttgcagcggcggctgctgctgtagcaggtgttgctgtatttttgtaa

SEQ ID NO: 350 - protein, 184 aa, Muscodor strobelii
  misc_feature: SGI Peptide ID NO. 559681
  misc_feature (29)..(127): NCBI GI: 256731186 Blast Desc: NECHADRAFT_105400 [Nectria haematococca mpVI 77-13-4]
  misc_feature (27)..(123): NCBI GI: 261353881 Blast Desc: [Verticillium albo-atrum VaMs.102]
MHFSAILSLVFVACGSAELTTPTPTNMARATKSSGGDDDCDSSILSVYSGLPTPPPVISAAVTGLQFYNTDLSQICAYQSKAPSSAQSAYTSYNNAVYSYLEDHSSEIVSLASKCDDDSTSTSAVPVSKQFDDILAAYSTFSESGCSTTAGSPTTTSPTGAAPKETGRAVAAAAAAVAGVAVFL

SEQ ID NO: 351 - DNA, 1740 bp, Muscodor strobelii
  misc_feature: SGI EST ID NO. CUFF.844.0
  misc_feature: Variant of the nucleotide sequence at SEQ ID NO 349
cagcattgacatgagatgttgaatagctcatcacgaacatcaatactctcaagattacgaatagtcaaccatcaacccgatctatcgcaagagaacttctcagtactatcaagtgcataatctgttcactcacattcatcccttcacgatgcatttctcagcgatactcagccttgtcttcgtcgcttgcggctcagccgagctgaccacacccactcccacaaatatggcccgcgcaacaaaatcaagcggaggagacgacgactgcgacagttccattctatctgtgtactcagggctccccacgccgccgccagttatcagcgcagccgtaacgggtcttcaattttacaacacggatctgtcccaaatctgcgcataccaatcgaaggcaccgtcctcagcgcagagcgcgtatacctcctataataacgccgtttattcgtatctcgaagaccacagctctgagatcgtgtcgcttgcctccaagtgcgacgacgatagcactagcacttcagcagtgccggtgtcaaagcagttcgacgatatcctagctgcttactcaaccttctccgagtcgggatgctcaacaacagccggttcgcccactaccacctcacccacgggcgccgcgccgaaggagacgggacgagccgttgcagcggcggctgctgctgtagcaggtgttgctgtatttttgtaactgggcatttcgaatgaacggtagccatacacctcgttttggagttgattttggataagctggtgtcatcgggcgttctatatcagccaaatccatgatttccatgtacttaacttagacattcagcggcagaggaaaatcacaattggagcttatctaatttctttctaagacatgaaaaaggcccatatacactcgtagatcaatgcacccaaggtatgatatggaggacgaaaggatgtaatatagatgattgcatgatttattgatcgatagcaacggcgcagaccaagcgttgcgcaatgaaagacgtgcagcaagctggtttcttaatatcgcagtttgatattgcgcccgatgcaaggaacagcttgctagctgcggacctgctggaacgtgtaaacaggatttgccgtgcactattgctattcgaacaaggaagatgctgctaggaacagcgacagtgagacggtacaacgaacttgactgtcgtgttcaagtctatgtaatatttgttgtctccgatgttgtcagacgtttgggcatcgttcggtcagaatgcctacctactgattgggctggatttcaccgcgcttcaccgctgatcctaaggtagttgattgacgagccagctcatcagcaaaaaatggtgtacaggctcgaaatgctgccatatgttattgcgacgtccgatggccgtggtataggtgtcctggtagcctcgcgctcttcgagttcacgacatgtccccacctgtcgagagtaaatagtgtgtagacctgtcttcacttccatgcaatcccttgctctcgagcaggagggtcggattaatagatttcagatgccgcgccttgtctgacctgaagacccgcatttgtggcccgaattggtcgaccacctttcgacgaactgccccatcgccgatatggtccgtcctctgattgccaaggttctcagtctcgtgatagtcccatgtcttgaggtgaaattaatagctgggttctcgagaatttgtaagtatgaaaactttggttctg

SEQ ID NO: 352 - DNA, 1434 bp, Muscodor strobelii
  misc_feature: SGI cDNA ID NO. 559682
  misc_feature: Encodes the peptide sequence at SEQ ID NO 353
atgagtacagcagttattcatggaccgcaatttctcaaagagtatgcagatttctgcgaagatcaggatcgggtctcctgtatctggttagggcttctacattctattctatgtcttggggcacaatttcaggccgctcgcctgacggctgcagattatgagcagcaggggacaccgaaatcgacagactggccggccttagcgagaagcctcaaacagaagacagtagaatgtcttatccttggtgaatatacacgaggcggaccttacgctttggaagctttgatgctatatttttgtggcgagtatctctttcacaaggacgccgagattggcatctggtatgtcgcgggcatgatcgttcaacttgctttacatatgggctatcatagagatcccaaacacttcgagaacatgtcaccattcgaaagcgaaatgagaagacgcgtctgggcaacaatagttgagattgatctggggatttccatgcagatgggtcttcctagaatcattagggtgtggcaagcagacaccgagttacccagaaacattctggatagtgacttggcaaaggaaagcgatgaactgcctcaagcaagacctgactcggaggtaacacccataatgtgtcgcatcgtgaaagcccagatgacagcttgtcttgggttgatatgggacttctccggtgaaatcaagccgcattcctataccgcagtcatggatatggacaacaagctcgaagagtcacatcgtgctatacccaaaggtctacaatgggtatcaatcacgcactgcatcacggactcgcctcatgtcctattgcatagaattttcctgaatatgatgttctggaaatcaaagatttttctccatcgaaaatacctggccctcactctcaaggaaaacgactacatggactccagagatgcgtgcttgggagcggcattaaaattgctcgagtttcatcatcttctagcagaagagacgaagccattgtgtcaattatacgaagagagatggcggatctcttcgattatgaaccaagatttccttctgggggcaagtatactatgctcctatctccagcaaatcgccaatggcgaacatgaagtcaaggagactgctgatctttccgtgattgtcacggctctcactcgttctcgtgatatttggcgcttatcagcaagttcttcgaaggaatccatgaaaggtttccgggctatcgattttattctcgaaaggcggcaagcgatgatgaataccacgctccaagcaacggaatcatcgcagggaacgcacacacttagtggatatggtaatccagcaatgtaccctgaagtgcacaattttggcatgtcgtcgccatttcctggatttccagctctcggcaacttgacggtgttatcagatcaaccagtcatccatcgtaagtga

SEQ ID NO: 353 - protein, 477 aa, Muscodor strobelii
  misc_feature: SGI Peptide ID NO. 559682
  misc_feature (88)..(188): Pfam Id: PF04082 Pfam Desc: Fungal specific transcription factor domain
  misc_feature (113)..(188): Pfam Id: PF04082 Pfam Desc: Fungal specific transcription factor domain
  misc_feature (28)..(465): NCBI GI: 121701153 Blast Desc: fungal specific transcription factor domain protein [Aspergillus clavatus NRRL 1] gi|119396984|gb|EAW07415.1| fungal specific transcription factor domain protein [Aspergillus NRRL 1]
  misc_feature (82)..(418): NCBI GI: 119467444 Blast Desc: fungal specific transcription factor, [Neosartorya fischeri NRRL 181] gi|119405680|gb|EAW15631.1| fungal specific transcription factor, [Neosartorya fischeri NRRL 181]
  misc_feature (1)..(414): NCBI GI: 146323062 Blast Desc: fungal specific transcription factor [Aspergillus fumigatus Af293] gi|129558597|gb|EAL93929.2| fungal specific transcription factor, [Aspergillus fumigatus Af293]
  misc_feature (1)..(414): NCBI GI: 159130022 Blast Desc: fungal specific transcription factor, [Aspergillus fumigatus A1163]
  misc_feature (1)..(414): NCBI GI: 119482131 Blast Desc: fungal specific transcription factor, [Neosartorya fischeri NRRL 181] gi|119409248|gb|EAW19197.1| fungal specific transcription factor, [Neosartorya fischeri NRRL 181]
  misc_feature (31)..(454): NCBI GI: 121701573 Blast Desc: fungal specific transcription factor domain protein [Aspergillus clavatus NRRL 1] gi|119397194|gb|EAW07625.1| fungal specific transcription factor domain protein [Aspergillus NRRL 1]
  misc_feature (13)..(475): NCBI GI: 115391467 Blast Desc: conserved [Aspergillus terreus NIH2624] gi|114194162|gb|EAU35862.1| conserved [Aspergillus terreus NIH2624]
  misc_feature (5)..(422): NCBI GI: 121710204 Blast Desc: fungal specific transcription factor domain protein [Aspergillus clavatus NRRL 1] gi|119400868|gb|EAW11292.1| fungal specific transcription factor domain protein [Aspergillus NRRL 1]
  misc_feature (13)..(414): NCBI GI: 116205828 Blast Desc: CHGG_02207 [Chaetomium globosum CBS 148.51] gi|88182804|gb|EAQ90272.1| CHGG_02207 [Chaetomium globosum CBS 148.51]
  misc_feature (15)..(444): NCBI GI: 238846084 Blast Desc: fungal specific transcription factor domain-containing protein [Microsporum canis CBS 113480]
MSTAVIHGPQFLKEYADFCEDQDRVSCIWLGLLHSILCLGAQFQAARLTAADYEQQGTPKSTDWPALARSLKQKTVECLILGEYTRGGPYALEALMLYFCGEYLFHKDAEIGIWYVAGMIVQLALHMGYHRDPKHFENMSPFESEMRRRVWATIVEIDLGISMQMGLPRIIRVWQADTELPRNILDSDLAKESDELPQARPDSEVTPIMCRIVKAQMTACLGLIWDFSGEIKPHSYTAVMDMDNKLEESHRAIPKGLQWVSITHCITDSPHVLLHRIFLNMMFWKSKIFLHRKYLALTLKENDYMDSRDACLGAALKLLEFHHLLAEETKPLCQLYEERWRISSIMNQDFLLGASILCSYLQQIANGEHEVKETADLSVIVTALTRSRDIWRLSASSSKESMKGFRAIDFILERRQAMMNTTLQATESSQGTHTLSGYGNPAMYPEVHNFGMSSPFPGFPALGNLTVLSDQPVIHRK

SEQ ID NO: 354 - DNA, 2143 bp, Muscodor strobelii
  misc_feature: SGI EST ID NO. CUFF.830.0
  misc_feature: Variant of the nucleotide sequence at SEQ ID NO 352
gaaaaccgaagtatgcagatttctgcgaagatcaggatcgggtctcctgtatctggttagggcttctacattctattctatgtcttggggcacaatttcaggccgctcgcctgacggctgcagattatgagcagcaggggacaccgaaatcgacagactggccggccttagcgagaagcctcaaacagaagacagtagaatgtcttatccttggtgaatatacacgaggcggaccttacgctttggaagctttgatgctatatttttgtggcgagtatctctttcacaaggacgccgagattggcatctggtatgtcgcgggcatgatcgttcaacttgctttacatatgggctatcatagagatcccaaacacttcgagaacatgtcaccattcgaaagcgaaatgagaagacgcgtctgggcaacaatagttgagattgatctggggatttccatgcagatgggtcttcctagaatcattagggtgtggcaagcagacaccgagttacccagaaacattctggatagtgacttggcaaaggaaagcgatgaactgcctcaagcaagacctgactcggaggtaacacccataatgtgtcgcatcgtgaaagcccagatgacagcttgtcttgggttgatatgggacttctccggtgaaatcaagccgcattcctataccgcagtcatggatatggacaacaagctcgaagagtcacatcgtgctatacccaaaggtctacaatgggtatcaatcacgcactgcatcacggactcgcctcatgtcctattgcatagaattttcctgaatatgatgttctggaaatcaaagatttttctccatcgaaaatacctggccctcactctcaaggaaaacgactacatggactccagagatgcgtgcttgggagcggcattaaaattgctcgagtttcatcatcttctagcagaagagacgaagccattgtgtcaattatacgaagagagatggcggatctcttcgattatgaaccaagatttccttctgggggcaagtatactatgctcctatctccagcaaatcgccaatggcgaacatgaagtcaaggagactgctgatctttccgtgattgtcacggctctcactcgttctcgtgatatttggcgcttatcagcaagttcttcgaaggaatccatgaaaggtttccgggctatcgattttattctcgaaaggcggcaagcgatgatgaataccacgctccaagcaacggaatcatcgcagggaacgcacacacttagtggatatggtaatccagcaatgtaccctgaagtgcacaattttggcatgtcgtcgccatttcctggatttccagctctcggcaacttgacggtgttatcagatcaaccagtcatccatcgtaagtgagacatataggtcaagatagaaaataggctaataattcaacgacggtctgaagccttgagcgttctggatacaacagagtggccatggggtttctagtccgaattacagaaattgttccctcagagacagatggcatatattcaagatctcatgcgacacgatcaaacatggtcggccatgaatggaaaagagcatacactttggaataaacctatttacggggtttccgattattatcggactacacataggggctcctctaagacttcattgcgaataaggttatggctggcttaggcgggcttgcaaaattaactacgttctttttatcttgttgcatcacttatttgatcaatagcctcacacgcgacatcaagatatcagaggaaactaggatcttagcagaacatcaaagtttgtgcagacagacaactcgcccagttaaatgtatttttagcactagctgagatgtcgatcgaatgacggatgtcagaaatcagttgcagccgttgatcgcctctcgcccaattgcgattcaagtaacggttcaatccatagtccagcagcgaaccgacgtgcggctgttcatctggcggccgatcactgacctcactgccaacaggatgcggccgcagtctccacacgagttgatgccaatgatgtcggtctgctctcattgtttcaccacgcttccttgttcgttgaagtcgtaccttaccttgcttggccacttgtttaat

SEQ ID NO: 355 - DNA, 381 bp, Muscodor strobelii
  misc_feature: SGI cDNA ID NO. 559683
  misc_feature: Encodes the peptide sequence at SEQ ID NO 356
atgaaatggtttgctcctatttgcccagccggaattttcatctatgcttggaccgtgaactatcatgtccactggatcgttccgataattggcacattcttcatcggactttcaacattgttcgttgtgcttcctgtccagagctatttcgtcgatgctttcggaccagaggctgctgcttcggcactggctgcaaattatctcattcgatctccatttggagcattcttgaccttcgcggcaccaccgctatattcgaaactcgggctcggatggggaaactcggttctgggatttatttgcctcgctttcactcctgtgccatggttattctattactatggtgaaaggatccgaactcgttttccaatcaagctctaa

SEQ ID NO: 356 - protein, 126 aa, Muscodor strobelii
  misc_feature: SGI Peptide ID NO. 559683
  misc_feature (1)..(125): NCBI GI: 119467446 Blast Desc: MFS transporter, [Neosartorya fischeri NRRL 181] gi|119405681|gb|EAW15632.1| MFS transporter, [Neosartorya fischeri NRRL 181]
  misc_feature (1)..(125): NCBI GI: 121701155 Blast Desc: MFS transporter, [Aspergillus clavatus NRRL 1] gi|119396985|gb|EAW07416.1| MFS transporter, [Aspergillus clavatus NRRL 1]
  misc_feature (1)..(126): NCBI GI: 121701575 Blast Desc: MFS transporter, [Aspergillus clavatus NRRL 1] gi|119397195|gb|EAW07626.1| MFS transporter, [Aspergillus clavatus NRRL 1]
  misc_feature (1)..(126): NCBI GI: 119482133 Blast Desc: MFS transporter, [Neosartorya fischeri NRRL 181] gi|119409249|gb|EAW19198.1| MFS transporter, [Neosartorya fischeri NRRL 181]
  misc_feature (1)..(126): NCBI GI: 71002574 Blast Desc: MFS multidrug transporter [Aspergillus fumigatus Af293] gi|66853606|gb|EAL93930.1| MFS multidrug transporter, [Aspergillus fumigatus Af293]
  misc_feature (1)..(126): NCBI GI: 159130023 Blast Desc: MFS multidrug transporter, [Aspergillus fumigatus A1163]
  misc_feature (1)..(126): NCBI GI: 238846083 Blast Desc: fluconazole resistance protein 1 [Microsporum canis CBS 113480]
  misc_feature (1)..(121): NCBI GI: 115391465 Blast Desc: conserved [Aspergillus terreus NIH2624] gi|114194161|gb|EAU35861.1| conserved [Aspergillus terreus NIH2624]
  misc_feature (1)..(121): NCBI GI: 67516915 Blast Desc: AN0739.2 [Aspergillus nidulans FGSC A4] gi|40746225|gb|EAA65381.1| AN0739.2 [Aspergillus nidulans FGSC A4] gi|259488983|tpe|CBF88879.1| TPA: MFS multidrug transporter,
  misc_feature (1)..(125): NCBI GI: 116205826 Blast Desc: CHGG_02206 [Chaetomium globosum CBS 148.51] gi|88182803|gb|EAQ90271.1| CHGG_02206 [Chaetomium globosum CBS 148.51]
MKWFAPICPAGIFIYAWTVNYHVHWIVPIIGTFFIGLSTLFVVLPVQSYFVDAFGPEAAASALAANYLIRSPFGAFLTFAAPPLYSKLGLGWGNSVLGFICLAFTPVPWLFYYYGERIRTRFPIKL

SEQ ID NO: 357 - DNA, 1574 bp, Muscodor strobelii
  misc_feature: SGI EST ID NO. CUFF.841.0
  misc_feature: Variant of the nucleotide sequence at SEQ ID NO 355
ggattcgctataggccctgtcttcattgcaccaatgtctgaactctatgggcgatatatcatataccagacctgcaatcttctctacctcggctttactcttggatgcgcattcagtacaaatatcgcacaattccttatctttcggatattgtgtggccttgctgcttctgggcctttgaccattggaggcggcactattgccgacttcactccgcaggaagagcgtggcagagccatcgcgttgtttggggtaggccctctgttaggccccgtaagtggatggcgcttcaaagtcccctgagataccactgggctgatagaatatctaggtgctaggaccagtaattggtggctttgtttcggagaaggtaggatggcgttggtcattcagaataattgcaattctggcaggagtagttggcgtgatcactttcatcttcatgcgtgaaacgaaagctagcgtactactaagccgtaaggccaaacgtcttagaaaagaaacgggcaacgaacagctacataccggtctaaagcttcctggtacacctggagagatcttgctgcgatccatcacgcgaccagtaaagatattgatttactcccctatcgtcgtagtcctatctctttacactggactgacgtttggtctctcatacttgctcttcaccacttttccgcaagtgtttgaagggacctatgggttttctactggagtctcgggcttgtcctacctcggcttgggcactggattctttgccagcttgtttcttttcgcacgccttagcgataagctactgaagcagaagagaggtagcactgtcgctcgcccggaagaacgtctaatattgatgaaatggtttgctcctatttgcccagccggaattttcatctatgcttggaccgtgaactatcatgtccactggatcgttccgataattggcacattcttcatcggactttcaacattgttcgttgtgcttcctgtccagagctatttcgtcgatgctttcggaccagaggctgctgcttcggcactggctgcaaattatctcattcgatctccatttggagcattcttgaccttcgcggcaccaccgctatattcgaaactcgggctcggatggggaaactcggttctgggatttatttgcctcgctttcactcctgtgccatggttattctattactatggtgaaaggatccgaactcgttttccaatcaagctctaaactagagagaggtatggtctctatcgctctgtactgtgttcgaagttgtcgcaaagggtttcatttaggggcttgggacaaactcaaattctacatagacgagattccttgtttaaaatagatcgtatagaaagtcctgctgaggactaatcaaggaatcacagagtacggtctcgaggtcctttccggatctaagaagcaggctgtattgtgacacaagcactgcaatttcattcgtccctgtgtctggcaaatcctaagtccacaacgaagtcgtacgaagccttgacttagcaaagaaacttcccatatagcgtacttccaataagtcatgctatgatca

SEQ ID NO: 358 - DNA, 1512 bp, Muscodor strobelii
  misc_feature: SGI cDNA ID NO. 559684
  misc_feature: Encodes the peptide sequence at SEQ ID NO 359
atgagttcagatccgggaacggcctccagccatcaagccgatgcttgttcatccaccacagagcgaccaagcgaggaggtacatcttgagtcccagattgtagagaaaaaggatgacccggatccgaatatcgtcacttgggatggacccaacgaccccgaaaatccttataattggcctagaagcaaaaaggttggctatttggcacttttgagtatcacaagtctatactcacaactagcgtcgaccatgttcgctccgggagctaaacagctgatcgatgagttccacgccacaagctccatcgaagcgactttcactgtcagcatttacgtactcggattcgctataggccctgtcttcattgcaccaatgtctgaactctatgggcgatatatcatataccagacctgcaatcttctctacctcggctttactcttggatgcgcattcagtacaaatatcgcacaattccttatctttcggatattgtgtggccttgctgcttctgggcctttgaccattggaggcggcactattgccgacttcactccgcaggaagagcgtggcagagccatcgcgttgtttggggtaggccctctgttaggccccgtgctaggaccagtaattggtggctttgtttcggagaaggtaggatggcgttggtcattcagaataattgcaattctggcaggagtagttggcgtgatcactttcatcttcatgcgtgaaacgaaagctagcgtactactaagccgtaaggccaaacgtcttagaaaagaaacgggcaacgaacagctacataccggtctaaagcttcctggtacacctggagagatcttgctgcgatccatcacgcgaccagtaaagatattgatttactcccctatcgtcgtagtcctatctctttacactggactgacgtttggtctctcatacttgctcttcaccacttttccgcaagtgtttgaagggacctatgggttttctactggagtctcgggcttgtcctacctcggcttgggcactggattctttgccagcttgtttcttttcgcacgccttagcgataagctactgaagcagaagagaggtagcactgtcgctcgcccggaagaacgtctaatattgatgaaatggtttgctcctatttgcccagccggaattttcatctatgcttggaccgtgaactatcatgtccactggatcgttccgataattggcacattcttcatcggactttcaacattgttcgttgtgcttcctgtccagagctatttcgtcgatgctttcggaccagaggctgctgcttcggcactggctgcaaattatctcattcgatctccatttggagcattcttgaccttcgcggcaccaccgctatattcgaaactcgggctcggatggggaaactcggttctgggatttatttgcctcgctttcactcctgtgccatggttattctattactatggtgaaaggatccgaactcgttttccaatcaagctctaa

SEQ ID NO: 359 - protein, 503 aa, Muscodor strobelii
  misc_feature: SGI Peptide ID NO. 559684
  misc_feature (71)..(455): Pfam Id: PF07690 Pfam Desc: Major Facilitator Superfamily
  misc_feature (74)..(499): Pfam Id: PF00083 Pfam Desc: Sugar (and other) transporter
  misc_feature (9)..(502): NCBI GI: 121701155 Blast Desc: MFS transporter, [Aspergillus clavatus NRRL 1] gi|119396985|gb|EAW07416.1| MFS transporter, [Aspergillus clavatus NRRL 1]
  misc_feature (17)..(503): NCBI GI: 121701575 Blast Desc: MFS transporter, [Aspergillus clavatus NRRL 1] gi|119397195|gb|EAW07626.1| MFS transporter, [Aspergillus clavatus NRRL 1]
  misc_feature (25)..(502): NCBI GI: 119467446 Blast Desc: MFS transporter, [Neosartorya fischeri NRRL 181] gi|119405681|gb|EAW15632.1| MFS transporter, [Neosartorya fischeri NRRL 181]
  misc_feature (29)..(464): NCBI GI: 256725441 Blast Desc: NECHADRAFT_95146 [Nectria haematococca mpVI 77-13-4]
  misc_feature (18)..(503): NCBI GI: 238846083 Blast Desc: fluconazole resistance protein 1 [Microsporum canis CBS 113480]
  misc_feature (12)..(497): NCBI GI: 169601800 Blast Desc: SNOG_03776 [Phaeosphaeria nodorum SN15] gi|160706012|gb|EAT88981.2| SNOG_03776 [Phaeosphaeria nodorum SN15]
  misc_feature (16)..(503): NCBI GI: 119482133 Blast Desc: MFS transporter, [Neosartorya fischeri NRRL 181] gi|119409249|gb|EAW19198.1| MFS transporter, [Neosartorya fischeri NRRL 181]
  misc_feature (28)..(498): NCBI GI: 115391465 Blast Desc: conserved [Aspergillus terreus NIH2624] gi|114194161|gb|EAU35861.1| conserved [Aspergillus terreus NIH2624]
  misc_feature (28)..(498): NCBI GI: 67516915 Blast Desc: AN0739.2 [Aspergillus nidulans FGSC A4] gi|40746225|gb|EAA65381.1| AN0739.2 [Aspergillus nidulans FGSC A4] gi|259488983|tpe|CBF88879.1| TPA: MFS multidrug transporter,
  misc_feature (1)..(503): NCBI GI: 256730036 Blast Desc: [Nectria haematococca mpVI 77-13-4]
MSSDPGTASSHQADACSSTTERPSEEVHLESQIVEKKDDPDPNIVTWDGPNDPENPYNWPRSKKVGYLALLSITSLYSQLASTMFAPGAKQLIDEFHATSSIEATFTVSIYVLGFAIGPVFIAPMSELYGRYIIYQTCNLLYLGFTLGCAFSTNIAQFLIFRILCGLAASGPLTIGGGTIADFTPQEERGRAIALFGVGPLLGPVLGPVIGGFVSEKVGWRWSFRIIAILAGVVGVITFIFMRETKASVLLSRKAKRLRKETGNEQLHTGLKLPGTPGEILLRSITRPVKILIYSPIVVVLSLYTGLTFGLSYLLFTTFPQVFEGTYGFSTGVSGLSYLGLGTGFFASLFLFARLSDKLLKQKRGSTVARPEERLILMKWFAPICPAGIFIYAWTVNYHVHWIVPIIGTFFIGLSTLFVVLPVQSYFVDAFGPEAAASALAANYLIRSPFGAFLTFAAPPLYSKLGLGWGNSVLGFICLAFTPVPWLFYYYGERIRTRFPIKL

SEQ ID NO: 360 - DNA, 1574 bp, Muscodor strobelii; identical to SEQ ID NO: 357
  misc_feature: SGI EST ID NO. CUFF.841.0
  misc_feature: Variant of the nucleotide sequence at SEQ ID NO 358

SEQ ID NO: 361 - DNA, 1182 bp, Muscodor strobelii
  misc_feature: SGI cDNA ID NO. 559685
  misc_feature: Reduced expression when VOC is produced
  misc_feature: Encodes the peptide sequence at SEQ ID NO 362
atgttgagcgccatctcgccaaattttgtgcttgaaccggtatcgactaacgatttaattaccgccagccttgccttcggctttactcttgggttcggatggctgacggtctgtactgccataaggcagacatgggtcgcataccgaagaaccggccggaggatattccacaatccttacatatacatgatttggttggagattattgtgtgcctcatatttagcatcatctgctttctgcatctcaaaggaataataccaccttgctttctattttacttctcgattctgacgacatgggcacttcaagtgcaatttttactccagattatcatcaatcgctgtgggttaatcattgcggataagcgtcttgtacgacggctgaaaatagggatcgcggtattcatcaccgttgttaacatctcggtttacaacatatggatacccgctcgtttgcaaatttcggaagcttacatacacacaaatgactggtgggataggtgcgaaaaggtcatctacgccataaccgacgcctgtctcaacatctactttattcgcctggtgcacctcagactggtgcacaatggccttcagaaatatcgacgcttagccaacttcaacactgtcatcatcgtcttctcactcggtatggatgtgttcatcattggtgcgatgagcttacccaattctttcgtgtatatgcaggtgcatccccttgcatacatcgtcaaactcaagatcgaaatgtcgatggcagatctcattggaattattgcgagagacaaaaatatcggcaataatctgaatctctcgagcaatatcaccgggacaaactgcccaattactcagaattttccaacgaatcgtacatctcttacatctagcttgcacccgcagtgtggcttccaggggacaaccgaacgattagagaggttatcagacaatgttgcccgaccggatgctgtttactccgtagggtgtactgccgatcatgggactgaaattaccctccaatcccaaaataacatatataccactacagaagtctgcgtcgagagtgagaaggcatcacgtcagctgtggcacaatgttagtgcgacatcgtcagcgaactgtgaagacgatttgactttgccatgcaagagtctcgagtgggatgctgtagataaaagtcccgtatga

SEQ ID NO: 362 - protein, 393 aa, Muscodor strobelii
  misc_feature: SGI Peptide ID NO. 559685
  misc_feature (1)..(259): NCBI GI: 156060025 Blast Desc: SS1G_02149 [Sclerotinia sclerotiorum 1980] gi|154699559|gb|EDN99297.1| SS1G_02149 [Sclerotinia sclerotiorum 1980]
  misc_feature (63)..(265): NCBI GI: 256725669 Blast Desc: [Nectria haematococca mpVI 77-13-4]
  misc_feature (1)..(234): NCBI GI: 261354338 Blast Desc: conserved [Verticillium albo-atrum VaMs.102]
  misc_feature (63)..(294): NCBI GI: 46111605 Blast Desc: FG02684.1 [Gibberella zeae PH-1]
  misc_feature (1)..(253): NCBI GI: 261360954 Blast Desc: conserved [Verticillium albo-atrum VaMs.102]
  misc_feature (9)..(294): NCBI GI: 169609653 Blast Desc: SNOG_07919 [Phaeosphaeria nodorum SN15] gi|160701889|gb|EAT84195.2| SNOG_07919 [Phaeosphaeria nodorum SN15]
  misc_feature (5)..(311): NCBI GI: 256731622 Blast Desc: [Nectria haematococca mpVI 77-13-4]
  misc_feature (15)..(311): NCBI GI: 256726164 Blast Desc: NECHADRAFT_43317 [Nectria haematococca mpVI 77-13-4]
  misc_feature (18)..(342): NCBI GI: 46122869 Blast Desc: FG05812.1 [Gibberella zeae PH-1]
  misc_feature (5)..(263): NCBI GI: 46126511 Blast Desc: FG07633.1 [Gibberella zeae PH-1]
  misc_feature: Useful for introducing or modulating the production of volatile compounds
MLSAISPNFVLEPVSTNDLITASLAFGFTLGFGWLTVCTAIRQTWVAYRRTGRRIFHNPYIYMIWLEIIVCLIFSIICFLHLKGIIPPCFLFYFSILTTWALQVQFLLQIIINRCGLIIADKRLVRRLKIGIAVFITVVNISVYNIWIPARLQISEAYIHTNDWWDRCEKVIYAITDACLNIYFIRLVHLRLVHNGLQKYRRLANFNTVIIVFSLGMDVFIIGAMSLPNSFVYMQVHPLAYIVKLKIEMSMADLIGIIARDKNIGNNLNLSSNITGTNCPITQNFPTNRTSLTSSLHPQCGFQGTTERLERLSDNVARPDAVYSVGCTADHGTEITLQSQNNIYTTTEVCVESEKASRQLWHNVSATSSANCEDDLTLPCKSLEWDAVDKSPV

SEQ ID NO: 363 - DNA, 3275 bp, Muscodor strobelii
  misc_feature: SGI EST ID NO. CUFF.941.1
  misc_feature: Variant of the nucleotide sequence at SEQ ID NO 361
atctcgtaatgattggtttggtgtacttgcgtacagattaaagttcttcggagcatgacttggaacgcctcgtccttgggcctcacgttctagacctgactcgagtgatgccatttggacccttgggtttgaagatgcagtccgtctcaaagtctatttcatcagttcgccggtagccacatagaaatccactacgtaccacatcatggactttccctttaatgaggagaggcagtcttcttacaaatctcgtcagtattatttgggagctaagaacaacggcaacgcttgaattgtgcaacgtttcctgagtactggcttccctcccaaatatgttcacatgttgagcgccatctcgccaaattttgtgcttgaaccggtatcgactaacgatttaattaccgccagccttgccttcggctttactcttgggttcggatggctgacggtctgtactgccataaggcagacatgggtcgcataccgaagaaccggccggaggatattccacaatccttacatatacatgatttggttggagattattgtgtgcctcatatttagcatcatctgctttctgcatctcaaaggaataataccaccttgctttctattttacttctcgattctgacgacatgggcacttcaagtgcaatttttactccagattatcatcaatcgctgtgggttaatcattgcggataagcgtcttgtacgacggctgaaaatagggatcgcggtattcatcaccgttgttaacatctcggtttacaacatatggatacccgctcgtttgcaaatttcggaagcttacatacacacaaatgactggtgggataggtgcgaaaaggtcatctacgccataaccgacgcctgtctcaacatctactttattcgcctggtgcacctcagactggtgcacaatggccttcagaaatatcgacgcttagccaacttcaacactgtcatcatcgtcttctcactcggtatggatgtgttcatcattggtgcgatgagcttacccaattctttcgtgtatatgcaggtgcatccccttgcatacatcgtcaaactcaagatcgaaatgtcgatggcagatctcattggaattattgcgagagacaaaaatatcggcaataatctgaatctctcgagcaatatcaccgggacaaactgcccaattactcagaattttccaacgaatcgtacatctcttacatctagcttgcacccgcagtgtggcttccaggggacaaccgaacgattagagaggttatcagacaatgttgcccgaccggatgctgtttactccgtagggtgtactgccgatcatgggactgaaattaccctccaatcccaaaataacatatataccactacagaagtctgcgtcgagagtgagaaggcatcacgtcagctgtggcacaatgttagtgcgacatcgtcagcgaactgtgaagacgatttgactttgccatgcaagagtctcgagtgggatgctgtagataaaagtcccgtatgatactgattagctatagagtttgagtactagaaataagtcatatacattatagaatcatactagactatgttttgacctcgaaacgttaacactcttgctcagtagaaccaatctctaccaacttaatgggatgaactatgatcgaaggaaccgcgtggcaatgttgtgattcgacaagcattaattggggatccattgagaggtgtctattcaaaggaagaaataggcccgtcattgaacaaggtcagaatacatcttgaagcggcatgacgccatatgtcaagatacatgtgacgtgactcagacaccatcatagtcatttcgagtgtttgcaagctattaatcctcccaattacgacggctttgctttcctattctttgatcccgtgaccctcgccaaaaggctaacagtagccgctgcttcgttgctaatcttgacacgatgatactaaacttaataagtttaacatccatggggatatcgtagcttagccgtataaagtggatattgttcatccctcggccactctgtccgattttcgaaatccgtgtctcgagggtcccgtgtcgctcgattgggaattatgacgagatttgcattttgtcaagtgttcaaaatagcactaatgcagcccgggcaatttttcaagccctccatatgagtgacagttgagttctttagacagcagttgtcggtagcatgttgagacatgttgattgagtatgtgaaagatccgcacttgtctgtccgaccggactgagatgatctgtaagagtaatccccacacgcttgcaagcaatcttgcattgagtaagaggtgagacatatgagatcggataaagtgatattgttgccatctccgtctatcctgtagcctgttccaaagtccacatcgcagtagacggtgaatttggttttcccggtgctcgtcgtctgtgtagtggcggcaagctcggtgcaattatcgccaagactgtaaacgttcgtcggtaactcaactacgtaatcgacgacgagtccgccaacagttgtctcaagtgctggagcgcttgatgtcgtcgatacagagtccgtggatgtcggagtcgtagtctgcggacttgcagaagtaacagacgcagaaacagcttgataatgcctagctagcaagtgagcttcgagactgcacaactaaggttgagaaatttggacaattctcatttaacataccttagatctgcctcgcaactagataacttcgagccgacaccgcctccgacaacagcaccaactatcaatgctgctgcaacgccagcaacaagaggccaccagggccacctttttctcgatggcggattcacattcatcgcctgcacttctggagtatgttgttgttgttcaacatattgccagggcggctgcggttcctgttgcgcaaaagcgtaatggcccttatattggtctgtcatcgcttcgctgggttcatgctggcttatcggagattgcactgacccttgcgtcggcgatgcagaaggatatcggggtgactggtgttggggatgcacgacctcaaggccagaagattcaaacgagacaacctccatggctcttaatggtcgttaatccgatgatcacgggctaaattgagagcctcgaacaacgaggtgaggacattagaaagggagcaaccgtcaagcgccatcgcgcgattcctttctgtatcagtgtgctcgagtgaggttgcattcgttaggaccccaacgctgccccccg

SEQ ID NO: 364 - DNA, 1014 bp, Muscodor strobelii
  misc_feature: SGI cDNA ID NO. 559686
  misc_feature: Encodes the peptide sequence at SEQ ID NO 365
atgttgagcgccatctcgccaaattttgtgcttgaaccggtatcgactaacgatttaattaccgccagccttgccttcggctttactcttgggttcggctttctattttacttctcgattctgacgacatgggcacttcaagtgcaatttttactccagattatcatcaatcgctgtgggttaatcattgcggataagcgtcttgtacgacggctgaaaatagggatcgcggtattcatcaccgttgttaacatctcggtttacaacatatggatacccgctcgtttgcaaatttcggaagcttacatacacacaaatgactggtgggataggtgcgaaaaggtcatctacgccataaccgacgcctgtctcaacatctactttattcgcctggtgcacctcagactggtgcacaatggccttcagaaatatcgacgcttagccaacttcaacactgtcatcatcgtcttctcactcggtatggatgtgttcatcattggtgcgatgagcttacccaattctttcgtgtatatgcaggtgcatccccttgcatacatcgtcaaactcaagatcgaaatgtcgatggcagatctcattggaattattgcgagagacaaaaatatcggcaataatctgaatctctcgagcaatatcaccgggacaaactgcccaattactcagaattttccaacgaatcgtacatctcttacatctagcttgcacccgcagtgtggcttccaggggacaaccgaacgattagagaggttatcagacaatgttgcccgaccggatgctgtttactccgtagggtgtactgccgatcatgggactgaaattaccctccaatcccaaaataacatatataccactacagaagtctgcgtcgagagtgagaaggcatcacgtcagctgtggcacaatgttagtgcgacatcgtcagcgaactgtgaagacgatttgactttgccatgcaagagtctcgagtgggatgctgtagataaaagtcccgtatga

SEQ ID NO: 365 - protein, 337 aa, Muscodor strobelii
  misc_feature: SGI Peptide ID NO. 559686
  misc_feature (33)..(237): NCBI GI: 46111605 Blast Desc: FG02684.1 [Gibberella zeae PH-1]
  misc_feature (33)..(203): NCBI GI: 156060025 Blast Desc: SS1G_02149 [Sclerotinia sclerotiorum 1980] gi|154699559|gb|EDN99297.1| SS1G_02149 [Sclerotinia sclerotiorum 1980]
  misc_feature (33)..(250): NCBI GI: 189205703 Blast Desc: conserved [Pyrenophora tritici-repentis Pt-1C-BFP] gi|187975279|gb|EDU41905.1| conserved [Pyrenophora tritici-repentis Pt-1C-BFP]
  misc_feature (34)..(238): NCBI GI: 169609653 Blast Desc: SNOG_07919 [Phaeosphaeria nodorum SN15] gi|160701889|gb|EAT84195.2| SNOG_07919 [Phaeosphaeria nodorum SN15]
  misc_feature (36)..(255): NCBI GI: 256731622 Blast Desc: [Nectria haematococca mpVI 77-13-4]
  misc_feature (34)..(178): NCBI GI: 261354338 Blast Desc: conserved [Verticillium albo-atrum VaMs.102]
  misc_feature (34)..(221): NCBI GI: 169611022 Blast Desc: SNOG_08620 [Phaeosphaeria nodorum SN15] gi|160702203|gb|EAT83788.2| SNOG_08620 [Phaeosphaeria nodorum SN15]
  misc_feature (34)..(255): NCBI GI: 256726164 Blast Desc: NECHADRAFT_43317 [Nectria haematococca mpVI 77-13-4]
  misc_feature (1)..(197): NCBI GI: 261360954 Blast Desc: conserved [Verticillium albo-atrum VaMs.102]
  misc_feature (36)..(286): NCBI GI: 46122869 Blast Desc: FG05812.1 [Gibberella zeae PH-1]
MLSAISPNFVLEPVSTNDLITASLAFGFTLGFGFLFYFSILTTWALQVQFLLQIIINRCGLIIADKRLVRRLKIGIAVFITVVNISVYNIWIPARLQISEAYIHTNDWWDRCEKVIYAITDACLNIYFIRLVHLRLVHNGLQKYRRLANFNTVIIVFSLGMDVFIIGAMSLPNSFVYMQVHPLAYIVKLKIEMSMADLIGIIARDKNIGNNLNLSSNITGTNCPITQNFPTNRTSLTSSLHPQCGFQGTTERLERLSDNVARPDAVYSVGCTADHGTEITLQSQNNIYTTTEVCVESEKASRQLWHNVSATSSANCEDDLTLPCKSLEWDAVDKSPV

SEQ ID NO: 366 - DNA, 3275 bp, Muscodor strobelii; identical to SEQ ID NO: 363
  misc_feature: SGI EST ID NO. CUFF.941.1
  misc_feature: Variant of the nucleotide sequence at SEQ ID NO 364

SEQ ID NO: 367 - DNA, 1692 bp, Muscodor strobelii
  misc_feature: SGI cDNA ID NO. 559687
  misc_feature: Encodes the peptide sequence at SEQ ID NO 368
atggcttctacgtctactgccccaccggtgtacgccgacgccatttaccaagctgcgcatgaggaagtgtactctaagccgctggaggctgaaattgaaaccgtactgccacctggagtatctgaggagaaatttgcacttgctatcgagaatatcacttccattctcgggtcagacgctgttttcacgggctcctccctcaaatactatgtagacccttacgatattcccgaagcaggcgagacacgaaatgtaccaagtgcagcagtgtgtccatcgtcagtcttagagctgcaaaaaattctcgaagttgtgaatgaccacaagattccggtttggacattctcgcgcgggaagaatctaggttatggcggccctgcgccggccgtgcctggctctattgcacttgatctacaccgcatgaacaaaattttagaagtcaacgagaagttcggatacgcagtcgttgagccgggtgtttcgtttggagatctctataattactgcgttgacagaaaattgaaggtttggccgagcacggcatcgttaggatggggcagtgtgataggcaataccctcgatagaggtatggggttcattcccaccgccgtgcatcatgagcacatcgcaggcatggaagtcatactcgcgaacggtgacatagttcgaacggggcagttcgccatgactacttctccatcagcgcatcttacgaaactcacattcggtccttcgattgatggtctattcttacagagcaatttgggaattgtaactaagatgggcattatgcttacaccacagccagagtcgtatatggcatgttcatttgatatgccggattttgacgaccttgagacaatcgtggatgtcttcggcgagatgaggcgaaatggaactttgccatatatggtttacgtgttttatatcaatgaatgggccgccattttcggtaagcgttcagactggtggaaaggcgaagggccaattcctgaatggcgacttgaagaaatgaagggcgagcttgatatcggcatctggactgtgaaattcgggctatatggcccaactggtattattcaagcgcagtatgccgaagtgttgagagtcgtcacagagaaaatcccgaagggacggttgcaacaatccctatttagcggcaaagacggtgggctaatcgacgccatggctgttccacagcctcatggcgggatacgcgttggcattccgagcatgtggagtattcctatggtggacttctacaatgcgcaggagaattcagttggtgctcatggcgcgtactcacctatagtaccgcttgatggaaaaactgtgctcgactgggctaaagctgcaaagaaggcctacgagagccatggtttcgacttgttatgtgactttttcatgcatgagcgctacgccctattcgtctgcatgctatgcttcgacaagatgagcaaagagcagcgagttggagttcataaggtattttacgatttatttgacgagggttcaaaacgaggatttgcgaagtatcgagcgcatattaaacacatggagcacaatgcgggcctttttgatttcaatgaccatgcatatcgccgttttgttgagacactcaaggatagtcttgacccgaatggcatcttgtcgccgggtaagatggggatttggcccaagaagtccgaatga

SEQ ID NO: 368 - protein, 563 aa, Muscodor strobelii
  misc_feature: SGI Peptide ID NO. 559687
  misc_feature (266)..(555): Pfam Id: PF02913 Pfam Desc: FAD linked oxidases, C-terminal domain
  misc_feature (86)..(225): Pfam Id: PF01565 Pfam Desc: FAD binding domain
  misc_feature (476)..(555): Pfam Id: PF02913 Pfam Desc: FAD linked oxidases, C-terminal domain
  misc_feature (9)..(561): NCBI GI: 189193891 Blast Desc: 4-cresol dehydrogenase [Pyrenophora tritici-repentis Pt-1C-BFP] gi|187978848|gb|EDU45474.1| 4-cresol dehydrogenase [Pyrenophora tritici-repentis Pt-1C-BFP]
  misc_feature (1)..(558): NCBI GI: 212527636 Blast Desc: D-lactate dehydrogenase, [Penicillium marneffei ATCC 18224] gi|210073373|gb|EEA27460.1| D-lactate dehydrogenase, [Penicillium marneffei ATCC 18224]
  misc_feature (11)..(555): NCBI GI: 169601956 Blast Desc: SNOG_03855 [Phaeosphaeria nodorum SN15] gi|160706045|gb|EAT89060.2| SNOG_03855 [Phaeosphaeria nodorum SN15]
  misc_feature (4)..(561): NCBI GI: 256731972 Blast Desc: NECHADRAFT_40463 [Nectria haematococca mpVI 77-13-4]
  misc_feature (92)..(544): NCBI GI: 171694740 Blast Desc: protein product [Podospora anserina] gi|170947612|emb|CAP59774.1| protein product [Podospora anserina]
  misc_feature (35)..(562): NCBI GI: 256725129 Blast Desc: NECHADRAFT_55397 [Nectria haematococca mpVI 77-13-4]
  misc_feature (35)..(561): NCBI GI: 240111167 Blast Desc: FAD binding domain containing protein [Coccidioides posadasii C735 delta SOWgp]
  misc_feature (34)..(563): NCBI GI: 67541809 Blast Desc: AN7068.2 [Aspergillus nidulans FGSC A4] gi|40742007|gb|EAA61197.1| AN7068.2 [Aspergillus nidulans FGSC A4] gi|259483615|tpe|CBF79150.1| TPA: aryl-alcohol oxidase; FGSC
  misc_feature (35)..(561): NCBI GI: 119189633 Blast Desc: conserved [Coccidioides immitis RS]
  misc_feature (35)..(557): NCBI GI: 46118736 Blast Desc: FG04728.1 [Gibberella zeae PH-1]
  misc_feature (35)..(561): SWISSPROT Homolog: EC 1.1.3.38 Vanillyl-alcohol oxidase
MASTSTAPPVYADAIYQAAHEEVYSKPLEAEIETVLPPGVSEEKFALAIENITSILGSDAVFTGSSLKYYVDPYDIPEAGETRNVPSAAVCPSSVLELQKILEVVNDHKIPVWTFSRGKNLGYGGPAPAVPGSIALDLHRMNKILEVNEKFGYAVVEPGVSFGDLYNYCVDRKLKVWPSTASLGWGSVIGNTLDRGMGFIPTAVHHEHIAGMEVILANGDIVRTGQFAMTTSPSAHLTKLTFGPSIDGLFLQSNLGIVTKMGIMLTPQPESYMACSFDMPDFDDLETIVDVFGEMRRNGTLPYMVYVFYINEWAAIFGKRSDWWKGEGPIPEWRLEEMKGELDIGIWTVKFGLYGPTGIIQAQYAEVLRVVTEKIPKGRLQQSLFSGKDGGLIDAMAVPQPHGGIRVGIPSMWSIPMVDFYNAQENSVGAHGAYSPIVPLDGKTVLDWAKAAKKAYESHGFDLLCDFFMHERYALFVCMLCFDKMSKEQRVGVHKVFYDLFDEGSKRGFAKYRAHIKHMEHNAGLFDFNDHAYRRFVETLKDSLDPNGILSPGKMGIWPKKSE

SEQ ID NO: 369 - DNA, 3255 bp, Muscodor strobelii
  misc_feature: SGI EST ID NO. CUFF.847.0
  misc_feature: Variant of the nucleotide sequence at SEQ ID NO 367
cgatgattggtatcaccgattgaattatttctgaaccatatttcgacggcgcgatgatctattgcacacacctctgatctaatcgaccaaatttgatagagtatgtatcgctatgctcagatgtcaatcacagagcggatcaggatgagtaccgcgttggaagtaataagttatcctcggtcgattcgatttgccgtatcatggataaatgaaaagaggcacaatgcgggtagggtataattgccaagcatgtgcaccatgttggagcagttggctgctcgcgcgacaacattgttcatattcaaatttgacagcgttcgcatcttgtactgaaaacgtgatttcgtgactttcactgttgcaattatagggacacgatggcttctacgtctactgccccaccggtgtacgccgacgccatttaccaagctgcgcatgaggaagtgtactctaagccgctggaggctgaaattgaaaccgtactgccacctggagtatctgaggagaaatttgcacttgctatcgagaatatcacttccattctcgggtcagacgctgttttcacgggctcctccctcaaatactatgtagacccttacgatattcccgaagcaggcgagacacgaaatgtaccaagtgcagcagtgtgtccatcgtcagtcttagagctgcaaaaaattctcgaagttgtgaatgaccacaagattccggtttggacattctcgcgcgggaagaatctaggttatggcggccctgcgccggccgtgcctggctctattgcacttgatctacaccgcatgaacaaaattttagaagtcaacgagaagttcggatacgcagtcgttgagccgggtgtttcgtttggagatctctataattactgcgttgacagaaaattgaaggtttggccgagcacggcatcgttaggatggggcagtgtgataggcaataccctcgatagaggtatggggttcattcccaccgccgtgcatcatgagcacatcgcaggcatggaagtcatactcgcgaacggtgacatagttcgaacggggcagttcgccatgactacttctccatcagcgcatcttacgaaactcacattcggtccttcgattgatggtctattcttacagagcaatttgggaattgtaactaagatgggcattatgcttacaccacagccagagtcgtatatggcatgttcatttgatatgccggattttgacgaccttgagacaatcgtggatgtcttcggcgagatgaggcgaaatggaactttgccatatatggtttacgtgttttatatcaatgaatgggccgccattttcggtaagcgttcagactggtggaaaggcgaagggccaattcctgaatggcgacttgaagaaatgaagggcgagcttgatatcggcatctggactgtgaaattcgggctatatggcccaactggtattattcaagcgcagtatgccgaagtgttgagagtcgtcacagagaaaatcccgaagggacggttgcaacaatccctatttagcggcaaagacggtgggctaatcgacgccatggctgttccacagcctcatggcgggatacgcgttggcattccgagcatgtggagtattcctatggtggacttctacaatgcgcaggagaattcagttggtgctcatggcgcgtactcacctatagtaccgcttgatggaaaaactgtgctcgactgggctaaagctgcaaagaaggcctacgagagccatggtttcgacttgttatgtgactttttcatgcatgagcgctacgccctattcgtctgcatgctatgcttcgacaagatgagcaaagagcagcgagttggagttcataaggtattttacgatttatttgacgagggttcaaaacgaggatttgcgaagtatcgagcgcatattaaacacatggagcacaatgcgggcctttttgatttcaatgaccatgcatatcgccgttttgttgagacactcaaggatagtcttgacccgaatggcatcttgtcgccgggtaagatggggatttggcccaagaagtccgaatgagtttggccatactacgtacagtattcatttctcgtagggtttctggtgtacccccgtggacacctaaattcggatgaaacaccaaaatgtcaggtagctcaaacatcgtattttacaaatggcctgatactgtcgtgtctatcgtaaacctacaattttgcttttggaccttgacttgccttccactccgcaacccatttagtgccttcggctcttctcttcttttctgttttcgtgaagctcaggtctccagcagccaacttgcccttaacatctagtagcgcgatattttctctatacatctctgcctttaacaagccatatgaacctttagtacccttcttcacgagtgctcgctcatcaatgaacttcagcgccgcttctagctcacccacagcatccacaagtccggcatcaagagctgtcttcgcgtcgtagcgttttgcctccaagactagcgagcgatacacaagaggcgaacacttagtccggaatattcctgccaaaggtgggggtaaaggagcgccgaattcgagctcgttgacgcagagtaagccacgcttgtcggtgaagactctgtagtcatggtgcatggcgagcattataccaccagcaaatgcatgtccgttcattaatgccacagtaggcatagagtatgtcagaaatcttcgatacatcggatatagactgttttcccagaaacttggatcggccattgcgagaccgagatcaaggccatttgagtagaactttgcgatgccagaggttgtgacaagtactccaggttcgtgcccgtattctatgacgtcgagtgctgtgatcattgcattgcagaatgctggtgtgagtctattatcgacgggtgatgtgaacgtcaagaggtagacttgaggtgccggccttgagcagacaatttgcccgcctgggtggttccctagggtagggatgggcaccgaaaacaattcttctgatgccattgtgattatcggtaagtataacgtgtataatattaagtgtcaggcagattgattcgtaaaagatgtcttcaagatcaaatgtatacttgtattgaagtgaaagacatgaagccgatgtcagacaagaccgacgcgtgcgacaacctcggcatccccacttttcgtcatcctcattcctccctcgattctgtcagattatacggcacaac

SEQ ID NO: 370 - DNA, 828 bp, Muscodor strobelii
  misc_feature: SGI cDNA ID NO. 559688
  misc_feature: Reduced expression when VOC is produced
  misc_feature: Encodes the peptide sequence at SEQ ID NO 371
atggcatcagaagaattgttttcggtgcccatccctaccctagggaaccacccaggcgggcaaattgtctgctcaaggccggcacctcaagtctacctcttgacgttcacatcacccgtcgataatagactcacaccagcattctgcaatgcaatgatcacagcactcgacgtcatagaatacgggcacgaacctggagtacttgtcacaacctctggcatcgcaaagttctactcaaatggccttgatctcggtctcgcaatggccgatccaagtttctgggaaaacagtctatatccgatgtatcgaagatttctgacatactctatgcctactgtggcattaatgaacggacatgcatttgctggtggtataatgctcgccatgcaccatgactacagagtcttcaccgacaagcgtggcttactctgcgtcaacgagctcgaattcggcgctcctttacccccacctttggcaggaatattccggactaagtgttcgcctcttgtgtatcgctcgctagtcttggaggcaaaacgctacgacgcgaagacagctcttgatgccggacttgtggatgctgtgggtgagctagaagcggcgctgaagttcattgatgagcgagcactcgtgaagaagggtactaaaggttcatatggcttgttaaaggcagagatgtatagagaaaatatcgcgctactagatgttaagggcaagttggctgctggagacctgagcttcacgaaaacagaaaagaagagaagagccgaaggcactaaatgggttgcggagtggaaggcaagtcaaggtccaaaagcaaaattgtag

SEQ ID NO: 371 - protein, 275 aa, Muscodor strobelii
  misc_feature: SGI Peptide ID NO. 559688
  misc_feature (32)..(197): Pfam Id: PF00378 Pfam Desc: Enoyl-CoA hydratase/isomerase family
  misc_feature (32)..(140): Pfam Id: PF00378 Pfam Desc: Enoyl-CoA hydratase/isomerase family
  misc_feature (3)..(270): NCBI GI: 261352854 Blast Desc: enoyl-CoA hydratase/isomerase family protein [Verticillium albo-atrum VaMs.102]
  misc_feature (6)..(275): NCBI GI: 154314066 Blast Desc: BC1G_04976 [Botryotinia fuckeliana B05.10] gi|150849122|gb|EDN24315.1| BC1G_04976 [Botryotinia fuckeliana B05.10]
  misc_feature (6)..(275): NCBI GI: 171690062 Blast Desc: protein product [Podospora anserina] gi|170944986|emb|CAP71097.1| protein product [Podospora anserina]
  misc_feature (6)..(264): NCBI GI: 85081950 Blast Desc: NCU03542 [Neurospora crassa OR74A] gi|9368571|emb|CAB98231.1| conserved [Neurospora crassa] gi|28917899|gb|EAA27585.1| NCU03542 [Neurospora crassa OR74A]
  misc_feature (6)..(235): NCBI GI: 169763092 Blast Desc: [Aspergillus oryzae RIB40] gi|238488953|ref|XP_002375714.1| enoyl-CoA hydratase/isomerase family protein [Aspergillus flavus NRRL3357] protein product
  misc_feature (6)..(269): NCBI GI: 145250727 Blast Desc: An15g03390 [Aspergillus niger] gi|134082399|emb|CAK42414.1| protein product [Aspergillus niger]
  misc_feature (6)..(272): NCBI GI: 115401718 Blast Desc: conserved [Aspergillus terreus NIH2624] gi|114190388|gb|EAU32088.1| conserved [Aspergillus terreus NIH2624]
  misc_feature (6)..(256): NCBI GI: 119481837 Blast Desc: enoyl-CoA hydratase/isomerase family protein [Neosartorya fischeri NRRL 181] gi|119409101|gb|EAW19050.1| enoyl-CoA hydratase/isomerase family protein [Neosartorya NRRL
  misc_feature (6)..(265): NCBI GI: 256730514 Blast Desc: [Nectria haematococca mpVI 77-13-4]
  misc_feature (6)..(235): NCBI GI: 255930919 Blast Desc: Pc12g01170 [Penicillium chrysogenum Wisconsin 54-1255] gi|211581635|emb|CAP79744.1| Pc12g01170 [Penicillium chrysogenum Wisconsin 54-1255]
  misc_feature: Useful for introducing or modulating the production of volatile compounds
MASEELFSVPIPTLGNHPGGQIVCSRPAPQVYLLTFTSPVDNRLTPAFCNAMITALDVIEYGHEPGVLVTTSGIAKFYSNGLDLGLAMADPSFWENSLYPMYRRFLTYSMPTVALMNGHAFAGGIMLAMHHDYRVFTDKRGLLCVNELEFGAPLPPPLAGIFRTKCSPLVYRSLVLEAKRYDAKTALDAGLVDAVGELEAALKFIDERALVKKGTKGSYGLLKAEMYRENIALLDVKGKLAAGDLSFTKTEKKRRAEGTKWVAEWKASQGPKAKL

SEQ ID NO: 372 - DNA, 1545 bp, Muscodor strobelii
  misc_feature: SGI cDNA ID NO. 559689
  misc_feature: Encodes the peptide sequence at SEQ ID NO 373
atggctggcaagaactcagacgatgacactagtgacgatggaaaagtagcctgtccatatcacacagatccaccaaaatgcgaaccaccgaggacactacaactcatgcactggcacgttttcaaacaccatgaagaacactacgaacaattcgcaaatgaccatccgttcgatagagctgcaaacccggagactcgatcgcttgttgggaaactcaagtgtagccattgcggatacagacgtacccgaacctggaagacgaccggcaggtccaccacgccccttcctccaagagtcgcgccgagagctgcgccggcacttgcggcaacaacttcatcttccaaagggggtgcccaagcgaaggccaaagcaaaggctaaggtagatgtcaacgagactatcgagcagcgagtgctgcgctatggccaggaacgcggttatggcaaaccaccgtggctcactgacccaatcaaacacataaccagactcgtaattgacgagatcgttgaggaagccccaaatgttttgacgatcagtgaagtcaacaaatacattgatgaactgtgccgcgctttcagtaacaacggatcgttcgagcgagtaactctcgaacaacacataaaggacaacagacctgtattgcgcgagatcgagtacactacagcagtgtatacggcgttcaagaaaggaggtttcaacgaggatgaagaacccagtgatctgatacaaggctcgaaggcctggtctatggcggatgtgttcatgctaggaatcactttcgcgaacgatctgagccccgaagaaactgagagatatttcaaacacataccgcggaacgagagacccaaaataggccggctgctgccgagtcttggagatactgctcgggccaagatgtccgatgaagtagtcgagagcctaatccacggatcagacaaacaaccaggagataatgatcaagcgcagcccggaccatcaaaaagagcatccgaacgactcaaaggtaaaggcaaggaaaaggatgtcgtcagccatcctgaacccgatgaccagcctccagttcctacattcaaatctctatctgccgccacgccaggcgctcgtgcggcgtccgaacccggtccgtctggcacccagccaacgcctagcaaattagtagcaccagcacagtctccgaatgaagtcctcagatcgataggcaagttaatcaacgatcacatcgcggaatcttccaattccccggaaactcccacgccgattaggacggagggacccgtgtctaccacggccccaaatgtgaagacagcccgtagcaaagcgaaggcaacagaacaggaaccagagccggacgatgaacaagaacagaaatcaaacgctcaagagaaacccaaagcccgtgtatcgatatttggagcagtgagtctccaacacaaaatcaacgatgtcgtcaaacagatggatgacacgagaacaagaactaacgtcgctggtagggtaaagccaggaaatagcttaggttggtgggactcaacatggtcgttctga

SEQ ID NO: 373 - protein, 514 aa, Muscodor strobelii
  misc_feature: SGI Peptide ID NO. 559689
MAGKNSDDDTSDDGKVACPYHTDPPKCEPPRTLQLMHWHVFKHHEEHYEQFANDHPFDRAANPETRSLVGKLKCSHCGYRRTRTWKTTGRSTTPLPPRVAPRAAPALAATTSSSKGGAQAKAKAKAKVDVNETIEQRVLRYGQERGYGKPPWLTDPIKHITRLVIDEIVEEAPNVLTISEVNKYIDELCRAFSNNGSFERVTLEQHIKDNRPVLREIEYTTAVYTAFKKGGFNEDEEPSDLIQGSKAWSMADVFMLGITFANDLSPEETERYFKHIPRNERPKIGRLLPSLGDTARAKMSDEVVESLIHGSDKQPGDNDQAQPGPSKRASERLKGKGKEKDVVSHPEPDDQPPVPTFKSLSAATPGARAASEPGPSGTQPTPSKLVAPAQSPNEVLRSIGKLINDHIAESSNSPETPTPIRTEGPVSTTAPNVKTARSKAKATEQEPEPDDEQEQKSNAQEKPKARVSIFGAVSLQHKINDVVKQMDDTRTRTNVAGRVKPGNSLGWWDSTWSF

SEQ ID NO: 374 - DNA, 921 bp, Muscodor strobelii
  misc_feature: SGI cDNA ID NO. 559690
  misc_feature: Encodes the peptide sequence at SEQ ID NO 375
atggcgacacccaagttcaacaccaagtcgcccactatcaagcgcattttgcgcgaagcagccgagctgtccaactcgccctcgccagactacaccgcatccccactagagtccgacctcttcgagtggcacttcaccctcaaaggaccccccaaatccccattcgccgagggcatctaccacggccgcatcgtcctcccacccgcctaccctctcagcccgccctccttccgcttcctgaccccgagcggccgcttcgagcccaaccgcgagatctgcctcagtatatccggccatcacgaggagacatggcagcccgcctggggcgtgcgcaccgccatcgtcgccctgcgcgcatttatggagaccggcgcaaccggccagatcggtggcctagatacgagtgacgctgtacggacgagactcgcggcgtccagcaagtcctggcgctgccctacgtgtgcaaggagtaacgaggagatcatctccgagtgcgagcagagttgcaaggatgccggagaatccgcacaaagcaacgaggtcgagatccccgcagagctcaagatgggattccgggacgagatggagaaagccaaggccgccgctgctgctgcggacggggccaaggatgacgcagagagtgccgagctggccgagggtttcgtgcagaccattccggaacggttaccggatgcgtctactgccgcagctgcagcactaccgccagcgaggccagctcagagtgttccggcaccgacgggaacagttccagtaccaaatcccgtcgccgccactaccgtacgaactcggcaacctgggcccacgaccgggggcgaaggtgtaccgatctggatcgactacgccatcaccatactgtctatcatgcttgtagctattatactcaaggttgtactgcgatag

SEQ ID NO: 375 - protein, 306 aa, Muscodor strobelii
  misc_feature: SGI Peptide ID NO. 559690
  misc_feature (15)..(151): Pfam Id: PF00179 Pfam Desc: Ubiquitin-conjugating enzyme
  misc_feature (15)..(121): Pfam Id: PF00179 Pfam Desc: Ubiquitin-conjugating enzyme
  misc_feature (1)..(305): NCBI GI: 38566817 Blast Desc: related to non-canonical ubiquitin conjugating enzyme 1 [Neurospora crassa]
  misc_feature (1)..(305): NCBI GI: 46126173 Blast Desc: FG07464.1 [Gibberella zeae PH-1]
  misc_feature (1)..(272): NCBI GI: 85099285 Blast Desc: NCU01268 [Neurospora crassa OR74A] gi|28922267|gb|EAA31510.1| conserved [Neurospora crassa OR74A]
  misc_feature (1)..(305): NCBI GI: 256730884 Blast Desc: NECHADRAFT_63363 [Nectria haematococca mpVI 77-13-4]
  misc_feature (3)..(305): NCBI GI: 116206570 Blast Desc: CHGG_02578 [Chaetomium globosum CBS 148.51] gi|88183175|gb|EAQ90643.1| CHGG_02578 [Chaetomium globosum CBS 148.51]
  misc_feature (1)..(289): NCBI GI: 156040734 Blast Desc: SS1G_11345 [Sclerotinia sclerotiorum 1980] gi|154695729|gb|EDN95467.1| SS1G_11345 [Sclerotinia sclerotiorum 1980]
  misc_feature (4)..(305): NCBI GI: 154303826 Blast Desc: BC1G_08797 [Botryotinia fuckeliana B05.10] gi|150854381|gb|EDN29573.1| BC1G_08797 [Botryotinia fuckeliana B05.10]
  misc_feature (1)..(305): NCBI GI: 145606236 Blast Desc: MGG_02446 [Magnaporthe grisea 70-15] gi|145013950|gb|EDJ98591.1| MGG_02446 [Magnaporthe grisea 70-15]
  misc_feature (1)..(167): NCBI GI: 261351486 Blast Desc: ubiquitin-conjugating enzyme [Verticillium albo-atrum VaMs.102]
  misc_feature (10)..(208): NCBI GI: 67900702 Blast Desc: AN7338.2 [Aspergillus nidulans FGSC A4] gi|40742519|gb|EAA61709.1| AN7338.2 [Aspergillus nidulans FGSC A4] gi|259483307|tpe|CBF78587.1| TPA: ubiquitin conjugating FGSC
  misc_feature (5)..(188): SWISSPROT Homolog: EC 6.3.2.19 Ubiquitin--protein ligase
MATPKFNTKSPTIKRILREAAELSNSPSPDYTASPLESDLFEWHFTLKGPPKSPFAEGIYHGRIVLPPAYPLSPPSFRFLTPSGRFEPNREICLSISGHHEETWQPAWGVRTAIVALRAFMETGATGQIGGLDTSDAVRTRLAASSKSWRCPTCARSNEEIISECEQSCKDAGESAQSNEVEIPAELKMGFRDEMEKAKAAAAAADGAKDDAESAELAEGFVQTIPERLPDASTAAAAALPPARPAQSVPAPTGTVPVPNPVAATTVRTRQPGPTTGGEGVPIWIDYAITILSIMLVAIILKVVLR

SEQ ID NO: 376 - DNA, 1681 bp, Muscodor strobelii
  misc_feature: SGI EST ID NO. CUFF.866.0
  misc_feature: Variant of the nucleotide sequence at SEQ ID NO 374
cgcggactcaaaaatggattgggagttatcaactcatcaatgtcgtctcggtatgtggcaccaacacacgctaggcgcctaccccagagatacggtagtgcccagctaatgggtccgtgtgctagggatatcctagccgcgtgtagctccagctgttctccacctgccacatttgtgctgaaagtcagaaagcctctccgtttcactggaccgtcaccaagatcgtagttgatgccaggttgcctgtatcggacttattcgccattcctcttcaaccatcatttacagtacttatccttccctaaatgccaattcatatacgcttctccctagcttgatagcaagatcgacttagtgtatttcagatatcactacagcattatatacctcctactcaccaaatagcaactctgagtctcgtcatctttgtcctggcgatgacctcacctctaccctaaaccgccccaccaccgcgcgttctcacatcgtcgttgtcgcaaaacgtccacgatggcgacacccaagttcaacaccaagtcgcccactatcaagcgcattttgcgcgaagcagccgagctgtccaactcgccctcgccagactacaccgcatccccactagagtccgacctcttcgagtggcacttcaccctcaaaggaccccccaaatccccattcgccgagggcatctaccacggccgcatcgtcctcccacccgcctaccctctcagcccgccctccttccgcttcctgaccccgagcggccgcttcgagcccaaccgcgagatctgcctcagtatatccggccatcacgaggagacatggcagcccgcctggggcgtgcgcaccgccatcgtcgccctgcgcgcatttatggagaccggcgcaaccggccagatcggtggcctagatacgagtgacgctgtacggacgagactcgcggcgtccagcaagtcctggcgctgccctacgtgtgcaaggagtaacgaggagatcatctccgagtgcgagcagagttgcaaggatgccggagaatccgcacaaagcaacgaggtcgagatccccgcagagctcaagatgggattccgggacgagatggagaaagccaaggccgccgctgctgctgcggacggggccaaggatgacgcagagagtgccgagctggccgagggtttcgtgcagaccattccggaacggttaccggatgcgtctactgccgcagctgcagcactaccgccagcgaggccagctcagagtgttccggcaccgacgggaacagttccagtaccaaatcccgtcgccgccactaccgtacgaactcggcaacctgggcccacgaccgggggcgaaggtgtaccgatctggatcgactacgccatcaccatactgtctatcatgcttgtagctattatactcaaggttgtactgcgatagatcacggcaagagtgggaaatgggagtagtttcggcatatctatcaggcttggcgtttacggacgggttgggattgcctaggttcggcaaaggggaatgattacatgttagattcatgcttaacgcagcatcacttcaattgacgatgcgacactttctatcggaacgtggtatctatgttgacgccttacggcgtatgaaaaaaatatctcttcacagtattggagaactacatggttgcatttctgaa

SEQ ID NO: 377 - DNA, 1245 bp, Muscodor strobelii
  misc_feature: SGI cDNA ID NO. 559691
  misc_feature: Encodes the peptide sequence at SEQ ID NO 378
atggaggaacaacttctgaagtacatgcaacgtatagaaatgtctgatccagagcgtaacgaaggttacatgggagtgcccaaagacattcttgatcctatgatatctaaatgggaatgcgagtcgacagcctatgctgagaagcatctaggagcagctcgacgggcagaaattgacagactcgaaaccatggacgagaaactgtcgttcaatcctccactttttatggatatttatttccttgaccgcaataccacccctgagcccttaacaatcaaaaacgtcaattttgatgaggtaacaaatgtagcaaaacaggtcgagggtctaaattggaaggtagccggaaccggcagcgagagaaaacttgcgctgggctgggattcacgggcagtcatgaaggttgtccgtggcgacactaaaacaactaaggcgaaggaaaacgccgtacagcgggaagtcgagcatctcaaaaatgtggaggcgcgtttacagaaacatcgcgattacttgaagcgccacacctatcccgtcaaagagatgaccggctcctatatgatcgagtgcacaggcaattgttggcgagatgatatgtacaaggaagacactttttggatcgatatccgagaatctctgactactgatggcgtatacgaggcgaccttcgatcttggccccgctttgaagggcgtcgccatcatcggcaaagatgaagatttgatgatagagcatgagcatactgcggacgcagtcgatagtgagctttactacgagggacgaccgttctacccagaggctgaaaaagacccccgtgtggcagctttgattggtatcaaagcagctcagaagaagcggaaacgagaagaggaccctcgcgaaaagatactcatgtggcatcccaagagagctaaagttgacgacaaatacaaattgaagtattgggtacacacaagaggcgaattcgagtattcagatgagtacatgtactgctcggaggctgggcccttagaacatgctgaggaccgacatggttacctcgacctttgcgacgaaactttttgcgagttcacaatggaagtatggcgcgaagaggttactggtctgccaagccttagaagacatccttttcgggcatatagagtgtcggatagaccattacacaaaagagtagactggggcagcttcaatgattgcgacgatgccattccgacgacgagctttttggagttgacgagtcaagactaa

SEQ ID NO: 378 - protein, 414 aa, Muscodor strobelii
  misc_feature: SGI Peptide ID NO. 559691
MEEQLLKYMQRIEMSDPERNEGYMGVPKDILDPMISKWECESTAYAEKHLGAARRAEIDRLETMDEKLSFNPPLFMDIYFLDRNTTPEPLTIKNVNFDEVTNVAKQVEGLNWKVAGTGSERKLALGWDSRAVMKVVRGDTKTTKAKENAVQREVEHLKNVEARLQKHRDYLKRHTYPVKEMTGSYMIECTGNCWRDDMYKEDTFWIDIRESLTTDGVYEATFDLGPALKGVAIIGKDEDLMIEHEHTADAVDSELYYEGRPFYPEAEKDPRVAALIGIKAAQKKRKREEDPREKILMWHPKRAKVDDKYKLKYWVHTRGEFEYSDEYMYCSEAGPLEHAEDRHGYLDLCDETFCEFTMEVWREEVTGLPSLRRHPFRAYRVSDRPLHKRVDWGSFNDCDDAIPTTSFLELTSQD

SEQ ID NO: 379 - DNA, 172 bp, Muscodor strobelii
  misc_feature: SGI EST ID NO. CUFF.880.0
  misc_feature: Variant of the nucleotide sequence at SEQ ID NO 377
gcgaaatggaaagtcgaccagaaagaaactctgacgagggactggatggcggcacaggcctctctctatggagtcctgaggggaggtgatccattctgtcagagtggctctaagaaacagatggaggaacaacttctgaagtacatgcaacgtatagaaatgtctgatccag

SEQ ID NO: 380 - DNA, 1320 bp, Muscodor strobelii
  misc_feature: SGI cDNA ID NO. 559692
  misc_feature: Encodes the peptide sequence at SEQ ID NO 381
atggcctactacccacagtacggcggaagcgtcatcaattccgacgtagacgctgttgcccctcagtctgcatacgcccccagcgttgccgaggaagttgattgcaagcgttgtgataagatattcgcagacgccgaagagctgcgtcgacacaaggtcaagaaaggtcacttctcttgtgatcagtgcgacaaaaccttctaccaccctgatacgctcgcgaagcatatccagatactccatcaagtggctctgaagctcttctgcccatgctgtaagcttgatttcgactctggagccgagtttttccagcacatcgagaacaactcatgcaaaggcatttcagctgccagcgttgctcgtcgtcgcgagaagatgcttgagttctcacgagacttgagcaagcagtcgcccagcaagattgagaaggccatggccttgtctccttcagctaagcctaaggatagttgggccaacgatactgaggagaagaaggtgaacacactagcgcctactatggatggccatgcgctcggaggtcgcggacctatcaataacgataatgcgcacaaagtctactatcaacctggtgatttcccaccagtgcaaaagcaggagatacagaagcccaatgcatggaatgcaggacgcactggagtcaagaagccccctactccaggtactatgtcgtacaatgcggtgcatctcccagcatctttcgccaccccgttgacctacggttctcgccgcgagcttgggactaccgatccgaacaagatgcggtacaacgccgtgcctcctccggcatcttacgacactctatcagcttgcaatgctctacgacagcttgaaatcaccgacccgaacaggaagatccgcttcatgaaggaagaggatctctccgtcaagccaggcgcagcgccgtctgagaaaggcacccgcatcattgaccctgaccatcccgacttcaacgcttcagtcttctggaacaccattcttgagaaatttgtgtgtcctcaccttgactgcagaatcaaagtcgagtccgccagcgccatgcgccagcatctgaagtctgctcgacatggccgaggatccattggctgtcctggttgcagaaagacgttcttcatggtccatcaaatgattgctcacaccgaaaccgcgcaatcttgtgccgcccgtgagtatgaaggctttcgctccgctctaggccaggctacaggtggactcatggatgttgagacaattccaccgaatcctactcgatttgttatcgatcagcgcgtcctcaaggagttgatagaggactggcaatag

SEQ ID NO: 381 - protein, 439 aa, Muscodor strobelii
  misc_feature: SGI Peptide ID NO. 559692
  misc_feature (58)..(81): Pfam Id: PF00096 Pfam Desc: Zinc finger, C2H2 type
  misc_feature (17)..(422): NCBI GI: 121716859 Blast Desc: C2H2 finger domain protein, [Aspergillus clavatus NRRL 1] gi|119404090|gb|EAW14507.1| C2H2 finger domain protein, [Aspergillus clavatus NRRL 1]
  misc_feature (304)..(414): NCBI GI: 256731135 Blast Desc: NECHADRAFT_85078 [Nectria haematococca mpVI 77-13-4]
  misc_feature (35)..(415): NCBI GI: 189207871 Blast Desc: conserved [Pyrenophora tritici-repentis Pt-1C-BFP] gi|187976362|gb|EDU42988.1| conserved [Pyrenophora tritici-repentis Pt-1C-BFP]
  misc_feature (35)..(414): NCBI GI: 119175157 Blast Desc: CIMG_09476 [Coccidioides immitis RS]
  misc_feature (35)..(422): NCBI GI: 71002620 Blast Desc: C2H2 finger domain protein [Aspergillus fumigatus Af293] gi|66853629|gb|EAL93953.1| C2H2 finger domain protein, [Aspergillus fumigatus Af293] gi|159130045|gb|EDP55159.1| C2H2
  misc_feature (35)..(422): NCBI GI: 119482177 Blast Desc: C2H2 finger domain protein, [Neosartorya fischeri NRRL 181] gi|119409271|gb|EAW19220.1| C2H2 finger domain protein, [Neosartorya fischeri NRRL 181]
  misc_feature (304)..(415): NCBI GI: 46123035 Blast Desc: FG05895.1 [Gibberella zeae PH-1]
  misc_feature (307)..(414): NCBI GI: 261355514 Blast Desc: conserved [Verticillium albo-atrum VaMs.102]
  misc_feature (320)..(414): NCBI GI: 116206572 Blast Desc: CHGG_02579 [Chaetomium globosum CBS 148.51] gi|88183176|gb|EAQ90644.1| CHGG_02579 [Chaetomium globosum CBS 148.51]
  misc_feature (300)..(414): NCBI GI: 156040744 Blast Desc: [Sclerotinia sclerotiorum 1980] gi|154695734|gb|EDN95472.1| [Sclerotinia sclerotiorum 1980]
MAYYPQYGGSVINSDVDAVAPQSAYAPSVAEEVDCKRCDKIFADAEELRRHKVKKGHFSCDQCDKTFYHPDTLAKHIQILHQVALKLFCPCCKLDFDSGAEFFQHIENNSCKGISAASVARRREKMLEFSRDLSKQSPSKIEKAMALSPSAKPKDSWANDTEEKKVNTLAPTMDGHALGGRGPINNDNAHKVYYQPGDFPPVQKQEIQKPNAWNAGRTGVKKPPTPGTMSYNAVHLPASFATPLTYGSRRELGTTDPNKMRYNAVPPPASYDTLSACNALRQLEITDPNRKIRFMKEEDLSVKPGAAPSEKGTRIIDPDHPDFNASVFWNTILEKFVCPHLDCRIKVESASAMRQHLKSARHGRGSIGCPGCRKTFFMVHQMIAHTETAQSCAAREYEGFRSALGQATGGLMDVETIPPNPTRFVIDQRVLKELIEDWQ

SEQ ID NO: 382 - DNA, 1533 bp, Muscodor strobelii
  misc_feature: SGI cDNA ID NO. 559693
  misc_feature: Reduced expression when VOC is produced
  misc_feature: Encodes the peptide sequence at SEQ ID NO 383
atgtatactaaagccactctattggggctgctgccctttgtctatggcgcgcctgcgcctcaaatgacatacgaagaaaacaccggggctgtcggtggcgttgatgccccattccctaccttcacggctactgctggagaactccgcggatcaactgatttgcaaggtggtgtcgctcctcgccctcccacctctggcggcgactcggccgtggtgaaggatcctgaacttgtcattggccaaagcgctgacaagaatcttggtctttacctcgactttgaatcggccacctatccgaatggcccacagccacttcgtggaggatacggtgcgactgatcctggtccacgtacttacgagtatgagaagttgaacccggatctctatgcaccacctggcacagacacgggagactcgcccaatgcgatgtggccacttggtctctcgcacaatcgtcttggtaccgatccaggcgcaggatgggctcggcaacaaaacgtaggcgtcttgccgatcgccaccgaaatggcaggcgtcgacatgcgtctatcgcctcatgcttaccgcgaacttcattggcatacctcgggagaatgggcactgatcacgaagggcagcgtccgagttgcggccatggacgaagatggagcgtcattcgtcgacgacgtgacagctggcgatgtctggttcttcccacccggtattccacacagtctccaaggtctcgatgaaggcgcagagttcatgctggtcttcgacgacggatctttctcggaggaatccacattcctcgctaccgagatgatgctgcgcagcccgcaagaagtctgggccaaggatctgcaaaccgatgtcagcgctctgaagaacattcctcagaaccagaagttcatcttcaacggcacaccagccccagccgacatccaggaacagaacatcaccggctccgctggcgctctttccgggccgactggctacacctaccactggtcgcagcaggagttcttcaacacgaccggtggcgccgtcaagatcctcgacccgctcaccttccccatcgccagcatgttctccgccgcgctcgtagtcctcgagcctggcgctcttcgcgagatccactggcacaccacatccgacgaatggtcctacttcctgcaaggctccgcgcgcgtcacgctctacaacgcgcccgccgccgcccgaaccttcgacttcactgcgggcgacgtgggatacattcccaaagccacgggccactacgtggagaacacggggacagacgacgtgatcttcctcgaggttctgcaggcccccaagttcggcgacatctcggcgagccagtggttggcgttgacgccgagacaggttgtcaaggatacgctgaacttgagtgatgaggtgcttgatcagcagccgaaggataagacgcttatcaagcctggtaatcctaatttgactgcgatcgcttctgagccttcgaattccacggctagcacgagattcaagaagcatcggagtgttgagctttactga

SEQ ID NO: 383 - protein, 510 aa, Muscodor strobelii
  misc_feature: SGI Peptide ID NO. 559693
  misc_feature (327)..(469): Pfam Id: PF00190 Pfam Desc: Cupin
  misc_feature (146)..(289): Pfam Id: PF00190 Pfam Desc: Cupin
  misc_feature (360)..(435): Pfam Id: PF07883 Pfam Desc: Cupin domain
  misc_feature (179)..(252): Pfam Id: PF07883 Pfam Desc: Cupin domain
  misc_feature (327)..(432): Pfam Id: PF00190 Pfam Desc: Cupin
  misc_feature (185)..(289): Pfam Id: PF00190 Pfam Desc: Cupin
  misc_feature (373)..(431): Pfam Id: PF05899 Pfam Desc: Domain of function (DUF861)
  misc_feature (18)..(494): NCBI GI: 46124469 Blast Desc: FG06612.1 [Gibberella zeae PH-1]
  misc_feature (23)..(502): NCBI GI: 145614991 Blast Desc: MGG_14061 [Magnaporthe grisea 70-15] gi|145021870|gb|EDK05947.1| MGG_14061 [Magnaporthe grisea 70-15]
  misc_feature (1)..(497): NCBI GI: 156043585 Blast Desc: SS1G_10796 [Sclerotinia sclerotiorum 1980] gi|154695183|gb|EDN94921.1| SS1G_10796 [Sclerotinia sclerotiorum 1980]
  misc_feature (9)..(497): NCBI GI: 154316791 Blast Desc: BC1G_03813 [Botryotinia fuckeliana B05.10] gi|150845425|gb|EDN20618.1| BC1G_03813 [Botryotinia fuckeliana B05.10]
  misc_feature (23)..(502): NCBI GI: 149209053 Blast Desc: MGCH7_ch7g22 [Magnaporthe grisea 70-15] gi|86195977|gb|EAQ70615.1| MGCH7_ch7g22 [Magnaporthe grisea 70-15]
  misc_feature (34)..(487): NCBI GI: 169621209 Blast Desc: SNOG_13812 [Phaeosphaeria nodorum SN15] gi|160704204|gb|EAT78836.2| SNOG_13812 [Phaeosphaeria nodorum SN15]
  misc_feature (10)..(498): NCBI GI: 255931041 Blast Desc: Pc12g01820 [Penicillium chrysogenum Wisconsin 54-1255] gi|211581696|emb|CAP79809.1| Pc12g01820 [Penicillium chrysogenum Wisconsin 54-1255]
  misc_feature (74)..(482): NCBI GI: 154302993 Blast Desc: BC1G_09240 [Botryotinia fuckeliana B05.10] gi|150855164|gb|EDN30356.1| BC1G_09240 [Botryotinia fuckeliana B05.10]
  misc_feature (39)..(481): NCBI GI: 119481785 Blast Desc: oxalate decarboxylase, [Neosartorya fischeri NRRL 181] gi|119409075|gb|EAW19024.1| oxalate decarboxylase, [Neosartorya fischeri NRRL 181]
  misc_feature (74)..(482): NCBI GI: 156048166 Blast Desc: SS1G_08814 [Sclerotinia sclerotiorum 1980] gi|154693211|gb|EDN92949.1| SS1G_08814 [Sclerotinia sclerotiorum 1980]
  misc_feature (102)..(475): SWISSPROT Homolog: EC 4.1.1.2 Oxalate decarboxylase
  misc_feature: Useful for introducing or modulating the production of volatile compounds
MYTKATLLGLLPFVYGAPAPQMTYEENTGAVGGVDAPFPTFTATAGELRGSTDLQGGVAPRPPTSGGDSAVVKDPELVIGQSADKNLGLYLDFESATYPNGPQPLRGGYGATDPGPRTYEYEKLNPDLYAPPGTDTGDSPNAMWPLGLSHNRLGTDPGAGWARQQNVGVLPIATEMAGVDMRLSPHAYRELHWHTSGEWALITKGSVRVAAMDEDGASFVDDVTAGDVWFFPPGIPHSLQGLDEGAEFMLVFDDGSFSEESTFLATEMMLRSPQEVWAKDLQTDVSALKNIPQNQKFIFNGTPAPADIQEQNITGSAGALSGPTGYTYHWSQQEFFNTTGGAVKILDPLTFPIASMFSAALVVLEPGALREIHWHTTSDEWSYFLQGSARVTLYNAPAAARTFDFTAGDVGYIPKATGHYVENTGTDDVIFLEVLQAPKFGDISASQWLALTPRQVVKDTLNLSDEVLDQQPKDKTLIKPGNPNLTAIASEPSNSTASTRFKKHRSVELY

SEQ ID NO: 384 - DNA, 2363 bp, Muscodor strobelii
  misc_feature: SGI EST ID NO. CUFF.901.0
  misc_feature: Variant of the nucleotide sequence at SEQ ID NO 382
ttgccactaggttgacttttcgcaatcccgcctcccacaatcggactctcttgtggatgctatactaggatgcttccaagatggaagactacacgcagcgcattgtcttgcgcgtcttgcataactccagatattgcgaagatgccgagcccgtctctagtcctttgaccttgcggttcacgatgcgatgccgagagcaagtcacgatgcgcagaaacactgacagcttgagcatccaagttaaccgaaatactccggtgaatgtcccacaaccatgaagacggcacgaaggaacggttgtataagagaggcgtatcgacccctcaagtcggcaaattctcactcaggctcaagctcaaagctcagttctctccttctgtcgctctcttggacactcactttcgttgttccgaataacatcattcgctatccaacatgtatactaaagccactctattggggctgctgccctttgtctatggcgcgcctgcgcctcaaatgacatacgaagaaaacaccggggctgtcggtggcgttgatgccccattccctaccttcacggctactgctggagaactccgcggatcaactgatttgcaaggtggtgtcgctcctcgccctcccacctctggcggcgactcggccgtggtgaaggatcctgaacttgtcattggccaaagcgctgacaagaatcttggtctttacctcgactttgaatcggccacctatccgaatggcccacagccacttcgtggaggatacggtgcgactgatcctggtccacgtacttacgagtatgagaagttgaacccggatctctatgcaccacctggcacagacacgggagactcgcccaatgcgatgtggccacttggtctctcgcacaatcgtcttggtaccgatccaggcgcaggatgggctcggcaacaaaacgtaggcgtcttgccgatcgccaccgaaatggcaggcgtcgacatgcgtctatcgcctcatgcttaccgcgaacttcattggcatacctcgggagaatgggcactgatcacgaagggcagcgtccgagttgcggccatggacgaagatggagcgtcattcgtcgacgacgtgacagctggcgatgtctggttcttcccacccggtattccacacagtctccaaggtctcgatgaaggcgcagagttcatgctggtcttcgacgacggatctttctcggaggaatccacattcctcgctaccgagatgatgctgcgcagcccgcaagaagtctgggccaaggatctgcaaaccgatgtcagcgctctgaagaacattcctcagaaccagaagttcatcttcaacggcacaccagccccagccgacatccaggaacagaacatcaccggctccgctggcgctctttccgggccgactggctacacctaccactggtcgcagcaggagttcttcaacacgaccggtggcgccgtcaagatcctcgacccgctcaccttccccatcgccagcatgttctccgccgcgctcgtagtcctcgagcctggcgctcttcgcgagatccactggcacaccacatccgacgaatggtcctacttcctgcaaggctccgcgcgcgtcacgctctacaacgcgcccgccgccgcccgaaccttcgacttcactgcgggcgacgtgggatacattcccaaagccacgggccactacgtggagaacacggggacagacgacgtgatcttcctcgaggttctgcaggcccccaagttcggcgacatctcggcgagccagtggttggcgttgacgccgagacaggttgtcaaggatacgctgaacttgagtgatgaggtgcttgatcagcagccgaaggataagacgcttatcaagcctggtaatcctaatttgactgcgatcgcttctgagccttcgaattccacggctagcacgagattcaagaagcatcggagtgttgagctttactgagcttgattacctctaatgggcatggcattaccaagtccagggcagcagacttttgttgaagtggatgttttctctttcgtgttgatcctcggctgtttggcactttgctgttcaatagctggagagagactcttgtattttgcataccttttgacgaagcttttgtgcggtgtttacttcgtttcgtatatagctttgagtacatgtagttgatcgatgcggccgagctgtatcgttgactaacttacaatacatttttcatctccttgcgacgtaccctttccatttgaatggtgttcccgaatatctttgactggttgatagaggtcgaattgcgttgcactcatggccaacttaccttacctaatctaaatacatcgtgataatgtgcctcg

SEQ ID NO: 385 - DNA, 1629 bp, Muscodor strobelii
  misc_feature: SGI cDNA ID NO. 559694
  misc_feature: Reduced expression when VOC is produced
  misc_feature: Encodes the peptide sequence at SEQ ID NO 386
atggaggataggcagaggccgacgtcgccctcgttcgtatctcccagcatggcccggtgggctcgacgcctcgagcgctgctgctgtggctgtctcaaatacttccctctcgcctttgtgtacggcctcacgacgtgggcagtatgggtcgtcatcaacataggctccttccccaagtctgaggagtatacgtggataggcacccggtcctccatcggcggcctcgtcctctacgccctgctcaactggtgctacaccaccgccgtcttcaccgagcccggcagcactaccaacgacatgggctactcgaccctgcccaccgtcaacaccccgagccagacctccttcaccgtcaaggccaacggcgagcaccgcttctgcaagaagtgccaggcccgcaagcccgaccgcgcccaccactgctccacctgccgccgctgcgtcctcaagatggaccaccactgcccctggctcgccacctgcatcggcctgcgcaaccacaaggccttcctgctgttcctcatatacaccaccgtcttctgtctctactgcttcgccgtctccggcacctgggtctacgacgagttgttctccgagtccgagtacgccaacagcatcttgcctgtcaacttcatcctgctctccgtcatctcgggcatcatcggccttgtcgtgggtgcattcacgggttggcatatcctattagccagtcgaggacagacgaccatcgaatgtctcgaaaagacccgatacctcagcccattgcgcaaaacactacagaatcagttcgttgctcaacacaacggtgagggcatacaactaccgcgatacggacaacaactcctcgacatccacgcgaatgcgctacccggtatcacgcgccctgaagagggggaggtcatattggacaactcgtcaaactccggcatgtcataccacgagatggaacagcagcgcgctcggaagagatatgaagattacatggacgaacaagactctgagaaactacccaatgcatttgatctggggcccaagaggaatctacttcatctatttggaccgcggtgggcactctggttcttccctatccccagcacaacaggcgatggatggtcatgggagccaagccccaagtggatagccgccagggaaaagatcgcccgagaccgtgacgctcagcgacagcgagaactcgctgcgggatggggacaacctgatcctcccgtcgttcataacgatcgaccgcagggggctggtagacattatttagcatcaccagcgatctccagcggtcgaaggactccgacgtccaatggccgaaggacgccctctaaagctgaccgtatactgggccgagatcctaatctttacgccgacgaaccggcggattctgtatcgatggcgacgctggatagaaaggggagacaggttgtgaaggatgatctcgagatatcgagtgatgaagaggaggatataaaggggaatgatgcggaacaacatgctatgaatgttgtgactaatggtggttgggcgaggagtggtgcttcgggattgttacggaaaccatcgcggaatgagagctcgacgccaaccaaagtattcgagaatgaagatgagggtgtggattaa

SEQ ID NO: 386 - protein, 542 aa, Muscodor strobelii
  misc_feature: SGI Peptide ID NO. 559694
  misc_feature (116)..(180): Pfam Id: PF01529 Pfam Desc: DHHC zinc finger domain
  misc_feature (17)..(528): NCBI GI: 261355513 Blast Desc: palmitoyltransferase PFA3 [Verticillium albo-atrum VaMs.102]
  misc_feature (19)..(542): NCBI GI: 256731136 Blast Desc: [Nectria haematococca mpVI 77-13-4]
  misc_feature (16)..(519): NCBI GI: 171692085 Blast Desc: protein product [Podospora anserina] gi|170945991|emb|CAP72792.1| protein product [Podospora anserina]
  misc_feature (16)..(542): NCBI GI: 46123037 Blast Desc: FG05896.1 [Gibberella zeae PH-1] gi|82593020|sp|Q4IA62.1|PFA3_GIBZE RecName: Full=Palmitoyltransferase PFA3; AltName: Full=Protein fatty 3
  misc_feature (19)..(518): NCBI GI: 164426350 Blast Desc: palmitoyltransferase PFA3 [Neurospora crassa OR74A] gi|166208491|sp|Q7S7C5.2|PFA3_NEUCR RecName: Full=Palmitoyltransferase PFA3; AltName: Full=Protein fatty 3
  misc_feature (17)..(542): NCBI GI: 39968689 Blast Desc: MGG_02437 [Magnaporthe grisea 70-15] gi|145013962|gb|EDJ98603.1| MGG_02437 [Magnaporthe grisea 70-15]
  misc_feature (19)..(518): NCBI GI: 38566818 Blast Desc: conserved [Neurospora crassa]
  misc_feature (16)..(483): NCBI GI: 116206574 Blast Desc: CHGG_02580 [Chaetomium globosum CBS 148.51] gi|88183177|gb|EAQ90645.1| CHGG_02580 [Chaetomium globosum CBS 148.51]
  misc_feature (19)..(510): NCBI GI: 154303828 Blast Desc: BC1G_08798 [Botryotinia fuckeliana B05.10] gi|150854382|gb|EDN29574.1| BC1G_08798 [Botryotinia fuckeliana B05.10]
  misc_feature (43)..(510): NCBI GI: 156040740 Blast Desc: SS1G_11348 [Sclerotinia sclerotiorum 1980] gi|154695732|gb|EDN95470.1| SS1G_11348 [Sclerotinia sclerotiorum 1980]
  misc_feature: Useful for introducing or modulating the production of volatile compounds
MEDRQRPTSPSFVSPSMARWARRLERCCCGCLKYFPLAFVYGLTTWAVWVVINIGSFPKSEEYTWIGTRSSIGGLVLYALLNWCYTTAVFTEPGSTTNDMGYSTLPTVNTPSQTSFTVKANGEHRFCKKCQARKPDRAHHCSTCRRCVLKMDHHCPWLATCIGLRNHKAFLLFLIYTTVFCLYCFAVSGTWVYDELFSESEYANSILPVNFILLSVISGIIGLVVGAFTGWHILLASRGQTTIECLEKTRYLSPLRKTLQNQFVAQHNGEGIQLPRYGQQLLDIHANALPGITRPEEGEVILDNSSNSGMSYHEMEQQRARKRYEDYMDEQDSEKLPNAFDLGPKRNLLHLFGPRWALWFFPIPSTTGDGWSWEPSPKWIAAREKIARDRDAQRQRELAAGWGQPDPPVVHNDRPQGAGRHYLASPAISSGRRTPTSNGRRTPSKADRILGRDPNLYADEPADSVSMATLDRKGRQVVKDDLEISSDEEEDIKGNDAEQHAMNVVTNGGWARSGASGLLRKPSRNESSTPTKVFENEDEGVD

SEQ ID NO: 387 - DNA, 2369 bp, Muscodor strobelii
  misc_feature: SGI EST ID NO. CUFF.996.0
  misc_feature: Variant of the nucleotide sequence at SEQ ID NO 385
ctcgactaaatgaagtggcagctaacatattgcaaacaacaaacaatttctcaagataatccccgaagccagaaaccaggcgacggatagacaagacagtctgcttctgtcaagctcaaccttgtccctttaatttcgaacgacgacacgctctttgcatcttggcgcatgatgtgagcttttggttgagtctaggtagtcctcgatagccgttccgcaccttcccacaccttggacctacagtaccttgcagcttgggtcattttgctgtcccactctctctcatcgcttgcttcatggaggataggcagaggccgacgtcgccctcgttcgtatctcccagcatggcccggtgggctcgacgcctcgagcgctgctgctgtggctgtctcaaatacttccctctcgcctttgtgtacggcctcacgacgtgggcagtatgggtcgtcatcaacataggctccttccccaagtctgaggagtatacgtggataggcacccggtcctccatcggcggcctcgtcctctacgccctgctcaactggtgctacaccaccgccgtcttcaccgagcccggcagcactaccaacgacatgggctactcgaccctgcccaccgtcaacaccccgagccagacctccttcaccgtcaaggccaacggcgagcaccgcttctgcaagaagtgccaggcccgcaagcccgaccgcgcccaccactgctccacctgccgccgctgcgtcctcaagatggaccaccactgcccctggctcgccacctgcatcggcctgcgcaaccacaaggccttcctgctgttcctcatatacaccaccgtcttctgtctctactgcttcgccgtctccggcacctgggtctacgacgagttgttctccgagtccgagtacgccaacagcatcttgcctgtcaacttcatcctgctctccgtcatctcgggcatcatcggccttgtcgtgggtgcattcacgggttggcatatcctattagccagtcgaggacagacgaccatcgaatgtctcgaaaagacccgatacctcagcccattgcgcaaaacactacagaatcagttcgttgctcaacacaacggtgagggcatacaactaccgcgatacggacaacaactcctcgacatccacgcgaatgcgctacccggtatcacgcgccctgaagagggggaggtcatattggacaactcgtcaaactccggcatgtcataccacgagatggaacagcagcgcgctcggaagagatatgaagattacatggacgaacaagactctgagaaactacccaatgcatttgatctggggcccaagaggaatctacttcatctatttggaccgcggtgggcactctggttcttccctatccccagcacaacaggcgatggatggtcatgggagccaagccccaagtggatagccgccagggaaaagatcgcccgagaccgtgacgctcagcgacagcgagaactcgctgcgggatggggacaacctgatcctcccgtcgttcataacgatcgaccgcagggggctggtagacattatttagcatcaccagcgatctccagcggtcgaaggactccgacgtccaatggccgaaggacgccctctaaagctgaccgtatactgggccgagatcctaatctttacgccgacgaaccggcggattctgtatcgatggcgacgctggatagaaaggggagacaggttgtgaaggatgatctcgagatatcgagtgatgaagaggaggatataaaggggaatgatgcggaacaacatgctatgaatgttgtgactaatggtggttgggcgaggagtggtgcttcgggattgttacggaaaccatcgcggaatgagagctcgacgccaaccaaagtattcgagaatgaagatgagggtgtggattaaaatggtatgataagttttggacattggatattatgggtggtttcctttctttcgtatggtcacggtcacgcatatttggaccggggtttgagtgttctatagatgcattggcggggcgtcggggattttggaattttgagacttgaacttgtacttggttttggagagaagggggccgtggggaggcggattagttgggttgaatatctgatttattctgccacttggttacttgtgtttactttttcacttgtgttgtttacatgggactaatctaagtgctgtgggtaggtgtgatttgtatcgatgatgactttgggtggagggtcatgtcatacaaagtccaatgtgatgctttccgatgtagtcgtagacctatcaaaatctatgataccatctacaaagatcgtttgataggatcatctgtatgactcttaacgtcga

SEQ ID NO: 388 - DNA, 939 bp, Muscodor strobelii
  misc_feature: SGI cDNA ID NO. 559695
  misc_feature: Encodes the peptide sequence at SEQ ID NO 389
atggctgctccttattgcacggagctgagcgaaggctatggatgcctccattgccatttcgtcggcaaaacccagaaaatagtccttaatcatacgggagtctcgcacgccaaggaagaaaccgtgctcttgaggtgcccatactgcatctacgccagagcgatcccccctccgggaggtgttgagcgcaacaaaaataaacatcgcttttatgtccatgtcagcgagagccacggccctgaaattgtgcgtgacccccaacagcaaggtcttctcgccgatatgagaacattcttccgcgatcaactctatacactaaaatgttcgaaatgcgaattcgccacgaacaatggtctagatcttcagacacacgagaagtactaccatcaaggccatgaacataacccacagcccttcggtgtcagctggagtcaaggtatcccccgagctgctcgacaaccgagacaaaatgaatggagtcaaagcgaggctttcttactgggtgcatactacaattctccgtctgatggcattgaggcagttcaactcaagaagatgctcgaggacctcaaccgacgagacccgaacgagcacaaagcccacatcgatagatatttgaacgacctcaaatcgaatttgcccgaagattctgccctattgctctctgtatatggatttcgctcagagcttgctctctttggtgggccgacagtgtttcacagtatcagtccaccagttacggagcccttctattacggacctcgtgcgccccctttttttcacacacctaacccaccacctcctccacccaaaggtgagggtgccgaatggctcaaggcagctatacaaaatagcgaaggtctcggcgcgctaatggaattggaagacttcgaagagatagtgcaatacgctggtgagcacttcgaaatggaaacttga

SEQ ID NO: 389 - protein, 312 aa, Muscodor strobelii
  misc_feature: SGI Peptide ID NO. 559695
MAAPYCTELSEGYGCLHCHFVGKTQKIVLNHTGVSHAKEETVLLRCPYCIYARAIPPPGGVERNKNKHRFYVHVSESHGPEIVRDPQQQGLLADMRTFFRDQLYTLKCSKCEFATNNGLDLQTHEKYYHQGHEHNPQPFGVSWSQGIPRAARQPRQNEWSQSEAFLLGAYYNSPSDGIEAVQLKKMLEDLNRRDPNEHKAHIDRYLNDLKSNLPEDSALLLSVYGFRSELALFGGPTVFHSISPPVTEPFYYGPRAPPFFHTPNPPPPPPKGEGAEWLKAAIQNSEGLGALMELEDFEEIVQYAGEHFEMET

SEQ ID NO: 390 - DNA, 558 bp, Muscodor strobelii
  misc_feature: SGI cDNA ID NO. 559696
  misc_feature: Encodes the peptide sequence at SEQ ID NO 391
atgtctaacaacatcacccctggtgtccgccctatcgtggccagagccactattgtccctgctgccactacaggcgacaccgtcatgaaaccgcccagcccgatcgatcccaatggtgtggtggctatgcccggtgctaatggatcagttctcaccaacggaatgtattggtgccgcattcagggctgcggccacgagatcgccaacacccgtcgcgacattgacggccatctccgcaagcacgaccccaactcggcctacaaccgagccaggaacagtggtccgatgcgttgtgcctggtgtggcgaccaccaggccaacttccaccgctacgagagtcatgcccgcagggttcacggcgtgctcgagtcaacggcgttcatgcgagccatgaactatgagacgctgtggaacctgatccaagagtggatatggtaccgcaacgagcaccgggacgagccctacggcaatgattgggactccttcctcgccggcttcatcgacggcaacggcttgaccatcacccctttcccgcgtcctgttgctcatgatttctaa

SEQ ID NO: 391 - protein, 185 aa, Muscodor strobelii
  misc_feature: SGI Peptide ID NO. 559696
MSNNITPGVRPIVARATIVPAATTGDTVMKPPSPIDPNGVVAMPGANGSVLTNGMYWCRIQGCGHEIANTRRDIDGHLRKHDPNSAYNRARNSGPMRCAWCGDHQANFHRYESHARRVHGVLESTAFMRAMNYETLWNLIQEWIWYRNEHRDEPYGNDWDSFLAGFIDGNGLTITPFPRPVAHDF

SEQ ID NO: 392 - DNA, 498 bp, Muscodor strobelii
  misc_feature: SGI cDNA ID NO. 559697
  misc_feature: Encodes the peptide sequence at SEQ ID NO 393
atgtggggaactattttctcggagaaagctggcagagtcgatgtgcgaatgagagatgacaccggtacggaagtcaactggatacatcccgagcttgtaagacgatacaagttgagcgcaaaagaatgcccacaacagacgttcagcaacttcaacgggaagaaatttaccgctaagcatgtcgtgtggtttacgtggatgggcgattgtgataacaagacgtattatgagaagttttttgtcgctcccaagagttctagcatcgacgtattactgggcgataatttcgtccgagtaaatggcagggcaagcgacgtctgccggtccaaaccccgagccttgccttcgcactttttcgcccagaataaacaatctaagcaagagaaaagcgagatagatgctggtagggagagacacaaacaggaagtggaagaggccgccgcggaaagaaaaaagaaggaaagagaacagcaacagaataaagacaagaagagatga

SEQ ID NO: 393 - protein, 165 aa, Muscodor strobelii
  misc_feature: SGI Peptide ID NO. 559697
MWGTIFSEKAGRVDVRMRDDTGTEVNWIHPELVRRYKLSAKECPQQTFSNFNGKKFTAKHVVWFTWMGDCDNKTYYEKFFVAPKSSSIDVLLGDNFVRVNGRASDVCRSKPRALPSHFFAQNKQSKQEKSEIDAGRERHKQEVEEAAAERKKKEREQQQNKDKKR

SEQ ID NO: 394 - DNA, 6342 bp, Muscodor strobelii
  misc_feature: SGI cDNA ID NO. 559698
  misc_feature: Encodes the peptide sequence at SEQ ID NO 395
atggccacaggactcgacgagctgatcgagtcgctgctgaccgagattgccttttccggcattcgaggctgcacaattgagtctttgctggacagcattcgctcttttcacgaagagtcacgaattgtgaccggcgacagtaacagcaaaggcaaaggcaaggatgtcgctcaaaaaactacgacgcctgagacaagtgcgatccctcaacacattcaagatgctcgcgacctttctgtcgcctctcaggtatggtcgtggctagtaggaaggcaagacgtgtctgtgggactcaacagacagttcaaccgctcgtcgctacaagaaatgctcgctatgcctgaggaaactattgtcacatcttctgcacaagcagagacacctaccggcgggacctcctctgcgcaggctgagtgctcggtgcctgcccgtcctgtcgcaaaagatgaaacggcggtcgcgcgaccgagactgtttgtgtccgaggatcgactctggaaaacccttactggccacgggcccgatctcaaaagagtgcctctcttcgaatggaaagcgctcgtcgatattgcgtctgtcaaaggcactggcatcttacagggcgacctcgtcagactcactggtcaggacaagagatccctgccaactagaacagacgccttagccagaaagggttacataatcaaacagccgatatgtgttcgcggattcaagaccagcaagttgtggcttgccaaatttgtcgagaatgccaaagttgaggaggaactacaaggccttgatctagcgaatatcgacctctctaagcagactctcacgaaagatcttgatcctctcccgttctgtgacaagtggattaaggaaccgatcgactatttagcgcttgcacaagcattcgtggctctcgcgaaagcatgggctctcattcgttacgtggatgcgcgagtgaaaatgggcgttgaggtgcgacagcgacagatgagggctcttgcaaagaccacccgctggctctgtggtattggctcgattttgttcgttgcggccaaattttctggtagcaacaaactcttcaaggactgcgtcaaattcgtacgtgatccaacgcccgcagaatgggagcatttccgctctacgccgaaaactcggatgacactcccctctggtcgtattggacagcgaggagccgcatcccgcgccgccagtatgctgaagaaggaaaagaatcaagcgtcgagcgccaaaaaaaccaaaggctccaaggctcgtcatcggagacgccgagctcccatcatttctgccccttggaagccacaaaagctcatcatgagtacgacctttgacataataaaaagggccggttcccgtggcacctccaacgctgctatcattcggcagacactgggccacaactaccggagatatacttcagcccttactcgctcaatttccacacctgttaacacacagccgcaacatgtgaaggaatacagttcaatatcggagttgcagcgcattggaaagacgatgacttacaagttcttttcaaaggacgagatggccgatcctgcgggtgatgatgatcgaacccagcgtgaagaaggtggcgtgaacacaggtgacgacgacgcgaatgtaaccgaagaagtgcaccaagcaccgagccacgaactgttttcaagcctcgcggacgacgagtttttaccagctgagaaggtatcgccgacaatgattgatctgtttcaaaacggcacagttccacgaagacagagacttggccgcccaaagaagagtaaacgaaagcgacaggccgatagcgtggttgaagcatcacccgtacccacgctcgatggaagccgagttccggaacctgataccaaaagaccaagacttgctacaactccagtgcagtcgccagacgagcagcttgcagagacatctccacagcaaccgccctcggccgagaacgcccctcctgctgaagcactgtccctggtcaaggagcagcatcctagagactcgattaacccactgcctcggccgcctggcgcttcgcgtgcaccaccgaactcattagaccccgttccgaatcgaaaaggcagacggccgaaatctttagtcatctgttttcattctgataagcttaaggacccgtctttcctaggaatcggatccgggcgtttcaaaggaaacatacttgtcggagatactgcagccacccctcctaacacatcacagaataccgataccgctgaaaaagcagctggtccgtccaaagtgaagaggtcaaaaaatctggactcatataagtgtgaaaaatgcggaaatgcctggaagaactccaacggcttagaataccatcttaacaaatcacgaactgcctgcaaccctaactatgtcccgcctccaccggctcccctcccggttcgaaagcagaaggaagccaaaacaacgggtaaagggggtcctggtaataaggaacgtccagcgttagaggtacctcagggacgactgagccagtgggagcaagttaacgcacgatttggagctcgcagaattgacctgaccaaaagcgcacgaccgtcctcatctcgcagtaaatctgctctggccgatgacaacaccctatcgcgcaatcctggagatgatggccccgtagaaaccatatcagggcttatcaaattgaaagagcttcgagtttacgatgcgacctatcatgtgcaaaagtcggcgattcgctcttcacatacgggagccgggccctcaataattgaggagcctattcctgaccagagtgccgaacatcacaccacccaccagccaggtgattcaaacgttacagaattcccagaagatgctagatctcagacgtcaccatcaactgcggccggcacacgggcatcaagatatgacaacccacccaatactccgccgcaactgcagctgcagccgaaggctcgaaaacctctcccgactcttcaacaggcacagtcgacgcggaagtcaaatgtctccaccaccaaggcaaaggataaagcaaatttgaagtcaggacgtagatctctagcctcgtttgcgctgccgacaagaggaaatgcatcattcaccacccgtcggagggatcgtacctatcaaattgtcacatatctccttaatcacaacggcggtgtgttccctggaaacaggtctctgtttatggcactgatttccgtctgggtgaacaactttgaagatttgggtcctccggatcgtcgttccttgttcaatatcacgaatcaaatggaaagagagggtcttctgagactggtgcacttctttttcttcgataaccgagccaaaatgcaggagagcacggtccttgtagagatggacgataatatcagaaataagtcaccggaggaattgtctgcactgcccgaggttgttgctgtcaaagaaaaattgagagaaatgtacccggaaacttatgtcccagatggcttttctttaaggcaagatgagctgaagctgtttgatgaattaggatcatccggcgccaaaggaaagaatgcagaccacacgccaaatcacttggcccagtctgaactcatacaagacatcgagaccttggattatgatgctcctgtgtttggcgacgcttccagcattgcgaacaggaacaagcgatcgagtgaggcggcgctttctgaacaagagactccccaaaagaaggctcgcttctcatctgtggagctaactacatctggaagaaccatgagaagatggtcgggcgtgcacgaagtgtgggatagtggaaaactagcctcatatatctggagtgaaagacagaagcccggaacgacaaccgacgagcaaccaagtccagctcgtgacggcacgccatcaaatcctttcgcaactgaaaattccggagccaataatctcagatcgatactttcggcggtcaagagtcaccaagaaattgaccagaccgccaagcagatgggtcgccgtgtgtggagagttaaggacatccatgttggtggcgttaggagtcatgatactgatgatgataggttgctggttgatccctttattcgtgaatcgactccagctttgtccgttgctgatagtaccaccacggacaacacgttcgaggatgcagacgaacctgtccagcgttctgtgccacagaaaacagacgaacatggtcaaccttcgcaatcattcgatgacaaagatgatcatgcgcaaccgttcgttgtcaaatttgctccagctgaaatcatccaaaccaatggtgataactgctggccaaagcatccagttgcctttttcgaaaaaggtatcaccggcagcttcagtatagagggctcaatgccaggttcctcgtggttcttgcaacaaaacttacctcgatgcgttgaagacatcctgaaatctgtgtcaggacagaagtcctggacaacagctttagacccagtatactgcgaattcattcgtaatgtcaatgccatcgagaattgggagcagtccaaggaaggtgcccaaatgcttataatgggctctgttgttcctagttacaattttatatccctcgttctagaccagtccagagccgacatgaagcctttacaagcagaatggctcagtactaaccagtacacaccgacttacttgcctaatgaaataagaaacttccaggctgatggcaaaacaagaacgcgaggaggtaacaaacgtggacgtccgaggaaagctcgcggggggctcgcacggcagttagctgaggcgccttctcgccctaaacttgaacgccgcctcaagaagcctcctaagcccacagaatacatcgagtataagactcgagccctcacattcatcccaaagcaacctagaggtcgcgtcaacaaaccagcggcgcacgatgataggttggggtcgaagagagaggacgagctcattgcagcttgtgtggctgtcagaactcttctcggtggaattgatcgaagcttagacgtcggtctgctattgaaactcttcccaggcatgtctctctctgcgttgaagaaattctggcccagggtcagcagagagcgaaaatcatactgtgaagcacttacgacgaaattccaatccgcttttctggaggcgtacgagtctggcgagctcaacccaatcgattacgatgatgttgagaactatgattggggagcactcatatcatggacaatgaagcttgaaactcacgaggacatcgatctccctgatagccggcaagcacttttagagactcacgtcatcggcgaagctgcgaatcaaatcatcgactggcgagacacttggtttgccttgacgtcaacatacaaccgaattgaagctatctcgagtgaaaacatgtcgatcccttggccacctgcgaagggtccgcatgctgatactttgtttcgcgcgagaacttgggtccgctctttgtgttgcacgtcgctgcagggtatagatgttgacacaaacgttgtcccgaaactggtcgagcttggcaatggagattctgcaactaccaatcaaatacttgattccgtggtcaaagagcttaacgaacaaaaagttatcgtgaagacaaaaggaaaaggcatgggaggtaatttccgacttcatatgaacttcgccaagtcgctcgataaaatggtcagtacggtgaaattccggcaggcctttaccttcaagaagcagctagacgactgtttgcgtcgtggggaacaatttgcattcccctatgctgctaacgatggtacaataatggcggtattgaatatgcaggcgaatggtcgagtcattatcgatgctgtcgagatgcccaacattccgtttggatttgagcccggtaactacgaaggaagactctttcccaaaagttactatcatttcaaggttcgtattgggccaactgcgaactacatattcaatgaagacatgcctctactgagagaaacgcaaactacgaaaccgccaatggaaggccccaacggcgcgatcccgatctgggtagacttcttcggaaatctgaatatggcgcgcttctctgactatctctgcatggtcgtcttcaccctcgcctctaaaggtccagtgacaccggcgatgtgcgtcacgctcctgaaacccatgatcgatgagtttgaagtcgagcttatcatcgagtggctagatcaactcggattgctatatcgtgttgttgagggttgccaggtcaccgttgcggaatggtggtggctggttgcaggacagattgtggatctgggcgatgcgacacctacggcccaagaggtgctgccagctagtgatgaggagatggcggacgtgtaa

SEQ ID NO: 395 - protein, 2113 aa, Muscodor strobelii
  misc_feature: SGI Peptide ID NO. 559698
  misc_feature (1037)..(2067): NCBI GI: 116206568 Blast Desc: CHGG_02577 [Chaetomium globosum CBS 148.51] gi|88183174|gb|EAQ90642.1| CHGG_02577 [Chaetomium globosum CBS 148.51]
  misc_feature (1449)..(2093): NCBI GI: 145606234 Blast Desc: MGG_02447 [Magnaporthe grisea 70-15] gi|145013949|gb|EDJ98590.1| MGG_02447 [Magnaporthe grisea 70-15]
  misc_feature (1026)..(2085): NCBI GI: 85099370 Blast Desc: NCU01260 [Neurospora crassa OR74A] gi|28922300|gb|EAA31541.1| [Neurospora crassa OR74A] gi|28950308|emb|CAD70838.1| [Neurospora crassa]
  misc_feature (1430)..(2087): NCBI GI: 261351487 Blast Desc: conserved [Verticillium albo-atrum VaMs.102]
  misc_feature (1338)..(2085): NCBI GI: 256731259 Blast Desc: NECHADRAFT_96061 [Nectria haematococca mpVI 77-13-4]
  misc_feature (1410)..(2085): NCBI GI: 171692109 Blast Desc: protein product [Podospora anserina] gi|170946003|emb|CAP72804.1| protein product [Podospora anserina]
  misc_feature (2)..(736): NCBI GI: 85099370 Blast Desc: NCU01260 [Neurospora crassa OR74A] gi|28922300|gb|EAA31541.1| [Neurospora crassa OR74A] gi|28950308|emb|CAD70838.1| [Neurospora crassa]
  misc_feature (80)..(798): NCBI GI: 256731259 Blast Desc: NECHADRAFT_96061 [Nectria haematococca mpVI 77-13-4]
  misc_feature (4)..(513): NCBI GI: 116206568 Blast Desc: CHGG_02577 [Chaetomium globosum CBS 148.51] gi|88183174|gb|EAQ90642.1| CHGG_02577 [Chaetomium globosum CBS 148.51]
  misc_feature (1584)..(2084): NCBI GI: 46126167 Blast Desc: FG07461.1 [Gibberella zeae PH-1]
MATGLDELIESLLTEIAFSGIRGCTIESLLDSIRSFHEESRIVTGDSNSKGKGKDVAQKTTTPETSAIPQHIQDARDLSVASQVWSWLVGRQDVSVGLNRQFNRSSLQEMLAMPEETIVTSSAQAETPTGGTSSAQAECSVPARPVAKDETAVARPRLFVSEDRLWKTLTGHGPDLKRVPLFEWKALVDIASVKGTGILQGDLVRLTGQDKRSLPTRTDALARKGYIIKQPICVRGFKTSKLWLAKFVENAKVEEELQGLDLANIDLSKQTLTKDLDPLPFCDKWIKEPIDYLALAQAFVALAKAWALIRYVDARVKMGVEVRQRQMRALAKTTRWLCGIGSILFVAAKFSGSNKLFKDCVKFVRDPTPAEWEHFRSTPKTRMTLPSGRIGQRGAASRAASMLKKEKNQASSAKKTKGSKARHRRRRAPIISAPWKPQKLIMSTTFDIIKRAGSRGTSNAAIIRQTLGHNYRRYTSALTRSISTPVNTQPQHVKEYSSISELQRIGKTMTYKFFSKDEMADPAGDDDRTQREEGGVNTGDDDANVTEEVHQAPSHELFSSLADDEFLPAEKVSPTMIDLFQNGTVPRRQRLGRPKKSKRKRQADSVVEASPVPTLDGSRVPEPDTKRPRLATTPVQSPDEQLAETSPQQPPSAENAPPAEALSLVKEQHPRDSINPLPRPPGASRAPPNSLDPVPNRKGRRPKSLVICFHSDKLKDPSFLGIGSGRFKGNILVGDTAATPPNTSQNTDTAEKAAGPSKVKRSKNLDSYKCEKCGNAWKNSNGLEYHLNKSRTACNPNYVPPPPAPLPVRKQKEAKTTGKGGPGNKERPALEVPQGRLSQWEQVNARFGARRIDLTKSARPSSSRSKSALADDNTLSRNPGDDGPVETISGLIKLKELRVYDATYHVQKSAIRSSHTGAGPSIIEEPIPDQSAEHHTTHQPGDSNVTEFPEDARSQTSPSTAAGTRASRYDNPPNTPPQLQLQPKARKPLPTLQQAQSTRKSNVSTTKAKDKANLKSGRRSLASFALPTRGNASFTTRRRDRTYQIVTYLLNHNGGVFPGNRSLFMALISVWVNNFEDLGPPDRRSLFNITNQMEREGLLRLVHFFFFDNRAKMQESTVLVEMDDNIRNKSPEELSALPEVVAVKEKLREMYPETYVPDGFSLRQDELKLFDELGSSGAKGKNADHTPNHLAQSELIQDIETLDYDAPVFGDASSIANRNKRSSEAALSEQETPQKKARFSSVELTTSGRTMRRWSGVHEVWDSGKLASYIWSERQKPGTTTDEQPSPARDGTPSNPFATENSGANNLRSILSAVKSHQEIDQTAKQMGRRVWRVKDIHVGGVRSHDTDDDRLLVDPFIRESTPALSVADSTTTDNTFEDADEPVQRSVPQKTDEHGQPSQSFDDKDDHAQPFVVKFAPAEIIQTNGDNCWPKHPVAFFEKGITGSFSIEGSMPGSSWFLQQNLPRCVEDILKSVSGQKSWTTALDPVYCEFIRNVNAIENWEQSKEGAQMLIMGSVVPSYNFISLVLDQSRADMKPLQAEWLSTNQYTPTYLPNEIRNFQADGKTRTRGGNKRGRPRKARGGLARQLAEAPSRPKLERRLKKPPKPTEYIEYKTRALTFIPKQPRGRVNKPAAHDDRLGSKREDELIAACVAVRTLLGGIDRSLDVGLLLKLFPGMSLSALKKFWPRVSRERKSYCEALTTKFQSAFLEAYESGELNPIDYDDVENYDWGALISWTMKLETHEDIDLPDSRQALLETHVIGEAANQIIDWRDTWFALTSTYNRIEAISSENMSIPWPPAKGPHADTLFRARTWVRSLCCTSLQGIDVDTNVVPKLVELGNGDSATTNQILDSVVKELNEQKVIVKTKGKGMGGNFRLHMNFAKSLDKMVSTVKFRQAFTFKKQLDDCLRRGEQFAFPYAANDGTIMAVLNMQANGRVIIDAVEMPNIPFGFEPGNYEGRLFPKSYYHFKVRIGPTANYIFNEDMPLLRETQTTKPPMEGPNGAIPIWVDFFGNLNMARFSDYLCMVVFTLASKGPVTPAMCVTLLKPMIDEFEVELIIEWLDQLGLLYRVVEGCQVTVAEWWWLVAGQIVDLGDATPTAQEVLPASDEEMADV

SEQ ID NO: 396 - DNA, 6722 bp, Muscodor strobelii
  misc_feature: SGI EST ID NO. CUFF.948.1
  misc_feature: Variant of the nucleotide sequence at SEQ ID NO 394
ctcgcccttctcgttgccacgcagctcagaatcccgaagcatcttcattcgatccgtgacggcgacgatctcaccacgtctttttctccatctctcatcaatgcctccattaacaccatcgacatggccacaggactcgacgagctgatcgagtcgctgctgaccgagattgccttttccggcattcgaggctgcacaattgagtctttgctggacagcattcgctcttttcacgaagagtcacgaattgtgaccggcgacagtaacagcaaaggcaaaggcaaggatgtcgctcaaaaaactacgacgcctgagacaagtgcgatccctcaacacattcaagatgctcgcgacctttctgtcgcctctcaggtatggtcgtggctagtaggaaggcaagacgtgtctgtgggactcaacagacagttcaaccgctcgtcgctacaagaaatgctcgctatgcctgaggaaactattgtcacatcttctgcacaagcagagacacctaccggcgggacctcctctgcgcaggctgagtgctcggtgcctgcccgtcctgtcgcaaaagatgaaacggcggtcgcgcgaccgagactgtttgtgtccgaggatcgactctggaaaacccttactggccacgggcccgatctcaaaagagtgcctctcttcgaatggaaagcgctcgtcgatattgcgtctgtcaaaggcactggcatcttacagggcgacctcgtcagactcactggtcaggacaagagatccctgccaactagaacagacgccttagccagaaagggttacataatcaaacagccgatatgtgttcgcggattcaagaccagcaagttgtggcttgccaaatttgtcgagaatgccaaagttgaggaggaactacaaggccttgatctagcgaatatcgacctctctaagcagactctcacgaaagatcttgatcctctcccgttctgtgacaagtggattaaggaaccgatcgactatttagcgcttgcacaagcattcgtggctctcgcgaaagcatgggctctcattcgttacgtggatgcgcgagtgaaaatgggcgttgaggtgcgacagcgacagatgagggctcttgcaaagaccacccgctggctctgtggtattggctcgattttgttcgttgcggccaaattttctggtagcaacaaactcttcaaggactgcgtcaaattcgtacgtgatccaacgcccgcagaatgggagcatttccgctctacgccgaaaactcggatgacactcccctctggtcgtattggacagcgaggagccgcatcccgcgccgccagtatgctgaagaaggaaaagaatcaagcgtcgagcgccaaaaaaaccaaaggctccaaggctcgtcatcggagacgccgagctcccatcatttctgccccttggaagccacaaaagctcatcatgagtacgacctttgacataataaaaagggccggttcccgtggcacctccaacgctgctatcattcggcagacactgggccacaactaccggagatatacttcagcccttactcgctcaatttccacacctgttaacacacagccgcaacatgtgaaggaatacagttcaatatcggagttgcagcgcattggaaagacgatgacttacaagttcttttcaaaggacgagatggccgatcctgcgggtgatgatgatcgaacccagcgtgaagaaggtggcgtgaacacaggtgacgacgacgcgaatgtaaccgaagaagtgcaccaagcaccgagccacgaactgttttcaagcctcgcggacgacgagtttttaccagctgagaaggtatcgccgacaatgattgatctgtttcaaaacggcacagttccacgaagacagagacttggccgcccaaagaagagtaaacgaaagcgacaggccgatagcgtggttgaagcatcacccgtacccacgctcgatggaagccgagttccggaacctgataccaaaagaccaagacttgctacaactccagtgcagtcgccagacgagcagcttgcagagacatctccacagcaaccgccctcggccgagaacgcccctcctgctgaagcactgtccctggtcaaggagcagcatcctagagactcgattaacccactgcctcggccgcctggcgcttcgcgtgcaccaccgaactcattagaccccgttccgaatcgaaaaggcagacggccgaaatctttagtcatctgttttcattctgataagcttaaggacccgtctttcctaggaatcggatccgggcgtttcaaaggaaacatacttgtcggagatactgcagccacccctcctaacacatcacagaataccgataccgctgaaaaagcagctggtccgtccaaagtgaagaggtcaaaaaatctggactcatataagtgtgaaaaatgcggaaatgcctggaagaactccaacggcttagaataccatcttaacaaatcacgaactgcctgcaaccctaactatgtcccgcctccaccggctcccctcccggttcgaaagcagaaggaagccaaaacaacgggtaaagggggtcctggtaataaggaacgtccagcgttagaggtacctcagggacgactgagccagtgggagcaagttaacgcacgatttggagctcgcagaattgacctgaccaaaagcgcacgaccgtcctcatctcgcagtaaatctgctctggccgatgacaacaccctatcgcgcaatcctggagatgatggccccgtagaaaccatatcagggcttatcaaattgaaagagcttcgagtttacgatgcgacctatcatgtgcaaaagtcggcgattcgctcttcacatacgggagccgggccctcaataattgaggagcctattcctgaccagagtgccgaacatcacaccacccaccagccaggtgattcaaacgttacagaattcccagaagatgctagatctcagacgtcaccatcaactgcggccggcacacgggcatcaagatatgacaacccacccaatactccgccgcaactgcagctgcagccgaaggctcgaaaacctctcccgactcttcaacaggcacagtcgacgcggaagtcaaatgtctccaccaccaaggcaaaggataaagcaaatttgaagtcaggacgtagatctctagcctcgtttgcgctgccgacaagaggaaatgcatcattcaccacccgtcggagggatcgtacctatcaaattgtcacatatctccttaatcacaacggcggtgtgttccctggaaacaggtctctgtttatggcactgatttccgtctgggtgaacaactttgaagatttgggtcctccggatcgtcgttccttgttcaatatcacgaatcaaatggaaagagagggtcttctgagactggtgcacttctttttcttcgataaccgagccaaaatgcaggagagcacggtccttgtagagatggacgataatatcagaaataagtcaccggaggaattgtctgcactgcccgaggttgttgctgtcaaagaaaaattgagagaaatgtacccggaaacttatgtcccagatggcttttctttaaggcaagatgagctgaagctgtttgatgaattaggatcatccggcgccaaaggaaagaatgcagaccacacgccaaatcacttggcccagtctgaactcatacaagacatcgagaccttggattatgatgctcctgtgtttggcgacgcttccagcattgcgaacaggaacaagcgatcgagtgaggcggcgctttctgaacaagagactccccaaaagaaggctcgcttctcatctgtggagctaactacatctggaagaaccatgagaagatggtcgggcgtgcacgaagtgtgggatagtggaaaactagcctcatatatctggagtgaaagacagaagcccggaacgacaaccgacgagcaaccaagtccagctcgtgacggcacgccatcaaatcctttcgcaactgaaaattccggagccaataatctcagatcgatactttcggcggtcaagagtcaccaagaaattgaccagaccgccaagcagatgggtcgccgtgtgtggagagttaaggacatccatgttggtggcgttaggagtcatgatactgatgatgataggttgctggttgatccctttattcgtgaatcgactccagctttgtccgttgctgatagtaccaccacggacaacacgttcgaggatgcagacgaacctgtccagcgttctgtgccacagaaaacagacgaacatggtcaaccttcgcaatcattcgatgacaaagatgatcatgcgcaaccgttcgttgtcaaatttgctccagctgaaatcatccaaaccaatggtgataactgctggccaaagcatccagttgcctttttcgaaaaaggtatcaccggcagcttcagtatagagggctcaatgccaggttcctcgtggttcttgcaacaaaacttacctcgatgcgttgaagacatcctgaaatctgtgtcaggacagaagtcctggacaacagctttagacccagtatactgcgaattcattcgtaatgtcaatgccatcgagaattgggagcagtccaaggaaggtgcccaaatgcttataatgggctctgttgttcctagttacaattttatatccctcgttctagaccagtccagagccgacatgaagcctttacaagcagaatggctcagtactaaccagtacacaccgacttacttgcctaatgaaataagaaacttccaggctgatggcaaaacaagaacgcgaggaggtaacaaacgtggacgtccgaggaaagctcgcggggggctcgcacggcagttagctgaggcgccttctcgccctaaacttgaacgccgcctcaagaagcctcctaagcccacagaatacatcgagtataagactcgagccctcacattcatcccaaagcaacctagaggtcgcgtcaacaaaccagcggcgcacgatgataggttggggtcgaagagagaggacgagctcattgcagcttgtgtggctgtcagaactcttctcggtggaattgatcgaagcttagacgtcggtctgctattgaaactcttcccaggcatgtctctctctgcgttgaagaaattctggcccagggtcagcagagagcgaaaatcatactgtgaagcacttacgacgaaattccaatccgcttttctggaggcgtacgagtctggcgagctcaacccaatcgattacgatgatgttgagaactatgattggggagcactcatatcatggacaatgaagcttgaaactcacgaggacatcgatctccctgatagccggcaagcacttttagagactcacgtcatcggcgaagctgcgaatcaaatcatcgactggcgagacacttggtttgccttgacgtcaacatacaaccgaattgaagctatctcgagtgaaaacatgtcgatcccttggccacctgcgaagggtccgcatgctgatactttgtttcgcgcgagaacttgggtccgctctttgtgttgcacgtcgctgcagggtatagatgttgacacaaacgttgtcccgaaactggtcgagcttggcaatggagattctgcaactaccaatcaaatacttgattccgtggtcaaagagcttaacgaacaaaaagttatcgtgaagacaaaaggaaaaggcatgggaggtaatttccgacttcatatgaacttcgccaagtcgctcgataaaatggtcagtacggtgaaattccggcaggcctttaccttcaagaagcagctagacgactgtttgcgtcgtggggaacaatttgcattcccctatgctgctaacgatggtacaataatggcggtattgaatatgcaggcgaatggtcgagtcattatcgatgctgtcgagatgcccaacattccgtttggatttgagcccggtaactacgaaggaagactctttcccaaaagttactatcatttcaaggttcgtattgggccaactgcgaactacatattcaatgaagacatgcctctactgagagaaacgcaaactacgaaaccgccaatggaaggccccaacggcgcgatcccgatctgggtagacttcttcggaaatctgaatatggcgcgcttctctgactatctctgcatggtcgtcttcaccctcgcctctaaaggtccagtgacaccggcgatgtgcgtcacgctcctgaaacccatgatcgatgagtttgaagtcgagcttatcatcgagtggctagatcaactcggattgctatatcgtgttgttgagggttgccaggtcaccgttgcggaatggtggtggctggttgcaggacagattgtggatctgggcgatgcgacacctacggcccaagaggtgctgccagctagtgatgaggagatggcggacgtgtaataccctttcctttggcattgtgcggcgttaggagggatgggtgcatggatttgggagttcatgggaaaacaagcgcatgtgcgcacttgctttcggagttgctgggaatgctcgggtttcattgtacgagtgtgtatcagtaatggcaagaccaagtggacaaaatcgtccaaagtgacgatgttcaatggcacagaatggcttaactgaaataaagctgttttctaacatcttttgatgctctgaatttgtcgccg

SEQ ID NO: 397 - DNA, 681 bp, Muscodor strobelii
  misc_feature: SGI cDNA ID NO. 559699
  misc_feature: Elevated expression when VOC is produced
  misc_feature: Encodes the peptide sequence at SEQ ID NO 398
atggtcagtacggtgaaattccggcaggcctttaccttcaagaagcagctagacgactgtttgcgtcgtggggaacaatttgcattcccctatgctgctaacgatggtacaataatggcggtattgaatatgcaggcgaatggtcgagtcattatcgatgctgtcgagatgcccaacattccgtttggatttgagcccggtaactacgaaggaagactctttcccaaaagttactatcatttcaaggttcgtattgggccaactgcgaactacatattcaatgaagacatgcctctactgagagaaacgcaaactacgaaaccgccaatggaaggccccaacggcgcgatcccgatctgggtagacttcttcggaaatctgaatatggcgcgcttctctgactatctctgcatggtcgtcttcaccctcgcctctaaaggtccagtgacaccggcgatgtgcgtcacgctcctgaaacccatgatcgatgagtttgaagtcgagcttatcatcgagtggctagatcaactcggattgctatatcgtgttgttgagggttgccaggtcaccgttgcggaatggtggtggctggttgcaggacagattgtggatctgggcgatgcgacacctacggcccaagaggtgctgccagctagtgatgaggagatggcggacgtgtaa

SEQ ID NO: 398 - protein, 226 aa, Muscodor strobelii
  misc_feature: SGI Peptide ID NO. 559699
  misc_feature (6)..(206): NCBI GI: 145606234 Blast Desc: MGG_02447 [Magnaporthe grisea 70-15] gi|145013949|gb|EDJ98590.1| MGG_02447 [Magnaporthe grisea 70-15]
  misc_feature (6)..(198): NCBI GI: 85099370 Blast Desc: NCU01260 [Neurospora crassa OR74A] gi|28922300|gb|EAA31541.1| [Neurospora crassa OR74A] gi|28950308|emb|CAD70838.1| [Neurospora crassa]
  misc_feature (6)..(200): NCBI GI: 261351487 Blast Desc: conserved [Verticillium albo-atrum VaMs.102]
  misc_feature (1)..(197): NCBI GI: 256731259 Blast Desc: NECHADRAFT_96061 [Nectria haematococca mpVI 77-13-4]
  misc_feature (2)..(198): NCBI GI: 171692109 Blast Desc: protein product [Podospora anserina] gi|170946003|emb|CAP72804.1| protein product [Podospora anserina]
  misc_feature (6)..(180): NCBI GI: 116206568 Blast Desc: CHGG_02577 [Chaetomium globosum CBS 148.51] gi|88183174|gb|EAQ90642.1| CHGG_02577 [Chaetomium globosum CBS 148.51]
  misc_feature (1)..(198): NCBI GI: 46126167 Blast Desc: FG07461.1 [Gibberella zeae PH-1]
  misc_feature (6)..(201): NCBI GI: 156042225 Blast Desc: SS1G_11663 [Sclerotinia sclerotiorum 1980] gi|154696046|gb|EDN95784.1| SS1G_11663 [Sclerotinia sclerotiorum 1980]
  misc_feature (4)..(200): NCBI GI: 115387931 Blast Desc: [Aspergillus terreus NIH2624] gi|114195555|gb|EAU37255.1| [Aspergillus terreus NIH2624]
  misc_feature (2)..(198): NCBI GI: 226289273 Blast Desc: conserved [Paracoccidioides brasiliensis Pb18]
  misc_feature: Useful for introducing or modulating the production of volatile compounds
MVSTVKFRQAFTFKKQLDDCLRRGEQFAFPYAANDGTIMAVLNMQANGRVIIDAVEMPNIPFGFEPGNYEGRLFPKSYYHFKVRIGPTANYIFNEDMPLLRETQTTKPPMEGPNGAIPIWVDFFGNLNMARFSDYLCMVVFTLASKGPVTPAMCVTLLKPMIDEFEVELIIEWLDQLGLLYRVVEGCQVTVAEWWWLVAGQIVDLGDATPTAQEVLPASDEEMADV

SEQ ID NO: 399 - DNA, 6722 bp, Muscodor strobelii; identical to SEQ ID NO: 396
  misc_feature: SGI EST ID NO. CUFF.948.1
  misc_feature: Variant of the nucleotide sequence at SEQ ID NO 397

SEQ ID NO: 400 - DNA, 951 bp, Muscodor strobelii
  misc_feature: SGI cDNA ID NO. 559700
  misc_feature: Encodes the peptide sequence at SEQ ID NO 401
atgccacacaagcacacccgcaaggtccgggacgaagcttccttcgacttgcctccaacgcaatttgccaaagccttgccggtaacgcagacttcacggaagaaggatgactctcggaaagacaaatcagcacctgcgacctcagacacgaacacgaaaaacttgaagcgcaaacgagatgccgctcccaagaacgatgcgccgcgggccttcaaacgattaatggcgtttgccaacgggaagaagccgcgatcaggcttggacaatggcgatcaaccgcgcaccgccaagggcaagaagcgagactcggcccaacaagcgcaatcctccgagcctatagcgaaaccaacagccgaaattcccaccattcgccctggagagcgcatgtcggaattctcggctcgcgtcgacgccgccctgcctctggccggcctcatcaacaaatccgtgaatgcgagcagcaaggacccgctaggactgaagaaataccgcacgctgaaggaaaagaagatgcacaaaatgtacgacgagtggcgggaacaagaccgcaaggtcaaagaaaagcgcgaagaagagcgggaggaacaggaagagaaagatctcgaggaggaggagaatggcgtctcctggaaactgcacattcaagaccgggcttcggggaaaaggaagaagggcgtcctgaaagatgaagaggacccatgggaggtattgcgaatgaaacgcggcgaagtacgtccaggactgcacgacgtcgccctggcccctccccaattcaccgcgaagccttcgaagcaacaactggtgcggggagcggcggtacaggtacaagacattcccaagtcggccggaagtttgaagcgaagagaggaattacaagtcgcaagaactgatattgtcgctcaataccgaaaggcaatgagccagaagcggtcggcaccgcaagaggcatga

SEQ ID NO: 401 - protein, 316 aa, Muscodor strobelii
  misc_feature: SGI Peptide ID NO. 559700
  misc_feature (1)..(310): NCBI GI: 85099366 Blast Desc: NCU01259 [Neurospora crassa OR74A] gi|28922299|gb|EAA31540.1| conserved [Neurospora crassa OR74A] gi|28950309|emb|CAD70839.1| [Neurospora crassa]
  misc_feature (1)..(312): NCBI GI: 39968711 Blast Desc: MGG_02448 [Magnaporthe grisea 70-15] gi|145013948|gb|EDJ98589.1| MGG_02448 [Magnaporthe grisea 70-15]
  misc_feature (1)..(312): NCBI GI: 171692107 Blast Desc: protein product [Podospora anserina] gi|170946002|emb|CAP72803.1| protein product [Podospora anserina]
  misc_feature (1)..(306): NCBI GI: 156042223 Blast Desc: SS1G_11662 [Sclerotinia sclerotiorum 1980] gi|154696045|gb|EDN95783.1| SS1G_11662 [Sclerotinia sclerotiorum 1980]
  misc_feature (1)..(306): NCBI GI: 154298497 Blast Desc: BC1G_11433 [Botryotinia fuckeliana B05.10] gi|150858029|gb|EDN33221.1| BC1G_11433 [Botryotinia fuckeliana B05.10]
  misc_feature (1)..(304): NCBI GI: 256731261 Blast Desc: NECHADRAFT_96062 [Nectria haematococca mpVI 77-13-4]
  misc_feature (1)..(304): NCBI GI: 46126165 Blast Desc: FG07460.1 [Gibberella zeae PH-1]
  misc_feature (1)..(268): NCBI GI: 261351488 Blast Desc: conserved [Verticillium albo-atrum VaMs.102]
  misc_feature (1)..(175): NCBI GI: 116206566 Blast Desc: CHGG_02576 [Chaetomium globosum CBS 148.51] gi|88183173|gb|EAQ90641.1| CHGG_02576 [Chaetomium globosum CBS 148.51]
  misc_feature (1)..(311): NCBI GI: 189198996 Blast Desc: conserved [Pyrenophora tritici-repentis Pt-1C-BFP] gi|187982934|gb|EDU48422.1| conserved [Pyrenophora tritici-repentis Pt-1C-BFP]
MPHKHTRKVRDEASFDLPPTQFAKALPVTQTSRKKDDSRKDKSAPATSDTNTKNLKRKRDAAPKNDAPRAFKRLMAFANGKKPRSGLDNGDQPRTAKGKKRDSAQQAQSSEPIAKPTAEIPTIRPGERMSEFSARVDAALPLAGLINKSVNASSKDPLGLKKYRTLKEKKMHKMYDEWREQDRKVKEKREEEREEQEEKDLEEEENGVSWKLHIQDRASGKRKKGVLKDEEDPWEVLRMKRGEVRPGLHDVALAPPQFTAKPSKQQLVRGAAVQVQDIPKSAGSLKRREELQVARTDIVAQYRKAMSQKRSAPQEA

SEQ ID NO: 402 - DNA, 1957 bp, Muscodor strobelii
  misc_feature: SGI EST ID NO. CUFF.958.1
  misc_feature: Variant of the nucleotide sequence at SEQ ID NO 400
gcttgatgtgtatatcgtatgggtagtatgtaaatcaatagcaacaagccacatacagtaaatgactacctaaatgtactcttgtcgatggacatacgtattgaggaataggtccggaaaagtttggatcgggcatcgaaagcacactgttgactggcgaggcggagcgaaaaatgtgtatttttcgctccgccttgattggctacaaacacacatgcccccagctacaagaaagaggaacgaaacccgattgaaggatcactggagtcgagatgctactggaaagaactgcaaaagtaccttatttatgattaagctcctatcagtgaaggcatagagggcttctgaaagggttccaatgacacagcgcgccaatggcacaagctgggtggtcggaggttggtgcggaatttcgccgtttgtcaaccgaataaccccaccatgaccccagaccaagcttatagccttggcgtcttggatgtgcaaaatcctgtcccaccgcatttttcatgccaatgcctggtagcataacgacgtcgaccactgacaggcacattgaggttatctcacactcggagccgaactataatcgaagagcgttccaacgaggacatcgcgttggctatcatccgccatacaactgaatccaactctacctgtcgcggctgttcacagccatccaaattttgatgcgaaccgctctactctggaactatcgatcctcgtcatgccacacaagcacacccgcaaggtccgggacgaagcttccttcgacttgcctccaacgcaatttgccaaagccttgccggtaacgcagacttcacggaagaaggatgactctcggaaagacaaatcagcacctgcgacctcagacacgaacacgaaaaacttgaagcgcaaacgagatgccgctcccaagaacgatgcgccgcgggccttcaaacgattaatggcgtttgccaacgggaagaagccgcgatcaggcttggacaatggcgatcaaccgcgcaccgccaagggcaagaagcgagactcggcccaacaagcgcaatcctccgagcctatagcgaaaccaacagccgaaattcccaccattcgccctggagagcgcatgtcggaattctcggctcgcgtcgacgccgccctgcctctggccggcctcatcaacaaatccgtgaatgcgagcagcaaggacccgctaggactgaagaaataccgcacgctgaaggaaaagaagatgcacaaaatgtacgacgagtggcgggaacaagaccgcaaggtcaaagaaaagcgcgaagaagagcgggaggaacaggaagagaaagatctcgaggaggaggagaatggcgtctcctggaaactgcacattcaagaccgggcttcggggaaaaggaagaagggcgtcctgaaagatgaagaggacccatgggaggtattgcgaatgaaacgcggcgaagtacgtccaggactgcacgacgtcgccctggcccctccccaattcaccgcgaagccttcgaagcaacaactggtgcggggagcggcggtacaggtacaagacattcccaagtcggccggaagtttgaagcgaagagaggaattacaagtcgcaagaactgatattgtcgctcaataccgaaaggcaatgagccagaagcggtcggcaccgcaagaggcatgagttcgtgtgaagccagccaggattagtagatagtcttccggcagctatctaataaatgataccctgcggaaagttgattttcaacatggccgaatgcgataccgcttgatgttccttctctgtcttgaggggggttaagaggagggagtgcacactgcccgtggccgtaaaatatgtactttcatgtagtcaatgggcccaatgacatcgttgcgtataagtctagaattgccatggatgtgtaccatgaatggggaccgattgctaagagcaagcgaa

SEQ ID NO: 403 - DNA, 1188 bp, Muscodor strobelii
  misc_feature: SGI cDNA ID NO. 559701
  misc_feature: Elevated expression when VOC is produced
  misc_feature: Encodes the peptide sequence at SEQ ID NO 404
atggaggcgttagaagatatgtggaccgacagacgggcacatagatactcgcttgtcgagacatcagaacagtctgacgatggtgccagtttttcagctcaggagctggagaaagggaacacgaatgagcctattttaccaaagagaaaacgtcgtctcgccgcctatctaatatctagtacggtatggggttcggtgatatttgccggaataacactcatatatctactgctatccattgctagaagtttatggggaatagaagatgacccagacaggatattcggaaattggggaaagccagcaactatcaccgaggacatagcttggtacccgacagattttctacgagatgtgatacccgttccatgtcactctcataacgattactggcgtaaagttccggtattctcagccctgcacgctggctgtgttggtatcgaggcagacgtctggctcttagacgatgattccagactctacgttggacacgacaccgcggctcttacagcaactcgcacctttgaaaacttatatatcaacccattagtagagcttttggacagaaataacccacaaacttcgttctataacgataccagacgagggatattcgactcggaccctgaccagacagtggtattattagtcgacgtgaagactgacggaccaaagacctttcacgaaatccagagacaacttgagccattacgcgctagagattggttaacctacgttcaagatggtgtcgtccacaaacgccaaatcacggtcgtgggctccggcaagatgccattcgacgagctcatgcagaactcaacatacagagatatgttctacgacgcgcccctaaacgacatgttcgaggacccgtattcactcgagccattagcagtgttggacgacagcgaaacggtctacaagtacaatacgaccaactcgttctacgctagcgttaatctgaagaaggcggtggggatcgtattcggcggcttcagtaagcaacagctccgcatcatccggggtcagatccgagctgcgcatagcagagggttgaaggtcagatattggaatacaccagcctggcccatcaatgtcaggaataaggtctggcgcagacttatggaggaaggtgctgatattctgaatgtggatgatttgaagtccgcaacgaaaaagagatggtag

SEQ ID NO: 404 - protein, 395 aa, Muscodor strobelii
  misc_feature: SGI Peptide ID NO. 559701
  misc_feature (49)..(395): NCBI GI: 39968715 Blast Desc: MGG_02450 [Magnaporthe grisea 70-15] gi|145013946|gb|EDJ98587.1| MGG_02450 [Magnaporthe grisea 70-15]
  misc_feature (48)..(395): NCBI GI: 156042217 Blast Desc: SS1G_11659 [Sclerotinia sclerotiorum 1980] gi|154696042|gb|EDN95780.1| SS1G_11659 [Sclerotinia sclerotiorum 1980]
  misc_feature (33)..(395): NCBI GI: 116206560 Blast Desc: CHGG_02573 [Chaetomium globosum CBS 148.51] gi|88183170|gb|EAQ90638.1| CHGG_02573 [Chaetomium globosum CBS 148.51]
  misc_feature (79)..(395): NCBI GI: 171692089 Blast Desc: protein product [Podospora anserina] gi|170945993|emb|CAP72794.1| protein product [Podospora anserina]
  misc_feature (76)..(395): NCBI GI: 154298499 Blast Desc: BC1G_11434 [Botryotinia fuckeliana B05.10] gi|150858030|gb|EDN33222.1| BC1G_11434 [Botryotinia fuckeliana B05.10]
  misc_feature (62)..(395): NCBI GI: 67523377 Blast Desc: AN2145.2 [Aspergillus nidulans FGSC A4] gi|40745033|gb|EAA64189.1| AN2145.2 [Aspergillus nidulans FGSC A4] gi|259487524|tpe|CBF86266.1| TPA: [Aspergillus nidulans FGSC
  misc_feature (8)..(395): NCBI GI: 71002520 Blast Desc: conserved [Aspergillus fumigatus Af293] gi|66853579|gb|EAL93903.1| conserved [Aspergillus fumigatus Af293]
  misc_feature (8)..(395): NCBI GI: 159129998 Blast Desc: conserved [Aspergillus fumigatus A1163]
  misc_feature (48)..(395): NCBI GI: 255953025 Blast Desc: Pc21g02000 [Penicillium chrysogenum Wisconsin 54-1255] gi|211588976|emb|CAP95097.1| Pc21g02000 [Penicillium chrysogenum Wisconsin 54-1255]
  misc_feature (68)..(395): NCBI GI: 115388021 Blast Desc: conserved [Aspergillus terreus NIH2624] gi|114195600|gb|EAU37300.1| conserved [Aspergillus terreus NIH2624]
  misc_feature: Useful for introducing or modulating the production of volatile compounds
MEALEDMWTDRRAHRYSLVETSEQSDDGASFSAQELEKGNTNEPILPKRKRRLAAYLISSTVWGSVIFAGITLIYLLLSIARSLWGIEDDPDRIFGNWGKPATITEDIAWYPTDFLRDVIPVPCHSHNDYWRKVPVFSALHAGCVGIEADVWLLDDDSRLYVGHDTAALTATRTFENLYINPLVELLDRNNPQTSFYNDTRRGIFDSDPDQTVVLLVDVKTDGPKTFHEIQRQLEPLRARDWLTYVQDGVVHKRQITVVGSGKMPFDELMQNSTYRDMFYDAPLNDMFEDPYSLEPLAVLDDSETVYKYNTTNSFYASVNLKKAVGIVFGGFSKQQLRIIRGQIRAAHSRGLKVRYWNTPAWPINVRNKVWRRLMEEGADILNVDDLKSATKKRW

SEQ ID NO: 405 - DNA, 2248 bp, Muscodor strobelii
  misc_feature: SGI EST ID NO. CUFF.954.0
  misc_feature: Variant of the nucleotide sequence at SEQ ID NO 403
caagcctgacatttgccgcgagtgccacctcgcgctgcaggcactgacccgcgagacagaacaaacgggaggtctggaatctgaacaaccacctagcgtaggaggacccttatcctgcaagtccaccatggacgctgcagccaccaatgatcgacccagctgcactcacgggctgacccatgattggagctaaccgttcgccaagctctccatgatttgaaaggtcccaaccgccttgtccgtacaggcacttccacgatccggtggccagatagaccacggacctctagtcagcaagcgaaactcgccctcgtgcagcgcatctccacgattacacatagatagtcatgacttttaagtcgttatgccgggcccagagtattaataaaatgtagctaccccgggccaccgtggactgccgatctgcttttgaatttgtctgttatatgtgcatgatttacaacaacgctcagaaacggagcatccggacataagttgccgtcgagatgatgcacaattagttgtgtgaggccatattgcgcctttagacttaagtccgttccaacatggcatcgtgagccatcttttgctctcatttcaaattcaatttgcgaattatcagccaaccaacatccgatctgctcacattttgctcacacgctaccctactatcatcccatttaaactgccacttgtcgacactcggatgagtcgcttataccattttctcgtcaccgcatcacagggttaggtcagagaggaagtagtcacgctataaagcgctttggtcatcttagtagctctgaaatcgcatatatccaagccagataacccttcatttcgctaccctcaaccttcatacgcctaccgcagtgatggaggcgttagaagatatgtggaccgacagacgggcacatagatactcgcttgtcgagacatcagaacagtctgacgatggtgccagtttttcagctcaggagctggagaaagggaacacgaatgagcctattttaccaaagagaaaacgtcgtctcgccgcctatctaatatctagtacggtatggggttcggtgatatttgccggaataacactcatatatctactgctatccattgctagaagtttatggggaatagaagatgacccagacaggatattcggaaattggggaaagccagcaactatcaccgaggacatagcttggtacccgacagattttctacgagatgtgatacccgttccatgtcactctcataacgattactggcgtaaagttccggtattctcagccctgcacgctggctgtgttggtatcgaggcagacgtctggctcttagacgatgattccagactctacgttggacacgacaccgcggctcttacagcaactcgcacctttgaaaacttatatatcaacccattagtagagcttttggacagaaataacccacaaacttcgttctataacgataccagacgagggatattcgactcggaccctgaccagacagtggtattattagtcgacgtgaagactgacggaccaaagacctttcacgaaatccagagacaacttgagccattacgcgctagagattggttaacctacgttcaagatggtgtcgtccacaaacgccaaatcacggtcgtgggctccggcaagatgccattcgacgagctcatgcagaactcaacatacagagatatgttctacgacgcgcccctaaacgacatgttcgaggacccgtattcactcgagccattagcagtgttggacgacagcgaaacggtctacaagtacaatacgaccaactcgttctacgctagcgttaatctgaagaaggcggtggggatcgtattcggcggcttcagtaagcaacagctccgcatcatccggggtcagatccgagctgcgcatagcagagggttgaaggtcagatattggaatacaccagcctggcccatcaatgtcaggaataaggtctggcgcagacttatggaggaaggtgctgatattctgaatgtggatgatttgaagtccgcaacgaaaaagagatggtagatggtgaatgatgtgatgattttatgatttttgagatttatatacccacatagcaatacaccttataatttcaatatcttctcgtcgatcacacatcgtaaggtgagctgatatgacgttcaaaaagaggctcaaagttagccttcctttcttcctttcttccttcatgcgacgacgggattccc

SEQ ID NO: 406 - DNA, 954 bp, Muscodor strobelii
  misc_feature: SGI cDNA ID NO. 559702
  misc_feature: Encodes the peptide sequence at SEQ ID NO 407
atgtcggcaaacacagctctcgtcacgggggcaactggcctcttaggtcgagaggtcttgaaggctttcacaagagcagactggactgccaagggtctcggatattcccgcgctgatggatcaactgtcttgaaagtcgacctagcaaacagctcagaagttgatgcaacgctagacaaaatcaagccccgagttgtggtccatagtgctgcgaatcgattcccagataaatgcgacgcagaccccgaaggcgcacgagccttaaatgttgccgcgacagagagtctcgcatctctctgtgcagcacgtgacatacttctgatctatatatcaaccgactatgtcttccccggaatagaaggcgatgcgccctacgcgtcagacgccacgccagcacctacgaacctctacggacagacaaaactagatggcgagcacgcaacattgcgggtatataaagaagcaaacaagacgggacttggcgtcgtgctccgtgtccccgttctgtacggagatgcggagatgcccagcgaaagcgcagtcaatgtattgatggattcggtctggaaggcgcaagagcccggtgcgaagatgaagatggatcactgggccctgagatatccgacgaataccgaggacgttgggcgtatttgtgctgatatcgccaagaaatacatcagcgcctcagatcgatcaagcctgccgcagattcttcagttcagttccgaagagaagttcacgaagtacgagatttgtcaggtttttagcgacataatgggtctgtcgatcgatgcgattgaacctaatacggaggggaacgacccgaatgctactgttcagagaccgtatgattgtcatcttagtacgactaccttgaaggatattgggatcgatgtctcggcgatggatttcaaggcttggtggaggtggaatgttagagcctttagacactaa

SEQ ID NO: 407 - protein, 317 aa, Muscodor strobelii
  misc_feature: SGI Peptide ID NO. 559702
  misc_feature (6)..(252): Pfam Id: PF01370 Pfam Desc: NAD dependent epimerase/dehydratase family
  misc_feature (8)..(226): Pfam Id: PF07993 Pfam Desc: Male sterility protein
  misc_feature (4)..(306): Pfam Id: PF04321 Pfam Desc: RmlD substrate binding domain
  misc_feature (6)..(149): Pfam Id: PF01370 Pfam Desc: NAD dependent epimerase/dehydratase family
  misc_feature (4)..(149): Pfam Id: PF04321 Pfam Desc: RmlD substrate binding domain
  misc_feature (1)..(317): NCBI GI: 171693893 Blast Desc: protein product [Podospora anserina] gi|170946895|emb|CAP73699.1| protein product [Podospora anserina]
  misc_feature (1)..(316): NCBI GI: 256731402 Blast Desc: [Nectria haematococca mpVI 77-13-4]
  misc_feature (6)..(316): NCBI GI: 156050135 Blast Desc: SS1G_07654 [Sclerotinia sclerotiorum 1980] gi|154692055|gb|EDN91793.1| SS1G_07654 [Sclerotinia sclerotiorum 1980]
  misc_feature (1)..(316): NCBI GI: 39947805 Blast Desc: MGG_08631 [Magnaporthe grisea 70-15] gi|145010254|gb|EDJ94910.1| MGG_08631 [Magnaporthe grisea 70-15]
  misc_feature (5)..(317): NCBI GI: 85103557 Blast Desc: NCU01177 [Neurospora crassa OR74A] gi|18376291|emb|CAD21404.1| related to methionine adenosyltransferase regulatory beta subunit [Neurospora crassa]
  misc_feature (1)..(310): NCBI GI: 46124817 Blast Desc: FG06786.1 [Gibberella zeae PH-1]
  misc_feature (3)..(314): NCBI GI: 67902090 Blast Desc: AN8032.2 [Aspergillus nidulans FGSC A4] gi|40740464|gb|EAA59654.1| AN8032.2 [Aspergillus nidulans FGSC A4] gi|259480783|tpe|CBF73741.1| TPA: NAD dependent family FGSC
  misc_feature (3)..(316): NCBI GI: 121719189 Blast Desc: NAD dependent epimerase/dehydratase family protein [Aspergillus clavatus NRRL 1] gi|119404513|gb|EAW14889.1| NAD dependent epimerase/dehydratase family protein [Aspergillus NRRL
  misc_feature (3)..(316): NCBI GI: 119499101 Blast Desc: NAD dependent epimerase/dehydratase family protein [Neosartorya fischeri NRRL 181] gi|119414472|gb|EAW24411.1| NAD dependent epimerase/dehydratase family protein [Neosartorya NRRL
  misc_feature (4)..(317): NCBI GI: 239612427 Blast Desc: NAD dependent epimerase/dehydratase [Ajellomyces dermatitidis ER-3]
  misc_feature (7)..(171): SWISSPROT Homolog: EC 1.1.1.133 dTDP-4-dehydrorhamnose reductase
MSANTALVTGATGLLGREVLKAFTRADWTAKGLGYSRADGSTVLKVDLANSSEVDATLDKIKPRVVVHSAANRFPDKCDADPEGARALNVAATESLASLCAARDILLIYISTDYVFPGIEGDAPYASDATPAPTNLYGQTKLDGEHATLRVYKEANKTGLGVVLRVPVLYGDAEMPSESAVNVLMDSVWKAQEPGAKMKMDHWALRYPTNTEDVGRICADIAKKYISASDRSSLPQILQFSSEEKFTKYEICQVFSDIMGLSIDAIEPNTEGNDPNATVQRPYDCHLSTTTLKDIGIDVSAMDFKAWWRWNVRAFRH

SEQ ID NO: 408 - DNA, 1546 bp, Muscodor strobelii
  misc_feature: SGI EST ID NO. CUFF.973.1
  misc_feature: Variant of the nucleotide sequence at SEQ ID NO 406
ccggccagtagcatcgcgtggcatacgtcacactcacgagctttatatgcgtctgctaattgccaatccttcactcaacatcaaatggcatctccaaaatgtcggcaaacacagctctcgtcacgggggcaactggcctcttaggtcgagaggtcttgaaggctttcacaagagcagactggactgccaagggtctcggatattcccgcgctgatggatcaactgtcttgaaagtcgacctagcaaacagctcagaagttgatgcaacgctagacaaaatcaagccccgagttgtggtccatagtgctgcgaatcgattcccagataaatgcgacgcagaccccgaaggcgcacgagccttaaatgttgccgcgacagagagtctcgcatctctctgtgcagcacgtgacatacttctgatctatatatcaaccgactatgtcttccccggaatagaaggcgatgcgccctacgcgtcagacgccacgccagcacctacgaacctctacggacagacaaaactagatggcgagcacgcaacattgcgggtatataaagaagcaaacaagacgggacttggcgtcgtgctccgtgtccccgttctgtacggagatgcggagatgcccagcgaaagcgcagtcaatgtattgatggattcggtctggaaggcgcaagagcccggtgcgaagatgaagatggatcactgggccctgagatatccgacgaataccgaggacgttgggcgtatttgtgctgatatcgccaagaaatacatcagcgcctcagatcgatcaagcctgccgcagattcttcagttcagttccgaagagaagttcacgaagtacgagatttgtcaggtttttagcgacataatgggtctgtcgatcgatgcgattgaacctaatacggaggggaacgacccgaatgctactgttcagagaccgtatgattgtcatcttagtacgactaccttgaaggatattgggatcgatgtctcggcgatggatttcaaggcttggtggaggtggaatgttagagcctttagacactaatgtgtgtgagtatcgccgtgcaggctcttgggagacgagtgtgttgcgtcgagttgcagagtagtgaatagtaagtgggtggcggaggtatctatatactcctcagggtcgtgaacagtgcatccgaccgatgcaagaaaggtctaccagtggttcatagtccgatacagatagcctgcgtcccagcatagaaccactgagatcgagcgacagaggcgaatagcggttttggacgcaggtgcgtcgttgtcatacttaacagtcaaaaatggcacacatagatattctaagactgttgctgtcgggattgtaggacccttcaataaatcaagctagtctgtatgatgtggttagattgtctaggtggacgtatggaggaattacgtcttggtagcgctttggagtcgaccctagaacaggagaagctgtgtgttcagatttcgaaagagatgctttcaaaaacactgtctctacaatgatttcttcgtgcccaa

SEQ ID NO: 409 - DNA, 954 bp, Muscodor strobelii
  misc_feature: SGI cDNA ID NO. 559703
  misc_feature: Encodes the peptide sequence at SEQ ID NO 410
atgtctgatctcctcggcccactgccgacgactttttcggtacccgataggatatgggactcagtgtataagatggaaacaacaccagcaggatactactacctgcttcagggtgcggaagaacaaacgacttggtttcccagcggctacacggcacacacagaacaatattactcgccggcgatatgtccgacaggcttcacgtcggcctgcgtgagcacaaatcgtgcggggacggtgaccgagaccgttgtaacatgttgcccaaccgtatcggaattcgggtgccagaccaatcctagctacgtgtgggagtcgacgttgggatgtactgtcgctgtaggggacgtcgaaacgttatggactgtgtatcccgtaactggaggcgatacgtctaccgtgacatcgaccggaaacgttggtggtttgaatgcctattcaatccaggtgcgatatcaatctaccgactttacgaccacaacctcgacttcgatttcgaccagctctaaaacaccaacgtcatcgtcgtcgatagatggactcgtgccgaccgggagtaacaacgcaaatgtgtctcatagtaaagggggaatcagtgcgggtgctgcagcaggcatcgcagttggcgccgtcatattactattgatcataattgctggggtctggctgatgattcgaaggagaagaaagcaaggaggaggagacgggcccattccaccacctgaacaggcacctatgcaacaatacccgcagatgacaagtgccggaacgccagtgtcctgggccagtggtacaccgattcctcaaccacaattcgggcaccagcagtattatgaccctccgaaaggggccgtctccggccaggccagttatgtgtatgagatgggagcgcacgaaaatgcggtcgagatggatgcgaatgcgactgctgattcgccggtccatcgctcttaa

SEQ ID NO: 410 - protein, 317 aa, Muscodor strobelii
  misc_feature: SGI Peptide ID NO. 559703
  misc_feature (33)..(231): NCBI GI: 255930157 Blast Desc: Pc06g00220 [Penicillium chrysogenum Wisconsin 54-1255] gi|211581251|emb|CAP79015.1| Pc06g00220 [Penicillium chrysogenum Wisconsin 54-1255]
  misc_feature (7)..(231): NCBI GI: 119485867 Blast Desc: NFIA_100160 [Neosartorya fischeri NRRL 181] gi|119410432|gb|EAW20379.1| NFIA_100160 [Neosartorya fischeri NRRL 181]
  misc_feature (4)..(210): NCBI GI: 116204789 Blast Desc: CHGG_10278 [Chaetomium globosum CBS 148.51] gi|88176406|gb|EAQ83874.1| CHGG_10278 [Chaetomium globosum CBS 148.51]
  misc_feature (8)..(250): NCBI GI: 225684269 Blast Desc: conserved [Paracoccidioides brasiliensis Pb03]
  misc_feature (8)..(212): NCBI GI: 226284635 Blast Desc: conserved [Paracoccidioides brasiliensis Pb01]
  misc_feature (46)..(229): NCBI GI: 46126779 Blast Desc: FG07767.1 [Gibberella zeae PH-1]
  misc_feature (4)..(251): NCBI GI: 154312023 Blast Desc: BC1G_06045 [Botryotinia fuckeliana B05.10] gi|150850695|gb|EDN25888.1| BC1G_06045 [Botryotinia fuckeliana B05.10]
  misc_feature (2)..(252): NCBI GI: 156060363 Blast Desc: [Sclerotinia sclerotiorum 1980] gi|154699728|gb|EDN99466.1| [Sclerotinia sclerotiorum 1980]
  misc_feature (8)..(220): NCBI GI: 212543619 Blast Desc: conserved [Penicillium marneffei ATCC 18224] gi|210066871|gb|EEA20964.1| conserved [Penicillium marneffei ATCC 18224]
  misc_feature (40)..(250): NCBI GI: 171695506 Blast Desc: protein product [Podospora anserina] gi|170947995|emb|CAP60159.1| protein product [Podospora anserina]
MSDLLGPLPTTFSVPDRIWDSVYKMETTPAGYYYLLQGAEEQTTWFPSGYTAHTEQYYSPAICPTGFTSACVSTNRAGTVTETVVTCCPTVSEFGCQTNPSYVWESTLGCTVAVGDVETLWTVYPVTGGDTSTVTSTGNVGGLNAYSIQVRYQSTDFTTTTSTSISTSSKTPTSSSSIDGLVPTGSNNANVSHSKGGISAGAAAGIAVGAVILLLIIIAGVWLMIRRRRKQGGGDGPIPPPEQAPMQQYPQMTSAGTPVSWASGTPIPQPQFGHQQYYDPPKGAVSGQASYVYEMGAHENAVEMDANATADSPVHRS

SEQ ID NO: 411 - DNA, 2308 bp, Muscodor strobelii
  misc_feature: SGI EST ID NO. CUFF.986.1
  misc_feature: Variant of the nucleotide sequence at SEQ ID NO 409
ctaggacccttcacactagctggggcaaagccgctcaatattgggtcactgagtgacattgggccttggctttggggggcatttggaactttgacgtgacagcaacagtctggttctggcagggatgtctttgatgtcgaggaagacggtgggaaaccagacatgtctcggaaaattgtgtggatgggtatgggcaaggctcgaggatccaatatgccctattcttgtatactttccaatgtcccttcgggcaacgtaagcagtaaaactacacttttctcctgatcttggtgcggacttctagaattgccaatcaaccctcgccttcgattctcttccaagatcagcaactatctaggtatacgaatcgtctacaacattgccgttccaaaggctcgtacacgaagcatccatcgcaaagatgtctgatctcctcggcccactgccgacgactttttcggtacccgataggatatgggactcagtgtataagatggaaacaacaccagcaggatactactacctgcttcagggtgcggaagaacaaacgacttggtttcccagcggctacacggcacacacagaacaatattactcgccggcgatatgtccgacaggcttcacgtcggcctgcgtgagcacaaatcgtgcggggacggtgaccgagaccgttgtaacatgttgcccaaccgtatcggaattcgggtgccagaccaatcctagctacgtgtgggagtcgacgttgggatgtactgtcgctgtaggggacgtcgaaacgttatggactgtgtatcccgtaactggaggcgatacgtctaccgtgacatcgaccggaaacgttggtggtttgaatgcctattcaatccaggtgcgatatcaatctaccgactttacgaccacaacctcgacttcgatttcgaccagctctaaaacaccaacgtcatcgtcgtcgatagatggactcgtgccgaccgggagtaacaacgcaaatgtgtctcatagtaaagggggaatcagtgcgggtgctgcagcaggcatcgcagttggcgccgtcatattactattgatcataattgctggggtctggctgatgattcgaaggagaagaaagcaaggaggaggagacgggcccattccaccacctgaacaggcacctatgcaacaatacccgcagatgacaagtgccggaacgccagtgtcctgggccagtggtacaccgattcctcaaccacaattcgggcaccagcagtattatgaccctccgaaaggggccgtctccggccaggccagttatgtgtatgagatgggagcgcacgaaaatgcggtcgagatggatgcgaatgcgactgctgattcgccggtccatcgctcttaatatttaatcgatgtctactagagatcagtggcgattcatatgtagacctccggctaccagggtgctacaagcgggtatgccttgtacatatttgatttgattcggcatatagcgagggcgggagcgacttgttattaataacctgcttaattgggcatttaagctgtctggaatttcccatgcattcttcggtctgtgttgcatagtactttgtgtatggatgagtatttggccccagatgtagcctgactattacggtgtatcatgtacttggcattaaacacaaatattctgcttcccgaggcgtcgagttggccgaagtcttattaagctcggaacacctccacatcccgcgtccgcagacttggtacgtgtacctcttctacgcttatttttgcgtccggcgcctcggagtcgaatggaacgtttgaatggattagtgaaattgacccccgttcatattctgggtaacgacatcacggtaaaacttttccctgacctcgccttcttgggtgtcatatttgcgccttgaatgccttgagtctagcgcgtgattagctattagtttgtgacaatagaaagatatgatagctcaaaattaaggaatgctgactttgcttctcattcgtcgaagaaactcacactaggtacgaatagtcgctcacgcgttcgcatccgatttgaccaatgtgagcagtcacacgatttataatgaacatagtcggactttcgagagcttgcaggttccgcagtcttttgcccttaccagatcgaatacggctgtggggggcggcagtctggatatccgcattgttcccgttcgaggctgcgccatcaccaatcttgtccatatgagaaccgggaaatggtgcaatcacatcataagtgcgtcggcgacaatttcttagaaagcaatgtagatctgatgtggtt

SEQ ID NO: 412 - DNA, 1476 bp, Muscodor strobelii
  misc_feature: SGI cDNA ID NO. 559704
  misc_feature: Elevated expression when VOC is produced
  misc_feature: Encodes the peptide sequence at SEQ ID NO 413
atgccttcggttggcttatcaccggtaatactatcagcgattggacttagcttggtgtgttacgtagcaggatggtgtgtgtacacattctactttcatcctctttcaaaatatccgggtccaaagtttgccgccatatcacaagtttggctggcctacgtttggctgagcggtcgatacccaacagttatccacaatgctcatctcaaatacggtaacgttgtacgcgtggcgcccaatgagttgagcttcaatactgttcaagcgcaccgggatatctattcgacgccctcgcgttcgaagaaaccgtttatcaaggatgctaaattttataacaatggagatgtgagggtgctcttctatgagattgatgcagttgagcatgcttggcaacggaaacttcttgcaacaggcttcagcaatgcagccatgcgcagccaagagcacctcatccatcgttacgtagacctctttgtgcagaagatgggtcaaatgagtaccatggctactggtgttggcgttaatgtcacagaaactatcatgtggttgggattcgacataatgggggagatgacattcagcgaatctttcggatcccttgagtctggcaagcctcatttctgggtttcactaatgagagactcggcgcatgccgcaatactaccatctctttccgcaagaatgcctctcctccgtatgatattgccttatttgattaccaaatcagcaatcaagaacctcgaaaaacactacgggtacacactcaaaacagtacgcaaacgaatacaacgccagaacgaggaagcgtatggcgagaactcagatctttttggcccaatgatcgcgagtggtaaattggatgaagcacaactcgtatctatggcacaggctctcgtaatagccggcgcagacacagtttcacatgccctcactggtgcgctgtattttctctgcgccaatacgacctgtctcgtgcagcttcaacacgagatccgcagtattagtagctacgaggagctaacaggcttgcggctcgcaactctcccttacctgaatgctgtgctcgaggagactttgcgtgcattcccacccatcgcgttcggacttccgcgtgtatcgcccggcgatatcgttgatggacatttcatagcagagggcacaactatttctgcacctcattgggcaattatgcataacgaagcggagtgggatgatccatatgcattcagacccgagcgttggctccgatcaaacggcgagtctttaccgaagggactagcattcagttctggcccaagagcatgccttggtatttcgcaggcctggctagagattcgcattgctttggccaagcttgtgtatacatatgatatgcggcttgcacatgatcatggtgattggctccaagatgcacgcatgtatatgatgtggaaggaggcgcctctgatggttgaatttatggagagaagtttttga

SEQ ID NO: 413 - protein, 491 aa, Muscodor strobelii
  misc_feature: SGI Peptide ID NO. 559704
  misc_feature (39)..(486): Pfam Id: PF00067 Pfam Desc: Cytochrome P450
  misc_feature (300)..(486): Pfam Id: PF00067 Pfam Desc: Cytochrome P450
  misc_feature (28)..(486): NCBI GI: 67522561 Blast Desc: AN1737.2 [Aspergillus nidulans FGSC A4] gi|40744867|gb|EAA64023.1| AN1737.2 [Aspergillus nidulans FGSC A4] gi|259487082|tpe|CBF85469.1| TPA: cytochrome P450, (Eurofung)
  misc_feature (15)..(460): NCBI GI: 46138361 Blast Desc: FG10695.1 [Gibberella zeae PH-1]
  misc_feature (9)..(490): NCBI GI: 259485758 Blast Desc: TPA: cytochrome P450, (Eurofung) [Aspergillus nidulans FGSC A4]
  misc_feature (9)..(490): NCBI GI: 121712467 Blast Desc: benzoate 4-monooxygenase cytochrome P450 [Aspergillus clavatus NRRL 1] gi|119401997|gb|EAW12419.1| benzoate 4-monooxygenase cytochrome P450 [Aspergillus clavatus NRRL 1]
  misc_feature (16)..(488): NCBI GI: 259485752 Blast Desc: TPA: cytochrome P450, (Eurofung) [Aspergillus nidulans FGSC A4]
  misc_feature (8)..(486): NCBI GI: 154289577 Blast Desc: BC1G_16084 [Botryotinia fuckeliana B05.10] gi|150849019|gb|EDN24212.1| BC1G_16084 [Botryotinia fuckeliana B05.10] gi|169635728|emb|CAP58782.1| cytochrome P40 monooxygenase
  misc_feature (21)..(490): NCBI GI: 255936151 Blast Desc: Pc13g06690 [Penicillium chrysogenum Wisconsin 54-1255] gi|211583722|emb|CAP91738.1| Pc13g06690 [Penicillium chrysogenum Wisconsin 54-1255]
  misc_feature (16)..(488): NCBI GI: 121712479 Blast Desc: benzoate 4-monooxygenase cytochrome P450 [Aspergillus clavatus NRRL 1] gi|119402003|gb|EAW12425.1| benzoate 4-monooxygenase cytochrome P450 [Aspergillus clavatus NRRL 1]
  misc_feature (14)..(485): NCBI GI: 255931851 Blast Desc: Pc12g06400 [Penicillium chrysogenum Wisconsin 54-1255] gi|211582101|emb|CAP80267.1| Pc12g06400 [Penicillium chrysogenum Wisconsin 54-1255]
  misc_feature (18)..(460): NCBI GI: 256725278 Blast Desc: NECHADRAFT_45567 [Nectria haematococca mpVI 77-13-4]
  misc_feature (35)..(463): SWISSPROT Homolog: EC 1.14.13.12 Benzoate 4-monooxygenase
  misc_feature: Useful for introducing or modulating the production of volatile compounds
MPSVGLSPVILSAIGLSLVCYVAGWCVYTFYFHPLSKYPGPKFAAISQVWLAYVWLSGRYPTVIHNAHLKYGNVVRVAPNELSFNTVQAHRDIYSTPSRSKKPFIKDAKFYNNGDVRVLFYEIDAVEHAWQRKLLATGFSNAAMRSQEHLIHRYVDLFVQKMGQMSTMATGVGVNVTETIMWLGFDIMGEMTFSESFGSLESGKPHFWVSLMRDSAHAAILPSLSARMPLLRMILPYLITKSAIKNLEKHYGYTLKTVRKRIQRQNEEAYGENSDLFGPMIASGKLDEAQLVSMAQALVIAGADTVSHALTGALYFLCANTTCLVQLQHEIRSISSYEELTGLRLATLPYLNAVLEETLRAFPPIAFGLPRVSPGDIVDGHFIAEGTTISAPHWAIMHNEAEWDDPYAFRPERWLRSNGESLPKGLAFSSGPRACLGISQAWLEIRIALAKLVYTYDMRLAHDHGDWLQDARMYMMWKEAPLMVEFMERSF

SEQ ID NO: 414 - DNA, 2728 bp, Muscodor strobelii
  misc_feature: SGI EST ID NO. CUFF.979.0
  misc_feature: Variant of the nucleotide sequence at SEQ ID NO 412
cataaatgctacttagtcggcataccactgacagatgtaatattcatcgactgctgtggcctgaaggacactgttaagtctcttgttcttcgaacccgtctttctaggagactgttgcttgctttccacagtgccgcaacatctcttcgagaatctttttattttgcgttaaaaaactctattccgaacatgccttcggttggcttatcaccggtaatactatcagcgattggacttagcttggtgtgttacgtagcaggatggtgtgtgtacacattctactttcatcctctttcaaaatatccgggtccaaagtttgccgccatatcacaagtttggctggcctacgtttggctgagcggtcgatacccaacagttatccacaatgctcatctcaaatacggtaacgttgtacgcgtggcgcccaatgagttgagcttcaatactgttcaagcgcaccgggatatctattcgacgccctcgcgttcgaagaaaccgtttatcaaggatgctaaattttataacaatggagatgtgagggtgctcttctatgagattgatgcagttgagcatgcttggcaacggaaacttcttgcaacaggcttcagcaatgcagccatgcgcagccaagagcacctcatccatcgttacgtagacctctttgtgcagaagatgggtcaaatgagtaccatggctactggtgttggcgttaatgtcacagaaactatcatgtggttgggattcgacataatgggggagatgacattcagcgaatctttcggatcccttgagtctggcaagcctcatttctgggtttcactaatgagagactcggcgcatgccgcaatactaccatctctttccgcaagaatgcctctcctccgtatgatattgccttatttgattaccaaatcagcaatcaagaacctcgaaaaacactacgggtacacactcaaaacagtacgcaaacgaatacaacgccagaacgaggaagcgtatggcgagaactcagatctttttggcccaatgatcgcgagtggtaaattggatgaagcacaactcgtatctatggcacaggctctcgtaatagccggcgcagacacagtttcacatgccctcactggtgcgctgtattttctctgcgccaatacgacctgtctcgtgcagcttcaacacgagatccgcagtattagtagctacgaggagctaacaggcttgcggctcgcaactctcccttacctgaatgctgtgctcgaggagactttgcgtgcattcccacccatcgcgttcggacttccgcgtgtatcgcccggcgatatcgttgatggacatttcatagcagagggcacaactatttctgcacctcattgggcaattatgcataacgaagcggagtgggatgatccatatgcattcagacccgagcgttggctccgatcaaacggcgagtctttaccgaagggactagcattcagttctggcccaagagcatgccttggtatttcgcaggcctggctagagattcgcattgctttggccaagcttgtgtatacatatgatatgcggcttgcacatgatcatggtgattggctccaagatgcacgcatgtatatgatgtggaaggaggcgcctctgatggttgaatttatggagagaagtttttgatatcgaaatctctttgcctaacagttagacgactcgaagtaaatttagggattctggagatgtcgaatacgttgaaggttcgatgagaataatacagccaggcgggagtcagaataaatggcactatcgaataccacaatgtacgtaattccgaatagagcggtgaataatgttctaacaacaatctaacaacttgaacttaacggaattaaaactaaaggtttcataacatatatttatagggtttagtttatatagataatgttttaggactatattgctggtacagttagacgttggtacatgtaagtgtcgcatttattttgacattggcctaacagcgggtttgccttcacatggcgttcttatatatctacctaataaatcagaatatgatcattcgttcaccgctgattatcccgtagcttggccctagtatatatgtcaacgattataactcgatcttcctaagctctcacgagcttcgaaccttgcgatgttagctatacaagtgacgagatataatatgcgtaagatagaggcgatttgtggagtggcggcactaaatctcgtgctatcttgctactgtcgtatatattaatctgctttcgatcaaccaacgtggacaaagtaacgaggaaaggggatgctagcgatcgtgatggaaccaatttgtccgtcgtgaggctttcttgattatttgaacgattgacgtcagtagtattcggccttggacaggtatgtagtcataagaacctcattaagtgaagtgtattgacagggaacagcatgccgtttgagccgttaaagcggcacattggtgcttggaaagtttatggggaagttgttgacctctaaaataagggaacctctgcgacaatgacggctgcactgaggcaagcacgttacgatgcatgcgggtacgggcaaactttcgtgcagtacaggtcatggatcgcgcttttggctgaaactgtagcttcgtcgttcttcacattccataggccaattgcccaagttttaagcagcgccacatacaaactggcctttccctgcgatttcg

SEQ ID NO: 415 - DNA, 2670 bp, Muscodor strobelii
  misc_feature: SGI cDNA ID NO. 559705
  misc_feature: Encodes the peptide sequence at SEQ ID NO 416
atgggcggcaaacaggatactgccgcgccggcgaactctatatctcgatccatgtctcggtatcgtcgcagtgcaaatagcctttccgcagataacaagacagttgaccccgatcccacgctacccccaataccagctctgccggactccttcaaaataacgaggattcgcagggaagaggaggagcccgtttccgcttccacggtcgagtcttccctgcgacgccaattgcgcgacgctgagcacaataaacaattccctctccatccggccgacgatcgcgaaggtcacgcgaccacaagaaatctaccgaatcacgaccaaaagcctactgtcaatcgtaatgtacctcgcagaatgtccgacaagcatggagaggcagagatgatgactcccgaccaagaaagattgcaggctgaggccgaagtagagcgtaggcttgcagagcagaagaagaaggatcttcaaagactagaggaggagttagagaacagccaacgtggggcagcacaacagaaaaaaactaaacactccgtatcagagaaattctcggtccttaagaagcgtcgcgatagtaatgaggagctttcgccaacatcaccaaaggcagttgggaaatcggctgggagaggatcagggcctgacctagttgaaagcaagccagcccacattgagaaccgcggaatgggacttgcgtcgcagttcgatgctccaaagactgcaattaatgctggagatcgcagcgttacggttcgctgcaaacaccacacatttagcgtacctgtaacccccgaaaccaccgtcgctgacatcctgactcaaacctcgaatcaaatgacatatgactttcaattcacctttaaaaacagcgtcgtgtgtgaacactatggtgtgcttagcctagagcggcgcatacgccactatgagaccattcgggacgttatgaactcctgggatagagatgctcaaaacaggctggtagtcgagtttatcgatgcagacgagaatcatgatgaccttcgcatggaatctgtcgcgcagaccagcgatggtccgattggttttcaactgaatatgtatcactcaaatcgaccggggaaatggaacaagaaatggatatcactcctcggaaatggccaaatcactgcagcaaagagacctgatgcgccaactactgacaaggacaccgcaagtctctgtcggctctccgactacgatatttatacaccaacagaagcgcagatgagaagacatctcaaaccacccaagcgttactgttttgcgattaaatctcaacaaaagacaaccatcttcttgaatacagataattatgtgcaatacttctgtacagaggatccgcatgctgcacaggaattccgaaagaaagtccatgcttggagaagttggtatctagtagaccgcagaccagaagttcaaaataagaagaaagaagctcaaaagataaagccaacagagaatgccccggttgccgccgaattcgcatccaaaaagtcaattcacatgccacccttccaaggccaccatactaaggtgtcgatgtcggctgataaacgttactccatcggaaaatttgagcccttcatggatccagaacgattcgagagaccactgtcccaacatactgtcgcaccgcctaagagtgagtccacgactcccaggcgattgtcgaagaaagtcaaccttccgcatcagagacatatgagtagttccaatagaccaagtgaggaagggttcactggtggtctcctcgcgtcgcaatatgaagatcgaaaacaagcacttgcagatgctgaaaggaagcaatcgggcgatctcacgttaaatattgactacagaaattcacaggagaagacagagtcagcgtcttggtttccatctgcacttgaacactccgcaaacaagcagaccaatagtcccgaggaaacacagccgaatactcctatggtagcaggcgagcggagaccttcggctcctcatgtaacaacatgccgagcaccagcgcatcacagttcccgccgcgggacctctggtcgagaccacaagaatcacgaggcacataaatcagatactgaacctgaacttatgaaatctcagcatcctcgacgagaacagccaaagcctctcgtcgatctcacgccccctgcgcctacagtccaaggagcaatccagtggcaaaagcgtggacacggtgtcaaggcaccagacggaaccactcgtctcgttgatctgattgctgagggtaatggaatggaggatagtaacaataccggcaccacaaacagttttgacctccaagcccgcggtgctcgacgaactccggcatcaagctcccaatcaactccatcacaagggcggagccgaagttcctcttttgcgagggggcggccattgctagaagatatcccacccgtgcctggcctgccggtgttacaagcacagggtgaaagaggcacttctggtacaaaaccagacacatctcgtcatagacatgagagtgggcgtcgcgagagagaaagggagccggagaagcggccccgggaccgcgaacgcgaggagagggagcggaagcagcgagaacgggaataccgtgaacgggaagcggcttataacgctgtacctggccgaacgggattcttgaaagtcgtctga

SEQ ID NO: 416 - protein, 889 aa, Muscodor strobelii
  misc_feature: SGI Peptide ID NO. 559705
  misc_feature (126)..(848): NCBI GI: 256731401 Blast Desc: NECHADRAFT_49278 [Nectria haematococca mpVI 77-13-4]
  misc_feature (139)..(743): NCBI GI: 156050127 Blast Desc: SS1G_07650 [Sclerotinia sclerotiorum 1980] gi|154692051|gb|EDN91789.1| SS1G_07650 [Sclerotinia sclerotiorum 1980]
  misc_feature (139)..(605): NCBI GI: 154317928 Blast Desc: BC1G_02947 [Botryotinia fuckeliana B05.10] gi|150843605|gb|EDN18798.1| BC1G_02947 [Botryotinia fuckeliana B05.10]
  misc_feature (126)..(797): NCBI GI: 46124815 Blast Desc: FG06785.1 [Gibberella zeae PH-1]
  misc_feature (198)..(750): NCBI GI: 85103553 Blast Desc: NCU01176 [Neurospora crassa OR74A] gi|18376240|emb|CAD21354.1| [Neurospora crassa] gi|28923089|gb|EAA32306.1| [Neurospora crassa OR74A]
  misc_feature (234)..(606): NCBI GI: 261351712 Blast Desc: conserved [Verticillium albo-atrum VaMs.102]
  misc_feature (238)..(750): NCBI GI: 116199153 Blast Desc: CHGG_07732 [Chaetomium globosum CBS 148.51] gi|88179011|gb|EAQ86479.1| CHGG_07732 [Chaetomium globosum CBS 148.51]
  misc_feature (10)..(545): NCBI GI: 212534972 Blast Desc: conserved [Penicillium marneffei ATCC 18224] gi|210070041|gb|EEA24131.1| conserved [Penicillium marneffei ATCC 18224]
  misc_feature (126)..(665): NCBI GI: 189210012 Blast Desc: conserved [Pyrenophora tritici-repentis Pt-1C-BFP] gi|187977431|gb|EDU44057.1| conserved [Pyrenophora tritici-repentis Pt-1C-BFP]
  misc_feature (134)..(544): NCBI GI: 145601737 Blast Desc: MGG_08630 [Magnaporthe grisea 70-15] gi|145010253|gb|EDJ94909.1| MGG_08630 [Magnaporthe grisea 70-15]
MGGKQDTAAPANSISRSMSRYRRSANSLSADNKTVDPDPTLPPIPALPDSFKITRIRREEEEPVSASTVESSLRRQLRDAEHNKQFPLHPADDREGHATTRNLPNHDQKPTVNRNVPRRMSDKHGEAEMMTPDQERLQAEAEVERRLAEQKKKDLQRLEEELENSQRGAAQQKKTKHSVSEKFSVLKKRRDSNEELSPTSPKAVGKSAGRGSGPDLVESKPAHIENRGMGLASQFDAPKTAINAGDRSVTVRCKHHTFSVPVTPETTVADILTQTSNQMTYDFQFTFKNSVVCEHYGVLSLERRIRHYETIRDVMNSWDRDAQNRLVVEFIDADENHDDLRMESVAQTSDGPIGFQLNMYHSNRPGKWNKKWISLLGNGQITAAKRPDAPTTDKDTASLCRLSDYDIYTPTEAQMRRHLKPPKRYCFAIKSQQKTTIFLNTDNYVQYFCTEDPHAAQEFRKKVHAWRSWYLVDRRPEVQNKKKEAQKIKPTENAPVAAEFASKKSIHMPPFQGHHTKVSMSADKRYSIGKFEPFMDPERFERPLSQHTVAPPKSESTTPRRLSKKVNLPHQRHMSSSNRPSEEGFTGGLLASQYEDRKQALADAERKQSGDLTLNIDYRNSQEKTESASWFPSALEHSANKQTNSPEETQPNTPMVAGERRPSAPHVTTCRAPAHHSSRRGTSGRDHKNHEAHKSDTEPELMKSQHPRREQPKPLVDLTPPAPTVQGAIQWQKRGHGVKAPDGTTRLVDLIAEGNGMEDSNNTGTTNSFDLQARGARRTPASSSQSTPSQGRSRSSSFARGRPLLEDIPPVPGLPVLQAQGERGTSGTKPDTSRHRHESGRREREREPEKRPRDREREERERKQREREYREREAAYNAVPGRTGFLKVV

SEQ ID NO: 417 - DNA, 5372 bp, Muscodor strobelii
  misc_feature: SGI EST ID NO. CUFF.1420.0
  misc_feature: Variant of the nucleotide sequence at SEQ ID NO 415
attcgcctttctgtcctcgtgcggaggacaggctgaaaagggagacgacctattggcgatcgtgaaagcaatgaattgatcaggattaaatgatagtatctgtgtctaagacatgcccccaccaaatttccctgtgaagcatctcgtgtccttgattgctttcagccctaaacaacgagcattctttctcatcatcaatttcaacgttactcgcattcgctgtcttgtagatgcctcaaacacacgcaattccgagcccgagaatcgtagataatgtccagtcctgaagagaaacaagtagcagaccatcagccagtcacgaggccgtcgcgatatcgaagtacacggaatcacaatgtctctacgccacctacctccgtagctagatcggcgactagtcccagccatgccatgggcggcaaacaggatactgccgcgccggcgaactctatatctcgatccatgtctcggtatcgtcgcagtgcaaatagcctttccgcagataacaagacagttgaccccgatcccacgctacccccaataccagctctgccggactccttcaaaataacgaggattcgcagggaagaggaggagcccgtttccgcttccacggtcgagtcttccctgcgacgccaattgcgcgacgctgagcacaataaacaattccctctccatccggccgacgatcgcgaaggtcacgcgaccacaagaaatctaccgaatcacgaccaaaagcctactgtcaatcgtaatgtacctcgcagaatgtccgacaagcatggagaggcagagatgatgactcccgaccaagaaagattgcaggctgaggccgaagtagagcgtaggcttgcagagcagaagaagaaggatcttcaaagactagaggaggagttagagaacagccaacgtggggcagcacaacagaaaaaaactaaacactccgtatcagagaaattctcggtccttaagaagcgtcgcgatagtaatgaggagctttcgccaacatcaccaaaggcagttgggaaatcggctgggagaggatcagggcctgacctagttgaaagcaagccagcccacattgagaaccgcggaatgggacttgcgtcgcagttcgatgctccaaagactgcaattaatgctggagatcgcagcgttacggttcgctgcaaacaccacacatttagcgtacctgtaacccccgaaaccaccgtcgctgacatcctgactcaaacctcgaatcaaatgacatatgactttcaattcacctttaaaaacagcgtcgtgtgtgaacactatggtgtgcttagcctagagcggcgcatacgccactatgagaccattcgggacgttatgaactcctgggatagagatgctcaaaacaggctggtagtcgagtttatcgatgcagacgagaatcatgatgaccttcgcatggaatctgtcgcgcagaccagcgatggtccgattggttttcaactgaatatgtatcactcaaatcgaccggggaaatggaacaagaaatggatatcactcctcggaaatggccaaatcactgcagcaaagagacctgatgcgccaactactgacaaggacaccgcaagtctctgtcggctctccgactacgatatttatacaccaacagaagcgcagatgagaagacatctcaaaccacccaagcgttactgttttgcgattaaatctcaacaaaagacaaccatcttcttgaatacagataattatgtgcaatacttctgtacagaggatccgcatgctgcacaggaattccgaaagaaagtccatgcttggagaagttggtatctagtagaccgcagaccagaagttcaaaataagaagaaagaagctcaaaagataaagccaacagagaatgccccggttgccgccgaattcgcatccaaaaagtcaattcacatgccacccttccaaggccaccatactaaggtgtcgatgtcggctgataaacgttactccatcggaaaatttgagcccttcatggatccagaacgattcgagagaccactgtcccaacatactgtcgcaccgcctaagagtgagtccacgactcccaggcgattgtcgaagaaagtcaaccttccgcatcagagacatatgagtagttccaatagaccaagtgaggaagggttcactggtggtctcctcgcgtcgcaatatgaagatcgaaaacaagcacttgcagatgctgaaaggaagcaatcgggcgatctcacgttaaatattgactacagaaattcacaggagaagacagagtcagcgtcttggtttccatctgcacttgaacactccgcaaacaagcagaccaatagtcccgaggaaacacagccgaatactcctatggtagcaggcgagcggagaccttcggctcctcatgtaacaacatgccgagcaccagcgcatcacagttcccgccgcgggacctctggtcgagaccacaagaatcacgaggcacataaatcagatactgaacctgaacttatgaaatctcagcatcctcgacgagaacagccaaagcctctcgtcgatctcacgccccctgcgcctacagtccaaggagcaatccagtggcaaaagcgtggacacggtgtcaaggcaccagacggaaccactcgtctcgttgatctgattgctgagggtaatggaatggaggatagtaacaataccggcaccacaaacagttttgacctccaagcccgcggtgctcgacgaactccggcatcaagctcccaatcaactccatcacaagggcggagccgaagttcctcttttgcgagggggcggccattgctagaagatatcccacccgtgcctggcctgccggtgttacaagcacagggtgaaagaggcacttctggtacaaaaccagacacatctcgtcatagacatgagagtgggcgtcgcgagagagaaagggagccggagaagcggccccgggaccgcgaacgcgaggagagggagcggaagcagcgagaacgggaataccgtgaacgggaagcggcttataacgctgtacctggccgaacgggattcttgaaagtcgtctgatacgattacggttaaagaatggtcgatgagcttttcttttgtctttgagagccttgcggcgtaaactttttgttgagcgatccaacgacttttcttacattggagttatgccgcattcaattgaacggcattgatgtctttcagtatgaatcatgataagtaaaatgtcggaaaataggagctataagataaatggccctgcggaagaagcgagtttgcgctaaaaaatttggagttcaattcatggtcactttaaggcgcgcctgatttaggatgcgcctttgagcaatccaagctgtcgagaggattgtataccgtggttacaccgtggctatcatgtatctacatgtaagtaaagagctttatcgggagtgtattgttcttgatgtcacctagaagtggacatggcggttccacaaacgttttgaaaacctcatctaggtattagtgatctcattctgccaaagcctgtctaccttgtgtacatctatgtatatttttctgaccgtgcattgtatgaacccgcaatatgttcgcccgttgtcccgtctcagttccgaatttcccattcaaggattcgctttctccctctccgttcctttccatttacttgcttcgtttgtaaatcttagacaagaatgcctcaaaaatctccttcttcaagccttcactctcatcgatctcggcaatcttggcccgaatctcaccaacgctcttctcttcgtagtcatgatacagctgctcgagcttcatgtcgttgtacagcttcttgatgtgagcctcatgtgcggcgtccttgcgaccataatgctcctcaaggatttgacgctgctcgggcgtagcgatcttcagggcctggttgacgagccacgagcacttgttgtccatgatatccgtgccgattttgccgatgtgttcaggcagaccgaagttgtcaaggtagtcatcctggacctggaagtactcacccatgggaatcagaatgtcctcagcgagtttcaggttctttggtgtcgcaatgttcaacatgtgtaatgccagagcgacgggcaggtaaaagctgtaataggctgtcttgtaaataacgatgaagctatatttctccaagctgaagttgtcgaggttcacaacatcttcgggggctgtgatgagatcgcacagttgaccgagctcagtttggaaagtaacttcgtggaatagctcaatcatgtcaacatatgcggggtggctcttgaagtgctttttcaagagtgtgtagatggcggcctccaaaaggaaagcgtcgttaatggcaatcatgccgacgccttcctggcggtaccagcagggctttccacggcgagtgatactgctgtccataatgtcgtcagatacaaggaagaaagcctgcaacaactcaatcatccaaccaagagttgcggcttggaagtactcctgctccgtcaacggccgtccgaccagcagcgacacagagtcgggcaccgacatgccacggttgcattttccacccacagcattgacctcgagagactgggaggtatgtcagttgggatatttcattttcctaacgtgaagtatgagactagcgaatgacccgagacgatgaatgatgttatgtccagcgccgcaatcatcgcttaccgccgggcgaatatgtattctctcgtatatatctacacaaagcttgatttgggcttgcattttcttacctttttgtaccagtccagctgctgctggggaagattgtactgcttggcccaagccaagaggtcctcctcaagcttggggaagacagactcgaattctttcagtgttgtcttggtcgccattttcgagatcgggcagcagatacgctgtctagttgaacaaagaaatggaaaaatctgtaaacaagaagacaagtcgaatcaatgattcttcgtcgcttattgaagatgacgaaggaaaaggagtcgacgcgagaaatgttgaagagtaagcgggccttgggaaatggcagcgttgggaaagcgttggtgttgaggggcagcaacggtttaggggtccacaaggttggatccgattccaaatgaggtagagcccggtatttcctctaactactagcacccttgtactgtattctgcaaatatctctgccgaatgcaaggtacgaatacgcttacgctatgaaggactgggaaatgaaacgtggattggggacaatgatcgtaatcaacactggggtatttgtaagtctacgaggaaatagtagcatcccgcaagtcaagttagaagatggggatattcaggat

SEQ ID NO: 418 - DNA, 1044 bp, Muscodor strobelii
  misc_feature: SGI cDNA ID NO. 559706
  misc_feature: Encodes the peptide sequence at SEQ ID NO 419
atggcgaccaagacaacactgaaagaattcgagtctgtcttccccaagcttgaggaggacctcttggcttgggccaagcagtacaatcttccccagcagcagctggactggtacaaaaagtctctcgaggtcaatgctgtgggtggaaaatgcaaccgtggcatgtcggtgcccgactctgtgtcgctgctggtcggacggccgttgacggagcaggagtacttccaagccgcaactcttggttggatgattgagttgttgcaggctttcttccttgtatctgacgacattatggacagcagtatcactcgccgtggaaagccctgctggtaccgccaggaaggcgtcggcatgattgccattaacgacgctttccttttggaggccgccatctacacactcttgaaaaagcacttcaagagccaccccgcatatgttgacatgattgagctattccacgaagttactttccaaactgagctcggtcaactgtgcgatctcatcacagcccccgaagatgttgtgaacctcgacaacttcagcttggagaaatatagcttcatcgttatttacaagacagcctattacagcttttacctgcccgtcgctctggcattacacatgttgaacattgcgacaccaaagaacctgaaactcgctgaggacattctgattcccatgggtgagtacttccaggtccaggatgactaccttgacaacttcggtctgcctgaacacatcggcaaaatcggcacggatatcatggacaacaagtgctcgtggctcgtcaaccaggccctgaagatcgctacgcccgagcagcgtcaaatccttgaggagcattatggtcgcaaggacgccgcacatgaggctcacatcaagaagctgtacaacgacatgaagctcgagcagctgtatcatgactacgaagagaagagcgttggtgagattcgggccaagattgccgagatcgatgagagtgaaggcttgaagaaggagatttttgaggcattcttgtctaagatttacaaacgaagcaagtaa

SEQ ID NO: 419 - protein, 347 aa, Muscodor strobelii
  misc_feature: SGI Peptide ID NO. 559706
  misc_feature (37)..(308): Pfam Id: PF00348 Pfam Desc: Polyprenyl synthetase
  misc_feature (2)..(347): NCBI GI: 39948036 Blast Desc: farnesyl pyrophosphate synthetase [Magnaporthe grisea 70-15] gi|145010274|gb|EDJ94930.1| farnesyl pyrophosphate synthetase [Magnaporthe grisea 70-15]
  misc_feature (1)..(347): NCBI GI: 46124813 Blast Desc: FPPS_GIBFU Farnesyl pyrophosphate synthetase (FPP synthetase) (FPS) (Farnesyl diphosphate synthetase) [Gibberella zeae PH-1]
  misc_feature (1)..(347): NCBI GI: 3122099 Blast Desc: FPPS_GIBFU RecName: Full=Farnesyl pyrophosphate synthetase; Short=FPP synthetase; Short=FPS; AltName: Full=Farnesyl diphosphate synthetase; Includes: RecName: RecName:
  misc_feature (1)..(347): NCBI GI: 85103549 Blast Desc: farnesyl pyrophosphate synthetase [Neurospora crassa OR74A] gi|67476924|sp|Q92250.2|FPPS_NEUCR RecName: Full=Farnesyl pyrophosphate synthetase; Short=FPP synthetase; Short=FPS; crassa
  misc_feature (4)..(347): NCBI GI: 171693897 Blast Desc: protein product [Podospora anserina] gi|170946897|emb|CAP73701.1| protein product [Podospora anserina]
  misc_feature (1)..(347): NCBI GI: 1524295 Blast Desc: farnesyl pyrophosphate synthetase [Neurospora crassa]
  misc_feature (1)..(347): NCBI GI: 154317914 Blast Desc: BC1G_02940 [Botryotinia fuckeliana B05.10] gi|77540231|gb|ABA86970.1| farnesyl diphosphate synthase [Botryotinia fuckeliana] gi|150843598|gb|EDN18791.1| BC1G_02940
  misc_feature (1)..(347): NCBI GI: 156050145 Blast Desc: farnesyl pyrophosphate synthetase [Sclerotinia sclerotiorum 1980] gi|154692060|gb|EDN91798.1| farnesyl pyrophosphate synthetase [Sclerotinia sclerotiorum 1980]
  misc_feature (1)..(347): NCBI GI: 261351711 Blast Desc: farnesyl pyrophosphate synthetase [Verticillium albo-atrum VaMs.102]
  misc_feature (1)..(347): NCBI GI: 255955563 Blast Desc: Pc21g15240 [Penicillium chrysogenum Wisconsin 54-1255] gi|211590245|emb|CAP96421.1| Pc21g15240 [Penicillium chrysogenum Wisconsin 54-1255]
  misc_feature (1)..(347): SWISSPROT Homolog: EC 2.5.1.10 Geranyltranstransferase
  misc_feature (1)..(347): SWISSPROT Homolog: EC 2.5.1.1 Dimethylallyltranstransferase
  misc_feature: Useful for fungicidal and/or biocontrol applications
MATKTTLKEFESVFPKLEEDLLAWAKQYNLPQQQLDWYKKSLEVNAVGGKCNRGMSVPDSVSLLVGRPLTEQEYFQAATLGWMIELLQAFFLVSDDIMDSSITRRGKPCWYRQEGVGMIAINDAFLLEAAIYTLLKKHFKSHPAYVDMIELFHEVTFQTELGQLCDLITAPEDVVNLDNFSLEKYSFIVIYKTAYYSFYLPVALALHMLNIATPKNLKLAEDILIPMGEYFQVQDDYLDNFGLPEHIGKIGTDIMDNKCSWLVNQALKIATPEQRQILEEHYGRKDAAHEAHIKKLYNDMKLEQLYHDYEEKSVGEIRAKIAEIDESEGLKKEIFEAFLSKIYKRSK

SEQ ID NO: 420 - DNA, 5242 bp, Muscodor strobelii
  misc_feature: SGI EST ID NO. CUFF.1421.1
  misc_feature: Variant of the nucleotide sequence at SEQ ID NO 418
atcctgaatatccccatcttctaacttgacttgcgggatgctactatttcctcgtagacttacaaataccccagtgttgattacgatcattgtccccaatccacgtttcatttcccagtccttcatagcgtaagcgtattcgtaccttgcattcggcagagatatttgcagaatacagtacaagggtgctagtagttagaggaaataccgggctctacctcatttggaatcggatccaaccttgtggacccctaaaccgttgctgcccctcaacaccaacgctttcccaacgctgccatttcccaaggcccgcttactcttcaacatttctcgcgtcgactccttttccttcgtcatcttcaataagcgacgaagaatcattgattcgacttgtcttcttgtttacagatttttccatttctttgttcaactagacagcgtatctgctgcccgatctcgaaaatggcgaccaagacaacactgaaagaattcgagtctgtcttccccaagcttgaggaggacctcttggcttgggccaagcagtacaatcttccccagcagcagctggactggtacaaaaagtctctcgaggtcaatgctgtgggtggaaaatgcaaccgtggcatgtcggtgcccgactctgtgtcgctgctggtcggacggccgttgacggagcaggagtacttccaagccgcaactcttggttggatgattgagttgttgcaggctttcttccttgtatctgacgacattatggacagcagtatcactcgccgtggaaagccctgctggtaccgccaggaaggcgtcggcatgattgccattaacgacgctttccttttggaggccgccatctacacactcttgaaaaagcacttcaagagccaccccgcatatgttgacatgattgagctattccacgaagttactttccaaactgagctcggtcaactgtgcgatctcatcacagcccccgaagatgttgtgaacctcgacaacttcagcttggagaaatatagcttcatcgttatttacaagacagcctattacagcttttacctgcccgtcgctctggcattacacatgttgaacattgcgacaccaaagaacctgaaactcgctgaggacattctgattcccatgggtgagtacttccaggtccaggatgactaccttgacaacttcggtctgcctgaacacatcggcaaaatcggcacggatatcatggacaacaagtgctcgtggctcgtcaaccaggccctgaagatcgctacgcccgagcagcgtcaaatccttgaggagcattatggtcgcaaggacgccgcacatgaggctcacatcaagaagctgtacaacgacatgaagctcgagcagctgtatcatgactacgaagagaagagcgttggtgagattcgggccaagattgccgagatcgatgagagtgaaggcttgaagaaggagatttttgaggcattcttgtctaagatttacaaacgaagcaagtaaatggaaaggaacggagagggagaaagcgaatccttgaatgggaaattcggaactgagacgggacaacgggcgaacatattgcgggttcatacaatgcacggtcagaaaaatatacatagatgtacacaaggtagacaggctttggcagaatgagatcactaatacctagatgaggttttcaaaacgtttgtggaaccgccatgtccacttctaggtgacatcaagaacaatacactcccgataaagctctttacttacatgtagatacatgatagccacggtgtaaccacggtatacaatcctctcgacagcttggattgctcaaaggcgcatcctaaatcaggcgcgccttaaagtgaccatgaattgaactccaaattttttagcgcaaactcgcttcttccgcagggccatttatcttatagctcctattttccgacattttacttatcatgattcatactgaaagacatcaatgccgttcaattgaatgcggcataactccaatgtaagaaaagtcgttggatcgctcaacaaaaagtttacgccgcaaggctctcaaagacaaaagaaaagctcatcgaccattctttaaccgtaatcgtatcagacgactttcaagaatcccgttcggccaggtacagcgttataagccgcttcccgttcacggtattcccgttctcgctgcttccgctccctctcctcgcgttcgcggtcccggggccgcttctccggctccctttctctctcgcgacgcccactctcatgtctatgacgagatgtgtctggttttgtaccagaagtgcctctttcaccctgtgcttgtaacaccggcaggccaggcacgggtgggatatcttctagcaatggccgccccctcgcaaaagaggaacttcggctccgcccttgtgatggagttgattgggagcttgatgccggagttcgtcgagcaccgcgggcttggaggtcaaaactgtttgtggtgccggtattgttactatcctccattccattaccctcagcaatcagatcaacgagacgagtggttccgtctggtgccttgacaccgtgtccacgcttttgccactggattgctccttggactgtaggcgcagggggcgtgagatcgacgagaggctttggctgttctcgtcgaggatgctgagatttcataagttcaggttcagtatctgatttatgtgcctcgtgattcttgtggtctcgaccagaggtcccgcggcgggaactgtgatgcgctggtgctcggcatgttgttacatgaggagccgaaggtctccgctcgcctgctaccataggagtattcggctgtgtttcctcgggactattggtctgcttgtttgcggagtgttcaagtgcagatggaaaccaagacgctgactctgtcttctcctgtgaatttctgtagtcaatatttaacgtgagatcgcccgattgcttcctttcagcatctgcaagtgcttgttttcgatcttcatattgcgacgcgaggagaccaccagtgaacccttcctcacttggtctattggaactactcatatgtctctgatgcggaaggttgactttcttcgacaatcgcctgggagtcgtggactcactcttaggcggtgcgacagtatgttgggacagtggtctctcgaatcgttctggatccatgaagggctcaaattttccgatggagtaacgtttatcagccgacatcgacaccttagtatggtggccttggaagggtggcatgtgaattgactttttggatgcgaattcggcggcaaccggggcattctctgttggctttatcttttgagcttctttcttcttattttgaacttctggtctgcggtctactagataccaacttctccaagcatggactttctttcggaattcctgtgcagcatgcggatcctctgtacagaagtattgcacataattatctgtattcaagaagatggttgtcttttgttgagatttaatcgcaaaacagtaacgcttgggtggtttgagatgtcttctcatctgcgcttctgttggtgtataaatatcgtagtcggagagccgacagagacttgcggtgtccttgtcagtagttggcgcatcaggtctctttgctgcagtgatttggccatttccgaggagtgatatccatttcttgttccatttccccggtcgatttgagtgatacatattcagttgaaaaccaatcggaccatcgctggtctgcgcgacagattccatgcgaaggtcatcatgattctcgtctgcatcgataaactcgactaccagcctgttttgagcatctctatcccaggagttcataacgtcccgaatggtctcatagtggcgtatgcgccgctctaggctaagcacaccatagtgttcacacacgacgctgtttttaaaggtgaattgaaagtcatatgtcatttgattcgaggtttgagtcaggatgtcagcgacggtggtttcgggggttacaggtacgctaaatgtgtggtgtttgcagcgaaccgtaacgctctttatcatagtcagcaattaattcaaatcttctcctggtaatacttacgcgatctccagcattaattgcagtctttggagcatcgaactgcgacgcaagtcccattccgcggttctcaatgtgggctggcttgctttcaactaggtcaggccctgatcctctcccagccgatttcccaactgcctttggtgatgttggcgaaagctcctcattactatcgcgacgcttcttaaggaccgagaatttctctgatacggagtgtttagtttttttctgttgtgctgccccacgttggctgttctctaactcctcctctagtctttgaagatccttcttcttctgctctgcaagcctacgctctacttcggcctcagcctgcaatctttcttggtcgggagtcatcatctctgcctctccatgcttgtcggacattctgcgaggtacattacgattgacagtaggcttttggtcgtgattcggtagatttcttgtggtcgcgtgaccttcgcgatcgtcggccggatggagagggaattgtttattgtgctcagcgtcgcgcaattggcgtcgcagggaagactcgaccgtggaagcggaaacgggctcctcctcttccctgcgaatcctcgttattttgaaggagtccggcagagctggtattgggggtagcgtgggatcggggtcaactgtcttgttatctgcggaaaggctatttgcactgcgacgataccgagacatggatcgagatatagagttcgccggcgcggcagtatcctgtttgccgcccatggcatggctgggactagtcgccgatctagctacggaggtaggtggcgtagagacattgtgattccgtgtacttcgatatcgcgacggcctcgtgactggctgatggtctgctacttgtttctcttcaggactggacattatctacgattctcgggctcggaattgcgtgtgtttgaggcatctacaagacagcgaatgcgagtaacgttgaaattgatgatgagaaagaatgctcgttgtttagggctgaaagcaatcaaggacacgagatgcttcacagggaaatttggtgggggcatgtcttagacacagatactatcatttaatcctgatcaattcattgctttcacgatcgccaataggtcgtctcccttttcagcctgtcctccgcacgaggacagaaaggcgaat

SEQ ID NO: 421 - DNA, 2019 bp, Muscodor strobelii
  misc_feature: SGI cDNA ID NO. 559707
  misc_feature: Encodes the peptide sequence at SEQ ID NO 422
atgtctttgaacagccgggagaaatctcagcttcggggtgctctacaagaggctattgtgaaatgctcagagcgctgcctctatcaatcctcaaaatgggccgccgagcttctcaacgctataccagagacagaagaatcattcgatgattctcagttgtctgatgcatctagtggatacgccgcaactgtaatatcaccaaatccagatcccgaagaggctgctctagaagccagagaaatcagtaaatatcttttagccaagtccctctttgattgcagagaatttgatagatgtgccgccgtattcttgcctgagtcaactctcactggcatcatctcgccgagagacgccaatgccaccccaaaggggaagggcaaagccaaagctacaactggcaatgctcgcccaagcagtacatttggtctccctaatattagccaacgcagtttatttcttgcgctctacgccaagtttctgtctggcgagaagcgaaaggatgaagatgccgagatggtgatgggtcctcaagacttgggggtatgtgtcaacaaacagttgaatgctgttagtcgagtacttgaagcatggttcgagagccgcaagaccgacgatgatcagatcacgtatggtcaaggctggcttgagtatctttacggtatggtgctttcaagagaacagaatgtggaactggccaaagtgtggctggttcgaagcgttcacatattcccttggaattggggctgctggcaggagttgactgccctcatgtcacgattagacgatttgagtcaaatcatgcctctcttaccgcagaacgttgtctctttcatatttcatatacatacgtcacttgagctttaccagcacgacggcaatctagcccagtccctagagcagctcctcaacatcttcacgacctcatcatttctcctcacctgcaatgctctcctctcctatcatgcaaaagacctcgttgctgccgagcaaggcttcagccatctcttagcactacatccacaccgtcttgactctctcgatcactactccaatatcctatatgtcatgaacgcaagaccaaagctagcattcttggctcatctctgcagcagcgttgacaaattccgcccagaatcctgtgtggtcattggtaactattattctctgctttcgctacatgagaaagctgtacagtactttcgacgcgcattgactctagatcgttcatgcctttcggcttggacgcttatgggtcatgaatatgttgaactcaagaatacacatgctgctatcgaatcctaccgacgagcagttgacgtcaaccgaagagactatcgtgcctggtatggactgggacagacgtatgaagttctagagatgcacgcgtacgcactgtggtactacaagaaagcggcaggtttacggccctgggatgggaaaatgtggatggctgtgggctcctgcctccagcaaatgaagcgatatcacgacggtattaaagctctcaaacgcgcactcatggctgatagctactacgacaccggaagcagcttcggaagtggttccggtagcctacgaggcgcacatatggacccggagatcttgttacaaattgccggcatgtacgacagcttgggtgaggaagatgaagccagggagtatatggaaaagtgtgttgcgcaagagacaggccccggcggtgatagtcagggtgaaagtatcgctatacatcacgactcgccaggcggtggttcggatgatggtgacaatagcggaggacggggaggcaatgaaggcacgggggtcacagctgccactagcaaagcgcgaatgtggctcgcgcgcttcgctatgcggacggaagactacaacacagcaagccgtctagcgaatgaactttgtcaggacggcgtggaggttgaagaagcaaaggcattgatccgagaagttcgttcaagattagagtcggcagctggtgatatggcgtccttgcgagcttcggccgcgcctactaattag

SEQ ID NO: 422 - protein, 672 aa, Muscodor strobelii
  misc_feature: SGI Peptide ID NO. 559707
  misc_feature (411)..(444): Pfam Id: PF00515 Pfam Desc: Tetratricopeptide repeat
  misc_feature (377)..(410): Pfam Id: PF00515 Pfam Desc: Tetratricopeptide repeat
  misc_feature (1)..(188): Pfam Id: PF04049 Pfam Desc: Anaphase promoting complex subunit 8 / Cdc23
  misc_feature (1)..(45): Pfam Id: PF04049 Pfam Desc: Anaphase promoting complex subunit 8 / Cdc23
  misc_feature (72)..(100): Pfam Id: PF04049 Pfam Desc: Anaphase promoting complex subunit 8 / Cdc23
  misc_feature (147)..(173): Pfam Id: PF04049 Pfam Desc: Anaphase promoting complex subunit 8 / Cdc23
  misc_feature (445)..(478): Pfam Id: PF00515 Pfam Desc: Tetratricopeptide repeat
  misc_feature (1)..(656): NCBI GI: 46124807 Blast Desc: FG06781.1 [Gibberella zeae PH-1]
  misc_feature (36)..(657): NCBI GI: 164426136 Blast Desc: NCU01174 [Neurospora crassa OR74A] gi|157071211|gb|EAA32304.2| conserved [Neurospora crassa OR74A]
  misc_feature (1)..(658): NCBI GI: 171693899 Blast Desc: protein product [Podospora anserina] gi|170946898|emb|CAP73702.1| protein product [Podospora anserina]
  misc_feature (34)..(649): NCBI GI: 18376242 Blast Desc: related to cell division control protein CDC23 [Neurospora crassa]
  misc_feature (1)..(657): NCBI GI: 116199157 Blast Desc: CHGG_07734 [Chaetomium globosum CBS 148.51] gi|88179013|gb|EAQ86481.1| CHGG_07734 [Chaetomium globosum CBS 148.51]
  misc_feature (9)..(662): NCBI GI: 145601763 Blast Desc: MGG_08648 [Magnaporthe grisea 70-15] gi|145010273|gb|EDJ94929.1| MGG_08648 [Magnaporthe grisea 70-15]
  misc_feature (2)..(659): NCBI GI: 189210162 Blast Desc: anaphase-promoting complex subunit CDC23 [Pyrenophora tritici-repentis Pt-1C-BFP] gi|187977506|gb|EDU44132.1| anaphase-promoting complex subunit CDC23 [Pyrenophora Pt-1C-BFP]
  misc_feature (2)..(655): NCBI GI: 225556976 Blast Desc: cell division cycle protein [Ajellomyces capsulatus G186AR]
  misc_feature (1)..(655): NCBI GI: 121719094 Blast Desc: cell division cycle [Aspergillus clavatus NRRL 1] gi|119404484|gb|EAW14860.1| cell division cycle [Aspergillus clavatus NRRL 1]
  misc_feature (2)..(655): NCBI GI: 240277521 Blast Desc: cell division cycle protein [Ajellomyces capsulatus H143]
MSLNSREKSQLRGALQEAIVKCSERCLYQSSKWAAELLNAIPETEESFDDSQLSDASSGYAATVISPNPDPEEAALEAREISKYLLAKSLFDCREFDRCAAVFLPESTLTGIISPRDANATPKGKGKAKATTGNARPSSTFGLPNISQRSLFLALYAKFLSGEKRKDEDAEMVMGPQDLGVCVNKQLNAVSRVLEAWFESRKTDDDQITYGQGWLEYLYGMVLSREQNVELAKVWLVRSVHIFPWNWGCWQELTALMSRLDDLSQIMPLLPQNVVSFIFHIHTSLELYQHDGNLAQSLEQLLNIFTTSSFLLTCNALLSYHAKDLVAAEQGFSHLLALHPHRLDSLDHYSNILYVMNARPKLAFLAHLCSSVDKFRPESCVVIGNYYSLLSLHEKAVQYFRRALTLDRSCLSAWTLMGHEYVELKNTHAAIESYRRAVDVNRRDYRAWYGLGQTYEVLEMHAYALWYYKKAAGLRPWDGKMWMAVGSCLQQMKRYHDGIKALKRALMADSYYDTGSSFGSGSGSLRGAHMDPEILLQIAGMYDSLGEEDEAREYMEKCVAQETGPGGDSQGESIAIHHDSPGGGSDDGDNSGGRGGNEGTGVTAATSKARMWLARFAMRTEDYNTASRLANELCQDGVEVEEAKALIREVRSRLESAAGDMASLRASAAPTN

SEQ ID NO: 423 - DNA, 894 bp, Muscodor strobelii
  misc_feature: SGI cDNA ID NO. 559708
  misc_feature: Reduced expression when VOC is produced
  misc_feature: Encodes the peptide sequence at SEQ ID NO 424
atgaagttcactcaggctcttgctcccgctgccgggctcatcgccgcggtcaaggctgactatccggtttatcctacaacaactgtggtaacctatcccgtttcgacgcctccttcgagctcttatgaagtttcgaccccaagctacccggcgtcttcttccacttatgaggtttcgacaccaagttatccggcatcctcgtccacttatgaagtttcaactcccagctacccggcgtcaactccaagctatcccgcatcttcgtcaagctacccagcctcgtcgtcgacttatgaagtttcgactcctagctatcccgcgtctactcccagctatccggcatcaaccccgagttacccagcatctacgcccagctatcccgcgtcaaccccaagctatcctgcatctacgcccagttatccggcatccactcctagttatccggcatccactcctagttatccggcgtccactcctagctatcctgcgtcaactcccagctatccagtttccacgccaagctatcccgcgtcgactccaagctatcccgtatcgactcctagctatccggcttcttccccaacttatcctgtttcctcgccttcttcatctgcttattcctctgttccttattcctcgtatcctacttacccaacttcaaacttcccgacttacacgtcaactgtcccaacaactggctatcccacttacagctctaccatcgttactgttactacgtctggaactactttcacgactcagtacccagtgacgactcctcctagcggctccagcaccccaagcactacttcttccgtgcccactgctgctgccacgaagatcggctcaatgggagctctgctcgctgctggtgtggtcgctctggctctgtaa

SEQ ID NO: 424 - protein, 297 aa, Muscodor strobelii
  misc_feature: SGI Peptide ID NO. 559708
  misc_feature (59)..(205): NCBI GI: 229207640 Blast Desc: NdasDRAFT_3190 [Nocardiopsis dassonvillei subsp. dassonvillei DSM 43111] gi|228569823|gb|EEK34343.1| NdasDRAFT_3190 [Nocardiopsis dassonvillei subsp. dassonvillei DSM
  misc_feature (31)..(201): NCBI GI: 156400146 Blast Desc: [Nematostella vectensis] gi|156225985|gb|EDO46798.1| [Nematostella vectensis]
  misc_feature (32)..(231): NCBI GI: 156400146 Blast Desc: [Nematostella vectensis] gi|156225985|gb|EDO46798.1| [Nematostella vectensis]
  misc_feature (7)..(240): NCBI GI: 46127271 Blast Desc: FG08013.1 [Gibberella zeae PH-1]
  misc_feature (31)..(165): NCBI GI: 156400146 Blast Desc: [Nematostella vectensis] gi|156225985|gb|EDO46798.1| [Nematostella vectensis]
  misc_feature (45)..(231): NCBI GI: 46127271 Blast Desc: FG08013.1 [Gibberella zeae PH-1]
  misc_feature (59)..(231): NCBI GI: 156400146 Blast Desc: [Nematostella vectensis] gi|156225985|gb|EDO46798.1| [Nematostella vectensis]
  misc_feature (91)..(287): NCBI GI: 46127271 Blast Desc: FG08013.1 [Gibberella zeae PH-1]
  misc_feature (45)..(187): NCBI GI: 46127271 Blast Desc: FG08013.1 [Gibberella zeae PH-1]
  misc_feature (98)..(194): NCBI GI: 72106515 Blast Desc: [Strongylocentrotus purpuratus] gi|115949226|ref|XP_001187168.1| [Strongylocentrotus purpuratus]
  misc_feature: Useful for introducing or modulating the production of volatile compounds
MKFTQALAPAAGLIAAVKADYPVYPTTTVVTYPVSTPPSSSYEVSTPSYPASSSTYEVSTPSYPASSSTYEVSTPSYPASTPSYPASSSSYPASSSTYEVSTPSYPASTPSYPASTPSYPASTPSYPASTPSYPASTPSYPASTPSYPASTPSYPASTPSYPASTPSYPVSTPSYPASTPSYPVSTPSYPASSPTYPVSSPSSSAYSSVPYSSYPTYPTSNFPTYTSTVPTTGYPTYSSTIVTVTTSGTTFTTQYPVTTPPSGSSTPSTTSSVPTAAATKIGSMGALLAAGVVALAL

SEQ ID NO: 425 - DNA, 2099 bp, Muscodor strobelii
  misc_feature: SGI EST ID NO. CUFF.2042.0
  misc_feature: Variant of the nucleotide sequence at SEQ ID NO 423
ttagagcccaaagtgcttcctaatatagaatactatgcagggtccgttcatcagacagtgccgattgaaatgacaattgctggtgccatcggcggcacaaatgacgaccgtatacccgcccccgaattatcatgcttattgcgactcgtgtggcttgaaaatggcatggcaacatcgcatccatggatgcatcatcgccctagagacggccacgacagccaaggatcatctgcacatgtgggttgccatcgcgcatcattgcctcccgagtcagttgcccggtcgttggaatgataaatagctaggtagttcgcctgggcttatggtatttctggttcttgatcatcccgcatcgtctttcgtctgatatataatcgccaccacagtcgcttctccaacactcagtcgatataactcggcattgcaatcgctcaatcaaaacgcgtgaagcctccctggttcaacctctcgcttgattcaactataaccatatctataatttaatcataatcatcaagaggtcgatcaccatgaagttcactcaggctcttgctcccgctgccgggctcatcgccgcggtcaaggctgactatccggtttatcctacaacaactgtggtaacctatcccgtttcgacgcctccttcgagctcttatgaagtttcgaccccaagctacccggcgtcttcttccacttatgaggtttcgacaccaagttatccggcatcctcgtccacttatgaagtttcaactcccagctacccggcgtcaactccaagctatcccgcatcttcgtcaagctacccagcctcgtcgtcgacttatgaagtttcgactcctagctatcccgcgtctactcccagctatccggcatcaaccccgagttacccagcatctacgcccagctatcccgcgtcaaccccaagctatcctgcatctacgcccagttatccggcatccactcctagttatccggcatccactcctagttatccggcgtccactcctagctatcctgcgtcaactcccagctatccagtttccacgccaagctatcccgcgtcgactccaagctatcccgtatcgactcctagctatccggcttcttccccaacttatcctgtttcctcgccttcttcatctgcttattcctctgttccttattcctcgtatcctacttacccaacttcaaacttcccgacttacacgtcaactgtcccaacaactggctatcccacttacagctctaccatcgttactgttactacgtctggaactactttcacgactcagtacccagtgacgactcctcctagcggctccagcaccccaagcactacttcttccgtgcccactgctgctgccacgaagatcggctcaatgggagctctgctcgctgctggtgtggtcgctctggctctgtaaatggttttcagatgacgtaaaagtgaggggcatgagttgtctatgaaatttgaagagtagtggatgaatttcggtattcttacgaacgaattttacgaacatgatcacgcttgcattcttgcggaggatactgcatatggatatttctggactttccttaattaccagatcggatcggatattatgacatttcgcatcttggggaaacatgggttactgcaaggaaatggaagaggtctgggcgtttctgtttacaacttggaggctgggatgatataaagagcgcgctcctttaccaacgaacgataataataggttagctgaatgacgtcgcgagacttttggaacaaaatagatttagtttaattcgccttatttctcagcactctctcccttgcgttaaatattgacccgtgatgaattttgcctgaaatatcttggcagaccttcaaatctcgtattttcacaagccattattcgttagccccaccaatatgagtttattcgggcgagcgcaatgagtctatctagatgatgagggtgagagagcgtagtgttagacaggctatggcattgggcggcacagcctgatggagtgtgtgttggtgaggggttcgtatgtagatcttggaatggcaggaaatccttggtatcattccctgcggtggaagggtc

SEQ ID NO: 426 - DNA, 567 bp, Muscodor strobelii
  misc_feature: SGI cDNA ID NO. 559709
  misc_feature: Encodes the peptide sequence at SEQ ID NO 427
atgcgctgcttctcccacttagctgcttctgccttgatggcctccactttggtccatgccaacagcgtcaagttcgttagtcaagattcgctcaacaggactatcgtttttacacccaatgctgggttgcaggagatcccagacctactcgtacctggcaatgccgaggtgactcaagagtttccaacaggctgggttggcaacggctacagtgtctctgcgggtaccgaccggggcgttgtcggcatgctcgcagagttcacgttccaaggatgggccgacttgacctactttgatgtatctgctattgtaaaccagactgatacaaatggtgtcaagcaattgtatccggtgacccaagccgacgtcaaagctgagaagttaacaacattttctgggtgcctcgtctacccttgcaacacagtctactggcacccagacgatgttcaaaccgttacttcacctgagacagacttcatttgcactttgggtggtgctatttccgttgagtcacgagatacggggagggaactagtctcacggaaatatgtcttaggcaagcattaa

SEQ ID NO: 427 - protein, 188 aa, Muscodor strobelii
  misc_feature: SGI Peptide ID NO. 559709
  misc_feature (22)..(186): NCBI GI: 154317878 Blast Desc: BC1G_02922 [Botryotinia fuckeliana B05.10] gi|150843580|gb|EDN18773.1| BC1G_02922 [Botryotinia fuckeliana B05.10]
  misc_feature (1)..(168): NCBI GI: 171693901 Blast Desc: protein product [Podospora anserina] gi|170946899|emb|CAP73703.1| protein product [Podospora anserina]
  misc_feature (22)..(186): NCBI GI: 156050165 Blast Desc: SS1G_07669 [Sclerotinia sclerotiorum 1980] gi|154692070|gb|EDN91808.1| SS1G_07669 [Sclerotinia sclerotiorum 1980]
  misc_feature (23)..(164): NCBI GI: 6624948 Blast Desc: DNase1 protein [Metarhizium anisopliae var. anisopliae]
  misc_feature (22)..(164): NCBI GI: 253970748 Blast Desc: SchS21 protein [Stachybotrys chartarum]
  misc_feature (25)..(168): NCBI GI: 46124803 Blast Desc: FG06779.1 [Gibberella zeae PH-1]
  misc_feature (10)..(166): NCBI GI: 85103541 Blast Desc: NCU01173 [Neurospora crassa OR74A] gi|18376243|emb|CAD21357.1| related to dnase1 protein [Neurospora crassa] gi|28923086|gb|EAA32303.1| [Neurospora crassa OR74A]
  misc_feature (9)..(166): NCBI GI: 5823280 Blast Desc: extracellular DNase [Fusarium solani]
  misc_feature (9)..(170): NCBI GI: 256731399 Blast Desc: NECHADRAFT_101640 [Nectria haematococca mpVI 77-13-4]
  misc_feature (7)..(164): NCBI GI: 154302684 Blast Desc: BC1G_09457 [Botryotinia fuckeliana B05.10] gi|150855204|gb|EDN30396.1| BC1G_09457 [Botryotinia fuckeliana B05.10]
MRCFSHLAASALMASTLVHANSVKFVSQDSLNRTIVFTPNAGLQEIPDLLVPGNAEVTQEFPTGWVGNGYSVSAGTDRGVVGMLAEFTFQGWADLTYFDVSAIVNQTDTNGVKQLYPVTQADVKAEKLTTFSGCLVYPCNTVYWHPDDVQTVTSPETDFICTLGGAISVESRDTGRELVSRKYVLGKH

SEQ ID NO: 428 - DNA, 1841 bp, Muscodor strobelii
  misc_feature: SGI EST ID NO. CUFF.3860.0
  misc_feature: Variant of the nucleotide sequence at SEQ ID NO 426
atcgttgcccgcagcgttggtggcttacgtggagatgcgagatgcatcaggtacgcgacgctggcaaatcgacgctggcatcagcatgcggtacctgcgccaggttcgatgcttccaacgatcttgcgaaagaggcgcaagatgggccgcttgatgggatgcggtccgccccttgccggcaattttggtttggtcgtggacactggtataaaaaagctggacgtcccctcgcagagatccacgggcacgttatcttgagtttcagtagatcttatactctcctttggctattcgcagctctatccattctcttcaaaacagtgttgcacactctttgagcttcaagtcttgctattgatctagctattgcctctaacactctctcgactgagattcaaaaactatcctttctacacaacaacattcatacattcgagtatcacactcgtacattaccatccttcgatataaccgcaatcatgcgctgcttctcccacttagctgcttctgccttgatggcctccactttggtccatgccaacagcgtcaagttcgttagtcaagattcgctcaacaggactatcgtttttacacccaatgctgggttgcaggagatcccagacctactcgtacctggcaatgccgaggtgactcaagagtttccaacaggctgggttggcaacggctacagtgtctctgcgggtaccgaccggggcgttgtcggcatgctcgcagagttcacgttccaaggatgggccgacttgacctactttgatgtatctgctattgtaaaccagactgatacaaatggtgtcaagcaattgtatccggtgacccaagccgacgtcaaagctgagaagttaacaacattttctgggtgcctcgtctacccttgcaacacagtctactggcacccagacgatgttcaaaccgttacttcacctgagacagacttcatttgcactttgggtggtgctatttccgttgagtcacgagatacggggagggaactagtctcacggaaatatgtcttaggcaagcattaagggccagagcaagccccaggcattactcctttgcattaagacaaagtgatcgcgttgagcgcgggagacgataaacgacagacacgaatgagagatacccaaccgacttcacttcaactttaccctcagcgctctttttttgggtagcgttgctgttcatcaccaccatatagagttatcttcttggctatagaatgggaattgggggccgtgctcaagcacaagggatgccctcataacggaacagattcggggcgaccatcaaatgaatggtcgctcttgacccgagaacttgcgatgttgaccgctccattttctcgatatccttcttacaagatgcccagaatgggcattcaacctttttacacttcttacactcgtttgattcagttcgaactaccttctatgtatatattttagcgacaggtgttttggattttaagcgggtactgcctgcctttgaacttcgacatgaagaatagactggtttcatgggaccttttgcttgcattcgcctgcttgaaatgactgtaacctgtggggttctgaattgcttattccatatgcaaccacaactaactttcatcagaccatcgcgcctttttctttctttttttagacaatagtttgggctttttcagccactttgtcgcagactccttcactaggtgttctcacatttgtacttgtgatcaatccctgcaatatagcgactgttgtggcgcagtaaccccgccgtctcctcccgcgctgctaagccatttagttggcttggctgtttagcccaaggacgat

SEQ ID NO: 429 - DNA, 528 bp, Muscodor strobelii
  misc_feature: SGI cDNA ID NO. 559710
  misc_feature: Encodes the peptide sequence at SEQ ID NO 430
atggactacctcatactgcctcgcaacgccttcctggcatccttcccacagcacgataagcttgtagtcggcgcagctatcatcaaaaactcacccgataagcgcatcctactgctgaagcgcaataccgacgagaagcatcatcccggtgtgtttgagatccccggcggcaaggtcgatgcgaccgatgcgacgatcaaagacgctatcgttcgtgaagtagccgaagaatgtgccctaatcgtcaccaaggtcacctgtgcactgtccaacttctactatacgaccaaaaactgcgtggcgttgcccgcaaacgacaaaggcgaagtgaagatggaatgtgtcaccaagaattgcgtccagctaagctacgtcgttcaggttgagcaaggcgaattcaagacgaacgttgaggagcattctgaaggcgtgtgggccacccaagaggaagttggaagccttggtatgacgacgggaatgagagatcttgtacttgaggctttggcctcggagcaagtcgacgtttga

SEQ ID NO: 430 - protein, 175 aa, Muscodor strobelii
  misc_feature: SGI Peptide ID NO. 559710
  misc_feature (21)..(171): Pfam Id: PF00293 Pfam Desc: NUDIX domain
  misc_feature (16)..(169): NCBI GI: 46107972 Blast Desc: FG00868.1 [Gibberella zeae PH-1]
  misc_feature (20)..(168): NCBI GI: 255937101 Blast Desc: Pc13g11600 [Penicillium chrysogenum Wisconsin 54-1255] gi|211584197|emb|CAP92229.1| Pc13g11600 [Penicillium chrysogenum Wisconsin 54-1255]
  misc_feature (6)..(153): NCBI GI: 189210195 Blast Desc: conserved [Pyrenophora tritici-repentis Pt-1C-BFP] gi|187977522|gb|EDU44148.1| conserved [Pyrenophora tritici-repentis Pt-1C-BFP]
  misc_feature (18)..(145): NCBI GI: 169863655 Blast Desc: [Coprinopsis cinerea okayama7#130] gi|116500485|gb|EAU83380.1| [Coprinopsis cinerea okayama7#130]
  misc_feature (11)..(151): NCBI GI: 169619140 Blast Desc: SNOG_12764 [Phaeosphaeria nodorum SN15] gi|160703755|gb|EAT80062.2| SNOG_12764 [Phaeosphaeria nodorum SN15]
  misc_feature (22)..(151): NCBI GI: 261353272 Blast Desc: conserved [Verticillium albo-atrum VaMs.102]
  misc_feature (21)..(156): NCBI GI: 282164419 Blast Desc: NUDIX hydrolase [Methanocella paludicola SANAE] gi|282156733|dbj|BAI61821.1| NUDIX hydrolase [Methanocella paludicola SANAE]
  misc_feature (20)..(150): NCBI GI: 257054277 Blast Desc: ADP-ribose pyrophosphatase [Saccharomonospora viridis DSM 43017] gi|256584149|gb|ACU95282.1| ADP-ribose pyrophosphatase [Saccharomonospora viridis DSM 43017]
  misc_feature (26)..(160): NCBI GI: 148643429 Blast Desc: MutT-related protein NUDIX family [Methanobrevibacter smithii ATCC 35061] gi|148552446|gb|ABQ87574.1| MutT-related protein, NUDIX family [Methanobrevibacter smithii ATCC 35061]
  misc_feature (19)..(151): NCBI GI: 256726126 Blast Desc: NECHADRAFT_44269 [Nectria haematococca mpVI 77-13-4]
MDYLILPRNAFLASFPQHDKLVVGAAIIKNSPDKRILLLKRNTDEKHHPGVFEIPGGKVDATDATIKDAIVREVAEECALIVTKVTCALSNFYYTTKNCVALPANDKGEVKMECVTKNCVQLSYVVQVEQGEFKTNVEEHSEGVWATQEEVGSLGMTTGMRDLVLEALASEQVDV

SEQ ID NO: 431 - DNA, 1330 bp, Muscodor strobelii
  misc_feature: SGI EST ID NO. CUFF.1002.0
  misc_feature: Variant of the nucleotide sequence at SEQ ID NO 429
gaaaatcccaagacataacagtcgcacctaaaacacccatatatctgacacctcagcatcatgtctttaaacatcatttagactgtttccgataattatcattgcaatcatggactacctcatactgcctcgcaacgccttcctggcatccttcccacagcacgataagcttgtagtcggcgcagctatcatcaaaaactcacccgataagcgcatcctactgctgaagcgcaataccgacgagaagcatcatcccggtgtgtttgagatccccggcggcaaggtcgatgcgaccgatgcgacgatcaaagacgctatcgttcgtgaagtagccgaagaatgtgccctaatcgtcaccaaggtcacctgtgcactgtccaacttctactatacgaccaaaaactgcgtggcgttgcccgcaaacgacaaaggcgaagtgaagatggaatgtgtcaccaagaattgcgtccagctaagctacgtcgttcaggttgagcaaggcgaattcaagacgaacgttgaggagcattctgaaggcgtgtgggccacccaagaggaagttggaagccttggtatgacgacgggaatgagagatcttgtacttgaggctttggcctcggagcaagtcgacgtttgagatgaatgacgagaatggcttttatttgccaagaaagagcgagggtcaaagggactaggcgcgaaacgaaatgggcaaagccagtcattgtaatgaggatcgtcagatcgtcgatcaaaacatcccgcacgtggctacccgtcccgagccgttgaatttcgggatcttgaaccataatttggcctctgatcaggagtccggacgatcactctgcaatccacgtgtttactttttcaggacaagatcagatgaactcaaaattcggaagtaacatcaacctaatatatttcttccggctcgtcggcataaccaccttcacccagaaatgtttttccctgtctagttcatcttctgtttcgaacactacgtgctaggcatttaatccaaagctgaattcatccaacccatgcactgataggcgtcaacagattgcccccgaaccccttgccaaggtctctccatacttataatcgacgcaaaataagcgcaccacatcggtaaacaactcataaatgggttgagtagcagtaggacgaaaatattacaattggatgactatcaactggtgtcgttgctcggcgctgtgtgccaaagcactacatcggcggtttaagatcatcacgaagcaaggctcgttagactctttgacttagcacagcctttatagcagcaatgcagaagctgaaacagcag

SEQ ID NO: 432 - DNA, 1068 bp, Muscodor strobelii
  misc_feature: SGI cDNA ID NO. 559711
  misc_feature: Encodes the peptide sequence at SEQ ID NO 433
atggtcattacaccggaatgtccatttgaaggagagaggtttgacaagttcagagaaatcgctaccgcagccaagaaagatggcagcctgatgatcggtcagatcacacatcctggtcgtcaagtacaggctcgagtcaacaaaatcgctatatctgcatctgatgttcagctcgaccccaaactcgggatgacttttggcaaacctcaccctgccactgggaacgagattgctcgtgtcatcgaaggctttgctcacgctgctgaatatttacacaaagctggcttcgacgggatcgaactccatgcagccaatggataccttttatcccagtttctgtcgcgcactacaaataggcgcacagacaagtatggaccccagaatatcgattcacgcctgcgtctcatctccgaaatagctcgcgccatcaagtctcgggttccttccgactttattgtcgccgctaaactcaatagtgtcgaattccaagaaggcggcgtaactccagacgatgcaagagagctctgcaacgctttggatgccttggggttcgatttcgtggaactaagcggcgggacgtacgaaaacctgggcttcgaatacaaaaaagagtcgactagaaagcgagaggggtatttcatagaatgggcggagactatcaccaaatctctgggaaggggcagcaagctgaagacctatatcgtgggtggcctgagatccgtgggagccatggtcagggcgcttgacgtcgttgatggtgtctctttgggtcgccctgcgaccgctgaaccgcgtctcgcagccgacatcatcgagggacgcgtccaaggcgcgctcaagccggtcgaggatgtcatgaacgatcatggcttgagcttggtggtggctcttgcacagatttcgcagatctctaagaatatcgtgccgttggatgccggtagtgtcagcaccatgcaaacattttattcggattttggggcttggcgtaaccaagtggcattggatggagacaaaatggagttcgttcgtgccgtgcaatactccggacctcaggtgcagtatctctaa

SEQ ID NO: 433 - protein, 355 aa, Muscodor strobelii
  misc_feature: SGI Peptide ID NO. 559711
  misc_feature (1)..(277): Pfam Id: PF00724 Pfam Desc: NADH:flavin oxidoreductase / NADH oxidase family
  misc_feature (17)..(154): Pfam Id: PF00724 Pfam Desc: NADH:flavin oxidoreductase / NADH oxidase family
  misc_feature (1)..(354): NCBI GI: 256725869 Blast Desc: NECHADRAFT_82011 [Nectria haematococca mpVI 77-13-4]
  misc_feature (2)..(350): NCBI GI: 154294266 Blast Desc: BC1G_13819 [Botryotinia fuckeliana B05.10] gi|150844829|gb|EDN20022.1| BC1G_13819 [Botryotinia fuckeliana B05.10]
  misc_feature (2)..(349): NCBI GI: 169626359 Blast Desc: SNOG_16466 [Phaeosphaeria nodorum SN15] gi|111055044|gb|EAT76164.1| SNOG_16466 [Phaeosphaeria nodorum SN15]
  misc_feature (2)..(340): NCBI GI: 156066097 Blast Desc: SS1G_01060 [Sclerotinia sclerotiorum 1980] gi|154691918|gb|EDN91656.1| SS1G_01060 [Sclerotinia sclerotiorum 1980]
  misc_feature (2)..(341): NCBI GI: 70995668 Blast Desc: NADH oxidase [Aspergillus fumigatus Af293] gi|19309402|emb|CAD27301.1| NADH oxidase [Aspergillus fumigatus] gi|41581299|emb|CAE47948.1| NADH oxidase, [Aspergillus fumigatus]
  misc_feature (2)..(328): NCBI GI: 119495510 Blast Desc: NADH oxidase [Neosartorya fischeri NRRL 181] gi|119412700|gb|EAW22641.1| NADH oxidase [Neosartorya fischeri NRRL 181]
  misc_feature (1)..(352): NCBI GI: 255938666 Blast Desc: Pc14g01090 [Penicillium chrysogenum Wisconsin 54-1255] gi|211584724|emb|CAP74250.1| Pc14g01090 [Penicillium chrysogenum Wisconsin 54-1255]
  misc_feature (2)..(328): NCBI GI: 189195914 Blast Desc: NADH oxidase [Pyrenophora tritici-repentis Pt-1C-BFP] gi|187980174|gb|EDU46800.1| NADH oxidase [Pyrenophora tritici-repentis Pt-1C-BFP]
  misc_feature (2)..(341): NCBI GI: 121701545 Blast Desc: NADH oxidase [Aspergillus clavatus NRRL 1] gi|119397180|gb|EAW07611.1| NADH oxidase [Aspergillus clavatus NRRL 1]
  misc_feature (2)..(339): NCBI GI: 169786431 Blast Desc: [Aspergillus oryzae RIB40] gi|83776424|dbj|BAE66543.1| protein product [Aspergillus oryzae]
  misc_feature (10)..(195): SWISSPROT Homolog: EC 1.3.1.34 2,4-dienoyl-CoA reductase (NADPH)
MVITPECPFEGERFDKFREIATAAKKDGSLMIGQITHPGRQVQARVNKIAISASDVQLDPKLGMTFGKPHPATGNEIARVIEGFAHAAEYLHKAGFDGIELHAANGYLLSQFLSRTTNRRTDKYGPQNIDSRLRLISEIARAIKSRVPSDFIVAAKLNSVEFQEGGVTPDDARELCNALDALGFDFVELSGGTYENLGFEYKKESTRKREGYFIEWAETITKSLGRGSKLKTYIVGGLRSVGAMVRALDVVDGVSLGRPATAEPRLAADIIEGRVQGALKPVEDVMNDHGLSLVVALAQISQISKNIVPLDAGSVSTMQTFYSDFGAWRNQVALDGDKMEFVRAVQYSGPQVQYL

SEQ ID NO: 434 - DNA, 1366 bp, Muscodor strobelii
  misc_feature: SGI EST ID NO. CUFF.1075.0
  misc_feature: Variant of the nucleotide sequence at SEQ ID NO 432
tgatgttcagctcgaccccaaactcgggatgacttttggcaaacctcaccctgccactgggaacgagattgctcgtgtcatcgaaggctttgctcacgctgctgaatatttacacaaagctggcttcgacgggatcgaactccatgcagccaatggataccttttatcccagtttctgtcgcgcactacaaataggcgcacagacaagtatggaccccagaatatcgattcacgcctgcgtctcatctccgaaatagctcgcgccatcaagtctcgggttccttccgactttattgtcgccgctaaactcaatagtgtcgaattccaagaaggcggcgtaactccagacgatgcaagagagctctgcaacgctttggatgccttggggttcgatttcgtggaactaagcggcgggacgtacgaaaacctgggcttcgaatacaaaaaagagtcgactagaaagcgagaggggtatttcatagaatgggcggagactatcaccaaatctctgggaaggggcagcaagctgaagacctatatcgtgggtggcctgagatccgtgggagccatggtcagggcgcttgacgtcgttgatggtgtctctttgggtcgccctgcgaccgctgaaccgcgtctcgcagccgacatcatcgagggacgcgtccaaggcgcgctcaagccggtcgaggatgtcatgaacgatcatggcttgagcttggtggtggctcttgcacagatttcgcagatctctaagaatatcgtgccgttggatgccggtagtgtcagcaccatgcaaacattttattcggattttggggcttggcgtaaccaagtggcattggatggagacaaaatggagttcgttcgtgccgtgcaatactccggacctcaggtgcagtatctctaatctgcttgattaagatggacgggttctgctatgggccgatgaagcacgagatgtcgaaatgaggcgctacgttgcccccgagatctccactacatggaattgtcaagcttgggtttaggtagatcccagtgttgaagatggcgattgtgtgggcagtacgtttcgagtcgttcctttcctaatttcccaagagcaggagtacctctttctatttctttttagaataagtctttgaactagagttcgatggtcagcattaaatctagccatctttcgcacaactttcttacccttattattagtcactcacagaaatgaaagagcgtgtggtacataggctaagatgaatgccatcattgacttgctgtcctgtttgatcctcagctggatcttctgcattcttgtcgtcgttccatccttgggggtcggtagaacacccttgactctgggcatcggcag

SEQ ID NO: 435 - DNA, 327 bp, Muscodor strobelii
  misc_feature: SGI cDNA ID NO. 559712
  misc_feature: Encodes the peptide sequence at SEQ ID NO 436
atgtctgaggatatgcagcccagtggcgaagtctgggaatccaaagccaccgatcctgcagacatcatgccgtcaaccggtgctcaggatcaagagtggtccaactccaacgatgctcagagtcaagtgtcgtgcaaagatgctcagaatcaggagtcatctgccgatgcccagagtcaagggtgttctaccgacccccaaggatggaacgacgacaagaatgcagaagatccagctgaggatcaaacaggacagcaagtcaatgatggcattcatcttagcctatgtaccacacgctctttcatttctttcaaagacttattctaa

SEQ ID NO: 436 - protein, 108 aa, Muscodor strobelii
  misc_feature: SGI Peptide ID NO. 559712
MSEDMQPSGEVWESKATDPADIMPSTGAQDQEWSNSNDAQSQVSCKDAQNQESSADAQSQGCSTDPQGWNDDKNAEDPAEDQTGQQVNDGIHLSLCTTRSFISFKDLF

SEQ ID NO: 437 - DNA, 2149 bp, Muscodor strobelii
  misc_feature: SGI EST ID NO. CUFF.1076.1
  misc_feature: Variant of the nucleotide sequence at SEQ ID NO 435
cccgcatagaatggcaatccgtcctgcacgacgttaaaaggcatcccacgggaagatacgagctgaattgttgaaccaatggtgttgcctaccagaaaaggctcctcggcaccttcgcataagtcctaagcagttgcttcacagcttctgtggtggcgcaaggccccggtcatacaactctgcaaaatcttttatacttctatactagatcttcggttctctcactgcaagccttacacatccctcaatttcggcggtagtagttaccttgggaaggatccggaaccgcattttccttacgagtacaactcagactcctagcatacaagttgtcagtctgcactttgcaactacctaaactacatttccctctctgtcttttcgacatacctaactccctcatctctactactacaaccccacgtctcccgtatatctttgcacttctgcatccatatacaagaatcctcccacgctgctggtttgaacttcatacttcaacagtctgcgctctcacttctacatagtcacactctcgcgcatttgttggcttgaagttcatacttcagccttgtgcaacacgctcctgccctatcatcacacatcgacacattcctgcgcacctgcagtcctcgacaatgtctgaggatatgcagcccagtggcgaagtctgggaatccaaagccaccgatcctgcagacatcatgccgtcaaccggtgctcaggatcaagagtggtccaactccaacgatgctcagagtcaagtgtcgtgcaaagatgctcagaatcaggagtcatctgccgatgcccagagtcaagggtgttctaccgacccccaaggatggaacgacgacaagaatgcagaagatccagctgaggatcaaacaggacagcaagtcaatgatggcattcatcttagcctatgtaccacacgctctttcatttctgtgagtgactaataataaggttcaaagacttattctaaaaagaaatagaaagaggtactcctgctcttgggaaattaggaaaggaacgactcgaaacgtactgcccacacaatcgccatcttcaacactgggatctacctaaacccaagcttgacaattccatgtagtggagatctcgggggcaacgtagcgcctcatttcgacatctcgtgcttcatcggcccatagcagaacccgtccatcttaatcaagcagattagagatactgcacctgaggtccggagtattgcacggcacgaacgaactccattttgtctccatccaatgccacttggttacgccaagccccaaaatccgaataaaatgtttgcatggtgctgacactaccggcatccaacggcacgatattcttagagatctgcgaaatctgtgcaagagccaccaccaagctcaagccatgatcgttcatgacatcctcgaccggcttgagcgcgccttggacgcgtccctcgatgatgtcggctgcgagacgcggttcagcggtcgcagggcgacccaaagagacaccatcaacgacgtcaagcgccctgaccatggctcccacggatctcaggccacccacgatataggtcttcagcttgctgccccttcccagagatttggtgatagtctccgcccattctatgaaatacccctctcgctttctagtcgactcttttttgtattcgaagcccaggttttcgtacgtcccgccgcttagttccacgaaatcgaaccccaaggcatccaaagcgttgcagagctctcttgcatcgtctggagttacgccgccttcttggaattcgacactattgagtttagcggcgacaataaagtcggaaggaacccgagacttgatggcgcgagctatttcggagatgagacgcaggcgtgaatcgatattctggggtccatacttgtctgtgcgcctatttgtagtgcgcgacagaaactgggataaaaggtatccattggctgcatggagttcgatcccgtcgaagccagctttgtgtaaatattcagcagcgtgagcaaagccttcgatgacacgagcaatctcgttcccagtggcagggtgaggtttgccaaaagtcatcccgagtttggggtctactctatattagctttgaacttcttcttgattgagtgactcatttaccgag

SEQ ID NO: 438 - DNA, 1719 bp, Muscodor strobelii
  misc_feature: SGI cDNA ID NO. 559713
  misc_feature: Encodes the peptide sequence at SEQ ID NO 439
atgccatcacgccagagtcaaacgcctcctaacattcctgcctcagatcttgctgtccagcttctgcttagctttcttcacagttgcaggaggtttctcttctactattccacatccgtgggcgacctggtgcttcttaaaggagacaactgtggagctgtcagtagtactagtattactgggctattggaaatcaaagcgatggaactcaaccaagctgcaaactatgcccaacaatgctacggctccgatacctcgggcactgtggaatgcaacaagttcgtaactcaagcacttcccatcgccgtggctaatttcaacgcgagctgcccctttgagaatggcctatgccgccgtccttattccaacatacgcctcgactcgggacacttggatagcaatgactattttggtattaatgcgccttcggaccgccgtttcacgctgagatatgtcttgcagtgcgctcctctagaaactaatgggttcaccagcctcgcaaacgtgagcggcaaattgtggacaaggtatcactacggatcggccgtaacaggaggctctgacgatcgcaccacgcttgacttctcttacgaaatcgaaaactccgagacccaatacactttcgcagaggttagtcctttcgagggtcgtaacttcagtcttacgttccaaagggcgccgatgaccgactctaccgcctacataccagccaatggactagcaccaccggatggggatttaacgatcatattcctctcgggccaaggtgtactgtttactgagcccctagacgacttgtggtatcgagcaacttttgatagcactgatactgagctttcgagtgtgccagggtcgagccgagcttttcgaccaagcgagccagcttctccgctaggctgtatcgaacaataccaatggtgcaactcagcatatcaggatcagaatgaccaaggatgcggaccacttgccagcaattacgacgccttatatggagcagcagcaaaattcaacttaacgagtaccgacttggacccggcaagaccagtttcgagcacagaaccaggagcgcgacttatatggaatgctctgacgttgtttcagtatcctgcacagatcgacaatttactatcatatttaggctctaaatccttggcatcccagacgcatctattcagtggtgtcatacatggaacattgcctatgaatcagtggcagctagatgtccaactctggtttcagacaatgctcagcacgctccaggcggctttcactagcactgcagctggtcccacgaagccagagttggaagatactaaaatcaggccgctcaattcgcaggaacagcatctgtgcaagtcgcagaagatacgcagcgctgcacacacgtcgttcagccttctaggtttagctttgacagctgcactgggcctattcctgattctggtatcgttcatattcgagccagtcttgggtttcgttgatagagcctggaaacggaaatacgcaagtctcgaatggtctgctaacagcagtcttcaactacaccggcttgcgcatgaagaacccaccctcgaagcgtgggctaattgtaccagaacggtgccagtcacagatgccaacgccgtcttgtctagtctcgacattaccgatgctacacatcccgtcttagcatcgagcagccgcaaggcgggtgctggtgctcaagagaaagccgtgtaa

SEQ ID NO: 439 - protein, 572 aa, Muscodor strobelii
  misc_feature: SGI Peptide ID NO. 559713
  misc_feature (37)..(556): NCBI GI: 189194015 Blast Desc: conserved [Pyrenophora tritici-repentis Pt-1C-BFP] gi|187978910|gb|EDU45536.1| conserved [Pyrenophora tritici-repentis Pt-1C-BFP]
  misc_feature (44)..(554): NCBI GI: 169615058 Blast Desc: SNOG_10683 [Phaeosphaeria nodorum SN15] gi|111060957|gb|EAT82077.1| SNOG_10683 [Phaeosphaeria nodorum SN15]
  misc_feature (52)..(538): NCBI GI: 115399382 Blast Desc: [Aspergillus terreus NIH2624] gi|114192163|gb|EAU33863.1| [Aspergillus terreus NIH2624]
  misc_feature (68)..(538): NCBI GI: 119474227 Blast Desc: NFIA_004500 [Neosartorya fischeri NRRL 181] gi|119407142|gb|EAW17092.1| conserved [Neosartorya fischeri NRRL 181]
  misc_feature (68)..(538): NCBI GI: 70986226 Blast Desc: conserved [Aspergillus fumigatus Af293] gi|66846236|gb|EAL86569.1| conserved [Aspergillus fumigatus Af293]
  misc_feature (68)..(538): NCBI GI: 159128250 Blast Desc: conserved [Aspergillus fumigatus A1163]
  misc_feature (41)..(560): NCBI GI: 256723662 Blast Desc: NECHADRAFT_86728 [Nectria haematococca mpVI 77-13-4]
  misc_feature (32)..(520): NCBI GI: 121699395 Blast Desc: ACLA_082720 [Aspergillus clavatus NRRL 1] gi|119396149|gb|EAW06581.1| ACLA_082720 [Aspergillus clavatus NRRL 1]
  misc_feature (32)..(520): NCBI GI: 169772941 Blast Desc: [Aspergillus oryzae RIB40] gi|83768800|dbj|BAE58937.1| protein product [Aspergillus oryzae]
  misc_feature (12)..(516): NCBI GI: 169618215 Blast Desc: SNOG_12297 [Phaeosphaeria nodorum SN15] gi|160703576|gb|EAT80110.2| SNOG_12297 [Phaeosphaeria nodorum SN15]
MPSRQSQTPPNIPASDLAVQLLLSFLHSCRRFLFYYSTSVGDLVLLKGDNCGAVSSTSITGLLEIKAMELNQAANYAQQCYGSDTSGTVECNKFVTQALPIAVANFNASCPFENGLCRRPYSNIRLDSGHLDSNDYFGINAPSDRRFTLRYVLQCAPLETNGFTSLANVSGKLWTRYHYGSAVTGGSDDRTTLDFSYEIENSETQYTFAEVSPFEGRNFSLTFQRAPMTDSTAYIPANGLAPPDGDLTIIFLSGQGVLFTEPLDDLWYRATFDSTDTELSSVPGSSRAFRPSEPASPLGCIEQYQWCNSAYQDQNDQGCGPLASNYDALYGAAAKFNLTSTDLDPARPVSSTEPGARLIWNALTLFQYPAQIDNLLSYLGSKSLASQTHLFSGVIHGTLPMNQWQLDVQLWFQTMLSTLQAAFTSTAAGPTKPELEDTKIRPLNSQEQHLCKSQKIRSAAHTSFSLLGLALTAALGLFLILVSFIFEPVLGFVDRAWKRKYASLEWSANSSLQLHRLAHEEPTLEAWANCTRTVPVTDANAVLSSLDITDATHPVLASSSRKAGAGAQEKAV

SEQ ID NO: 440 - DNA, 1773 bp, Muscodor strobelii
  misc_feature: SGI cDNA ID NO. 559714
  misc_feature: Encodes the peptide sequence at SEQ ID NO 441
atgcgtcgtatggcatcaatgccaccggctgatatctacaagcgccagctcaatggccatgattatgaaattcgtctactggagctatatgcatcctcggactcgacttcgaaactgccattcaaatgtcgcctgaaacacgactcgctcaagaaacccctgccatatgttgcggtgtcgtactactggggggacttgcagaacaagcaagatctcgtcgtaaatgatatgacggtgcaagtgtcacagaatcttctaacagccttacagcagatgtggagaatggctcaaacttccatctgggttgattacctgtgtatcaaccaggacgataatgaagaaaagagtggccaggtccgtatgatggatacgatattcgccaaagctactacagtttatgcctggcttggcaccgaaagtcatgattccgacatggcgatggctatattaggagcatcaaggcgtagccaacaagtcgaattaccggaggaagtcgaaattgccgcggattcagtcattcgattattcagcagaccatattggacccgctgttgggtaatccaagaaatctgtcgcgcacggaaccctgtgattgtctgcggaagacgatatgtccactggggtactatgatgcaccgcctcgatgctcttggcatgtctattcctgctcagtacgctcgccatctgatcgcaccattacgtcacatgagattccgagatcagaataggttcagggcagataccgagacgggtctaatcccattaatcgtatcgagtcgcagatctctcgcttcagatccaagagacaaactctacgcccttctttcacttgcaaaggatggtcgtgtacttgttcctacgcccaattactcacagactgctaagcagatattcgttgacacggcgcgatgtatgatagaagagcacgacagaacagatatcatactcctcgcgcatcggagtcgtggggagcgaaaaatgccatcgtgggtacctgattgggcgaatttgaagtgtactccgccgccttgggtaacggaatgtctcgaccaaggacgtccgcggctatcgactccaaacgaagtaagcgatggtaacactgtgttgaaggtacaaggctatgagtacggcctgatagtcgacttcctagacatggaagcgttcgaagccgaagagaaagagtccggcgaagaaaccgaaatcccaatagaacctaccgtctcacgggacatcgtgacctatctagttcacatgacgatcggcagcgaagcagcaattgaccacgagacaatggtccgtattctacgaagaatataccgaagagggcaagaatgccctcgaccaaagccctctcgcctcgagagctgggtctcccacaacgcggaaagaagaatcggaagctccaccacattcatacaacatctagacaacttctgtcaacatagcgcctctagcataatacctccggaaagctcagaggacagtcatatcctcgaccagaagcagctagagatcgaagaatcattcgacagactcgacagattacgcatgacgtttgccgtcacggcggatggcaatcttcggatagtccatagagatgcgaatgagggtgactttttatatgttctacagaattgcccgttgcctgttatcttgcgtccggtcgataacaagaggcgttttacttacgttggggaagtctttgcgccgactgaggttcgggaatcgttaggtgtcaataacgggaggatgagctcggtttggcttgaatag

SEQ ID NO: 441 - protein, 590 aa, Muscodor strobelii
  misc_feature: SGI Peptide ID NO. 559714
  misc_feature (56)..(189): Pfam Id: PF06985 Pfam Desc: Heterokaryon incompatibility protein (HET)
  misc_feature (56)..(146): Pfam Id: PF06985 Pfam Desc: Heterokaryon incompatibility protein (HET)
  misc_feature (16)..(337): NCBI GI: 256731898 Blast Desc: NECHADRAFT_80737 [Nectria haematococca mpVI 77-13-4]
  misc_feature (23)..(395): NCBI GI: 119179507 Blast Desc: CIMG_08498 [Coccidioides immitis RS]
  misc_feature (23)..(384): NCBI GI: 46127485 Blast Desc: FG08120.1 [Gibberella zeae PH-1]
  misc_feature (23)..(336): NCBI GI: 240110131 Blast Desc: Heterokaryon incompatibility protein, [Coccidioides posadasii C735 delta SOWgp]
  misc_feature (38)..(340): NCBI GI: 256723655 Blast Desc: NECHADRAFT_52103 [Nectria haematococca mpVI 77-13-4]
  misc_feature (41)..(334): NCBI GI: 145234110 Blast Desc: An02g12950 [Aspergillus niger] gi|134057368|emb|CAK37923.1| protein product [Aspergillus niger]
  misc_feature (23)..(333): NCBI GI: 169608744 Blast Desc: SNOG_07457 [Phaeosphaeria nodorum SN15] gi|111063803|gb|EAT84923.1| SNOG_07457 [Phaeosphaeria nodorum SN15]
  misc_feature (24)..(334): NCBI GI: 46111023 Blast Desc: FG02393.1 [Gibberella zeae PH-1] gi|82779921|gb|ABB90278.1| heterokaryon incompatibility protein [Gibberella zeae]
  misc_feature (24)..(336): NCBI GI: 169619623 Blast Desc: SNOG_13010 [Phaeosphaeria nodorum SN15] gi|111058690|gb|EAT79810.1| SNOG_13010 [Phaeosphaeria nodorum SN15]
  misc_feature (24)..(323): NCBI GI: 169774653 Blast Desc: [Aspergillus oryzae RIB40] gi|83769657|dbj|BAE59792.1| protein product [Aspergillus oryzae]
MRRMASMPPADIYKRQLNGHDYEIRLLELYASSDSTSKLPFKCRLKHDSLKKPLPYVAVSYYWGDLQNKQDLVVNDMTVQVSQNLLTALQQMWRMAQTSIWVDYLCINQDDNEEKSGQVRMMDTIFAKATTVYAWLGTESHDSDMAMAILGASRRSQQVELPEEVEIAADSVIRLFSRPYWTRCWVIQEICRARNPVIVCGRRYVHWGTMMHRLDALGMSIPAQYARHLIAPLRHMRFRDQNRFRADTETGLIPLIVSSRRSLASDPRDKLYALLSLAKDGRVLVPTPNYSQTAKQIFVDTARCMIEEHDRTDIILLAHRSRGERKMPSWVPDWANLKCTPPPWVTECLDQGRPRLSTPNEVSDGNTVLKVQGYEYGLIVDFLDMEAFEAEEKESGEETEIPIEPTVSRDIVTYLVHMTIGSEAAIDHETMVRILRRIYRRGQECPRPKPSRLESWVSHNAERRIGSSTTFIQHLDNFCQHSASSIIPPESSEDSHILDQKQLEIEESFDRLDRLRMTFAVTADGNLRIVHRDANEGDFLYVLQNCPLPVILRPVDNKRRFTYVGEVFAPTEVRESLGVNNGRMSSVWLE

SEQ ID NO: 442 - DNA, 2262 bp, Muscodor strobelii
  misc_feature: SGI EST ID NO. CUFF.1098.1
  misc_feature: Variant of the nucleotide sequence at SEQ ID NO 440
cagatgtggagaatggctcaaacttccatctgggttgattacctgtgtatcaaccaggacgataatgaagaaaagagtggccaggtccgtatgatggatacgatattcgccaaagctactacagtttatgcctggcttggcaccgaaagtcatgattccgacatggcgatggctatattaggagcatcaaggcgtagccaacaagtcgaattaccggaggaagtcgaaattgccgcggattcagtcattcgattattcagcagaccatattggacccgctgttgggtaatccaagaaatctgtcgcgcacggaaccctgtgattgtctgcggaagacgatatgtccactggggtactatgatgcaccgcctcgatgctcttggcatgtctattcctgctcagtacgctcgccatctgatcgcaccattacgtcacatgagattccgagatcagaataggttcagggcagataccgagacgggtctaatcccattaatcgtatcgagtcgcagatctctcgcttcagatccaagagacaaactctacgcccttctttcacttgcaaaggatggtcgtgtacttgttcctacgcccaattactcacagactgctaagcagatattcgttgacacggcgcgatgtatgatagaagagcacgacagaacagatatcatactcctcgcgcatcggagtcgtggggagcgaaaaatgccatcgtgggtacctgattgggcgaatttgaagtgtactccgccgccttgggtaacggaatgtctcgaccaaggacgtccgcggctatcgactccaaacgaagtaagcgatggtaacactgtgttgaaggtacaaggctatgagtacggcctgatagtcgacttcctagacatggaagcgttcgaagccgaagagaaagagtccggcgaagaaaccgaaatcccaatagaacctaccgtctcacgggacatcgtgacctatctagttcacatgacgatcggcagcgaagcagcaattgaccacgagacaatggtccgtattctacgaagaatataccgaagagggcaagaatgccctcgaccaaagccctctcgcctcgagagctgggtctcccacaacgcggaaagaagaatcggaagctccaccacattcatacaacatctagacaacttctgtcaacatagcgcctctagcataatacctccggaaagctcagaggacagtcatatcctcgaccagaagcagctagagatcgaagaatcattcgacagactcgacagattacgcatgacgtttgccgtcacggcggatggcaatcttcggatagtccatagagatgcgaatgagggtgactttttatatgttctacagaattgcccgttgcctgttatcttgcgtccggtcgataacaagaggcgttttacttacgttggggaagtctttgcgccgactgaggttcgggaatcgttaggtgtcaataacgggaggatgagctcggtttggcttgaatagcgttgaattttggaatagttattggaatgagacacaactcttcaaatggttgatctgagggaagcagtgcataaactggactgccaaagcgtcggacagaccgctatcgtatatgtacaattattccagagcgattaaaggcatatgcttattgtcacctctgacagcaatacagacaagatcccctaaaagaagtggctattattacgtacagctggtgtagaagcagcattgcgtcttgatattatgcctctaagtacgtgagattctatgaaatccgattgctgcatcaattcctgattgtctggccttagttcattcgtaatgctacgacgttcttctcatccatcgtatctcccatgtcaggaatcttcgctgtcatagtatttttgcctggtgccacaaagagagccttagcctgggcctttgtaccttgcagaaaactttcctggcgaatcgcgcagaattttgagggctacttgatgaccgcgatagaggacaaatccctactcccgaggtcttcttggtttacacggctttctcttgagcaccagcacccgccttgcggctgctcgatgctaagacgggatgtgtagcatcggtaatgtcgagactagacaagacggcgttggcatctgtgactggcaccgttctggtacaattagcccacgcttcgagggtgggttcttcatgcgcaagccggtgtagttgaagactgctgttagcagaccattcgagacttgcgtatttccgtttcca

SEQ ID NO: 443 - DNA, 915 bp, Muscodor strobelii
  misc_feature: SGI cDNA ID NO. 559715
  misc_feature: Elevated expression when VOC is produced
  misc_feature: Encodes the peptide sequence at SEQ ID NO 444
atggagcacaaaatcgacaccagtgaggcatcaaactataagctaactcaactaccgtcggtgcctggtactggtttgccctctgagaccaaagatgaatttaggcatggctacggctacgaatcgtcctcaggaacacccagtcgaagaactagtgtggagggtcatgccgggaacatgagcggagccgataacatcgactttgattatgggtctatcatcaatactcttgaaacttcacaaggccatccttttcagtctaccaattctcagaacttcctgtattgttggtttgaagagggtatcgcttctccactccttgaataccagccgcctgcgtattcggttaagggcttagtctttgaactcacatcatcatgtccatggcccgacggtagtccagtcaacttatttgagaaacgagaaactccgagtcctctccctcaatacattcctatgccgggaaaacgacagatatacgatgtcggtcacgtacaacaaagaacaacacccttacatcgggccctaggaggccgcacgaaacagaagcgaacacggaaagccatcccacgtacggactcatatggggatattccaatcaccctttgctcaaaaggtggaaatccctgtccataccatatctgtagcgatcgcaaaccgttcaagcggcaagaacatttgaagagacacacacacactgtgcacgggaatcacgccgaagtcgccacgatatgccagttttgccaaaagaagttcaaccgcagagataattggagatctcatctcttgttgcacaccaaaaaggatgcaagcggtcggacacattactacgaggacgcccaggctgtgctagacgaggagatgcggaaaaccaaacagcgaaatacaccgaagaagagaatttcagtattataa

SEQ ID NO: 444 - protein, 304 aa, Muscodor strobelii
  misc_feature: SGI Peptide ID NO. 559715
  misc_feature (156)..(295): NCBI GI: 85075600 Blast Desc: NCU03552 [Neurospora crassa OR74A] gi|28916803|gb|EAA26555.1| [Neurospora crassa OR74A]
  misc_feature (156)..(295): NCBI GI: 18376047 Blast Desc: related to zinc finger protein odd-paired-like (opl) [Neurospora crassa]
  misc_feature (64)..(299): NCBI GI: 256730762 Blast Desc: [Nectria haematococca mpVI 77-13-4]
  misc_feature (162)..(299): NCBI GI: 46109388 Blast Desc: FG01576.1 [Gibberella zeae PH-1]
  misc_feature (191)..(272): NCBI GI: 255728061 Blast Desc: [Candida tropicalis MYA-3404] gi|240133272|gb|EER32828.1| [Candida tropicalis MYA-3404]
  misc_feature (203)..(273): NCBI GI: 238878688 Blast Desc: conserved [Candida albicans WO-1]
  misc_feature (219)..(273): NCBI GI: 68464721 Blast Desc: potential zinc finger transcription factor [Candida albicans SC5314] gi|68465098|ref|XP_723248.1| potential zinc finger transcription factor [Candida albicans SC5314] potential
  misc_feature (167)..(280): NCBI GI: 154322791 Blast Desc: [Botryotinia fuckeliana B05.10] gi|150848072|gb|EDN23265.1| [Botryotinia fuckeliana B05.10]
  misc_feature (219)..(274): NCBI GI: 241949533 Blast Desc: transcription factor, [Candida dubliniensis CD36] gi|223640827|emb|CAX45142.1| transcription factor, [Candida dubliniensis CD36]
  misc_feature (187)..(274): NCBI GI: 190345619 Blast Desc: PGUG_01635 [Pichia guilliermondii ATCC 6260]
  misc_feature: Useful for introducing or modulating the production of volatile compounds
MEHKIDTSEASNYKLTQLPSVPGTGLPSETKDEFRHGYGYESSSGTPSRRTSVEGHAGNMSGADNIDFDYGSIINTLETSQGHPFQSTNSQNFLYCWFEEGIASPLLEYQPPAYSVKGLVFELTSSCPWPDGSPVNLFEKRETPSPLPQYIPMPGKRQIYDVGHVQQRTTPLHRALGGRTKQKRTRKAIPRTDSYGDIPITLCSKGGNPCPYHICSDRKPFKRQEHLKRHTHTVHGNHAEVATICQFCQKKFNRRDNWRSHLLLHTKKDASGRTHYYEDAQAVLDEEMRKTKQRNTPKKRISVL

SEQ ID NO: 445 - DNA, 4797 bp, Muscodor strobelii
  misc_feature: SGI EST ID NO. CUFF.1233.0
  misc_feature: Variant of the nucleotide sequence at SEQ ID NO 443
aagaccaagagcgaacaagacataagcttacctatacccgtagatagagtcaaaaagatgtggctacttatatagtccgccgagcttggattgctagtgctgatgtatatgccggagaggtatatcttggtgagctaacgatgggtcgccacgagtcccagcacttcacgaaccgttatttcgtcggcgattataggggtcaaaccgggttgtacttgccaccaaaagtccatgccttacaaagtatatggattgctctttttcccataacagccactgcagaaaatttgcaaagctgcccgtaagcaggctctggcacgccaagatagtaacacagcgctgtaatcccaggccaggcatcgccaaacagcgaaagatggccgccaccgcccgtcattgttggtaggatcgcctacatacacaactatctagaaaggatcagtgcaactcaccaattcacaatacaagatagctttttacgacaagagtgtggcttgtttacgccaaacttaccgaacctccaataggccgggccatctacagcacctagcttggttcgacttccagcagcattctgatgcatttcccagacccttctttccgccccgactgcgattttatacgccaggtcccaacgcaaggcaactcaagagaaacaccaaataaacgctcgtttatctacataaccgcctaccaagcagtcctccgtcttctgtcaggaaataatttgttaagacatcataatatgcccaattctcgtaacttaagcctcagcacacgcgcggcttcgctactcaatcgttccccgtgtaacttccagctcagacctctccatccccaaagtcagagaggtggtggtcgtccttggcaatgacagtgttatggttctgacagatggttctgacagatgtctcctctctttcccctttatggggactgtgcacaagggagtgcagtttggtatggagcatctggcaccgagataaagcacttgagctaactcgcgacactgggcgcttgacatgtcgcattgtcgagattcccccactgactacagctttttgaattctcggattgcgccgtgcattttgggaatgtcctgtaggagtattgccacgcgtgggagccaggaatgggtcgagttcttgatggagatcctcttcggtgatcttgaggttccagtccagaaggtaaagtagctgcctctccatttcatcgatttccggctggccaaatgctaaaccgcagctgtggctgtctatgcggctgtacctagcccagtctctattcttgggtgagctatcgttcaagtacttagaagtcacgatcagcacggccaggaatatgcggtggttggaagttcgttgtccccttgtccccggctgaagtcgagatttcagtcttctgagatatataagagccgacatgaaagttgatgctcgcacatctgatgatctgactacacccgttataaattcctccagagtcagtaggccccttgtatcgtgctgggtcacttgcgacaaatagtcggcgttgtcgatcccgtgttgaaaatccaatgtctctaccccagggtcgcactcgacaatatttgaagccgcagccaagaaagagatcatacggcgatcgactggaatgagtgttaaatgcgtaagctcaataccattcaagttggagctgcgtaatgctgatgaagacatgctgatgttgaacgtgtcgcgaagcatcaattattgctgctgcggtcaccgtactgtacagtactgtacatacatactctcaaatacatatcatctgaggcaagctgattgattttagttgcgcacattctgtgtagtgtgctaatcaaatgtccacaaagaacgggaaggcatttttggatctttcatgaccagagatcgctagcgcgccaacaacggcaacgatccaaaagccgtttgtgtatctacgccgctcttggatcatcttctacgtatgcgagcgttgccgaacatgtttgaagatccacctgtagacctatacatccggaaactgctctgttgtagcatgcgcaaatgtcaaggaggcgacctcgacgaggtttagccgcagatctctcggcttcgaaatcctgattgatgtgtgcagtcaagactcgtatgcactatacatattagttcattgcaatccatgaagtcattattacacacgcttctaaatctggtccgcctcggttttcacaagcggcgatgtatacatacagagcatctgcactcgcaatatacatgctctcatttctcggcgtgttgtttaccacgggggccctcgctgttgatgtcgccgtgtcggggactcttaactctggacctgacttcggaacggccagtggcttaagctatcctatttcacatcccgatatcagggcgacaatgtcgtacacggctgcacaaacacttgccagccttacctcttcgtgcgcactatctgatgccacagacatggatatctcggaaatcacgacgaccaaaacatgtgttcgaactgtcaccaaaacaatttcgcatgtaatgcttgtcaccgtcactgcaccgcactgtaccgtgctctccagacctgcctcgggctggctcgggacaacaccaaaacattcgccacggaatagcacgatctcattcagaaccaggccaccgctcgggacggcgccgacacattggacgtcgaggagtacgatgttgtccaagacgagcacaccaccaactccatcgccaagttcaggaggaaacgctcaggttcagcaggcctggtcctcattgcagtcatcgccatcgctctaggtgtatcatgtttccatgtggtatcttatgtctctggcaagtaaaaacaatcccggcttttgcactttttgaatgtatttgtacctcttacggtatatccgtcctttgatcagagtgactacttagcaagcataccttaatcatcatacgacaatgagatctaaagtacgactcgaatatttccaaaatcatatctacgcaactataaaacagatcgcgtgaccttagaagaggtcctgcacagacttgcgtaacatagtcataaacgctccagaacacgaggctctatcttcattggctttggtatccatggtacttttggtcgtttgacgttgggacccactgctcctccgtgcctaacatttgttccaagactggtagatcctatttgcaacataaagatgatgtcatgaaggtaggacaggacattgggatcgcaaagtcgtcagaacaccacttcgtgagttttttgtcacaagacagttgatactacattaccaagctctaaatgcgagcctcttgactagtgcttacgccctacgcttcaggcgctctacacagcccaacacccaacgctttcgcaagccctagccccaagtgtcataagactgtcaagcgtataaagagcgtgttgcttaagtcaataatttaacggcgagcaattgcagtggagcttcagatgggcctccgagtctcccttggggaagatctttcgaccatttaccccaacaaccgggtgtcgaacgccggatatctagcctatgtcaatggagcacaaaatcgacaccagtgaggcatcaaactataagctaactcaactaccgtcggtgcctggtactggtttgccctctgagaccaaagatgaatttaggcatggctacggctacgaatcgtcctcaggaacacccagtcgaagaactagtgtggagggtcatgccgggaacatgagcggagccgataacatcgactttgattatgggtctatcatcaatactcttgaaacttcacaaggccatccttttcagtctaccaattctcagaacttcctgtattgttggtttgaagagggtatcgcttctccactccttgaataccagccgcctgcgtattcggttaagggcttagtctttgaactcacatcatcatgtccatggcccgacggtagtccagtcaacttatttgagaaacgagaaactccgagtcctctccctcaatacattcctatgccgggaaaacgacagatatacgatgtcggtcacgtacaacaaagaacaacacccttacatcgggccctaggaggccgcacgaaacagaagcgaacacggaaagccatcccacgtacggactcatatggggatattccaatcaccctttgctcaaaaggtggaaatccctgtccataccatatctgtagcgatcgcaaaccgttcaagcggcaagaacatttgaagagacacacacacactgtgcacgggaatcacgccgaagtcgccacgatatgccagttttgccaaaagaagttcaaccgcagagataattggagatctcatctcttgttgcacaccaaaaaggatgcaagcggtcggacacattactacgaggacgcccaggctgtgctagacgaggagatgcggaaaaccaaacagcgaaatacaccgaagaagagaatttcagtattataaaacaatattctggtgatttcacctgttactcccgggcttggttctgctttggactataatgtcccacgaacgtgcatcatctctcccgcttctaatctcagcctctgccttattatagtaacgatcacaatgtttcccatattccttgtagctttgagatatacagccgtaacatggagcctatatcatcgctgaattggcaactagagtcgagaaatactgcatggggtaaagtatcatcagttattcggcagaaaattgtataatacagattattcccgacagtgttctaattacta

SEQ ID NO: 446 - DNA, 882 bp, Muscodor strobelii
  misc_feature: SGI cDNA ID NO. 559716
  misc_feature: Elevated expression when VOC is produced
  misc_feature: Encodes the peptide sequence at SEQ ID NO 447
atgtcttcatcagcattacgcagctccaacttgaatggtattgagcttacgcatttaacactcattccagtcgatcgccgtatgatctctttcttggctgcggcttcaaatattgtcgagtgcgaccctggggtagagacattggattttcaacacgggatcgacaacgccgactatttgtcgcaagtgacccagcacgatacaaggggcctactgactctggaggaatttataacgggtgtagtcagatcatcagatgtgcgagcatcaactttcatgtcggctcttatatatctcagaagactgaaatctcgacttcagccggggacaaggggacaacgaacttccaaccaccgcatattcctggccgtgctgatcgtgacttctaagtacttgaacgatagctcacccaagaatagagactgggctaggtacagccgcatagacagccacagctgcggtttagcatttggccagccggaaatcgatgaaatggagaggcagctactttaccttctggactggaacctcaagatcaccgaagaggatctccatcaagaactcgacccattcctggctcccacgcgtggcaatactcctacaggacattcccaaaatgcacggcgcaatccgagaattcaaaaagctgtagtcagtgggggaatctcgacaatgcgacatgtcaagcgcccagtgtcgcgagttagctcaagtgctttatctcggtgccagatgctccataccaaactgcactcccttgtgcacagtccccataaaggggaaagagaggagacatctgtcagaaccatctgtcagaaccataacactgtcattgccaaggacgaccaccacctctctgactttggggatggagaggtctga

SEQ ID NO: 447 - protein, 293 aa, Muscodor strobelii
  misc_feature: SGI Peptide ID NO. 559716
  misc_feature (18)..(177): Pfam Id: PF08613 Pfam Desc: Cyclin
  misc_feature (46)..(178): Pfam Id: PF00134 Pfam Desc: Cyclin, N-terminal domain
  misc_feature (91)..(144): Pfam Id: PF08613 Pfam Desc: Cyclin
  misc_feature (2)..(208): NCBI GI: 85097208 Blast Desc: NCU04847 [Neurospora crassa OR74A] gi|28921896|gb|EAA31170.1| NCU04847 [Neurospora crassa OR74A]
  misc_feature (1)..(208): NCBI GI: 171682586 Blast Desc: protein product [Podospora anserina] gi|170941252|emb|CAP66902.1| protein product [Podospora anserina]
  misc_feature (2)..(196): NCBI GI: 116202817 Blast Desc: CHGG_09293 [Chaetomium globosum CBS 148.51] gi|88177811|gb|EAQ85279.1| CHGG_09293 [Chaetomium globosum CBS 148.51]
  misc_feature (2)..(208): NCBI GI: 256733466 Blast Desc: [Nectria haematococca mpVI 77-13-4]
  misc_feature (9)..(204): NCBI GI: 261359381 Blast Desc: PHO85 cyclin-1 [Verticillium albo-atrum VaMs.102]
  misc_feature (2)..(208): NCBI GI: 46128179 Blast Desc: FG08467.1 [Gibberella zeae PH-1]
  misc_feature (10)..(212): NCBI GI: 238486374 Blast Desc: cyclin (Pcl1), [Aspergillus flavus NRRL3357] gi|220699304|gb|EED55643.1| cyclin (Pcl1), [Aspergillus flavus NRRL3357]
  misc_feature (8)..(193): NCBI GI: 169622220 Blast Desc: SNOG_14327 [Phaeosphaeria nodorum SN15] gi|111057078|gb|EAT78198.1| SNOG_14327 [Phaeosphaeria nodorum SN15]
  misc_feature (8)..(196): NCBI GI: 121702843 Blast Desc: cyclin [Aspergillus clavatus NRRL 1] gi|119397829|gb|EAW08260.1| cyclin [Aspergillus clavatus NRRL 1]
  misc_feature (10)..(196): NCBI GI: 212540208 Blast Desc: cyclin (Pcl1), [Penicillium marneffei ATCC 18224] gi|210067558|gb|EEA21650.1| cyclin (Pcl1), [Penicillium marneffei ATCC 18224]
  misc_feature: Useful for introducing or modulating the production of volatile compounds
MSSSALRSSNLNGIELTHLTLIPVDRRMISFLAAASNIVECDPGVETLDFQHGIDNADYLSQVTQHDTRGLLTLEEFITGVVRSSDVRASTFMSALIYLRRLKSRLQPGTRGQRTSNHRIFLAVLIVTSKYLNDSSPKNRDWARYSRIDSHSCGLAFGQPEIDEMERQLLYLLDWNLKITEEDLHQELDPFLAPTRGNTPTGHSQNARRNPRIQKAVVSGGISTMRHVKRPVSRVSSSALSRCQMLHTKLHSLVHSPHKGEREETSVRTICQNHNTVIAKDDHHLSDFGDGEV

SEQ ID NO: 448 - DNA, 706 bp, Muscodor strobelii
  misc_feature: SGI cDNA ID NO. 559717
  misc_feature: Elevated expression when VOC is produced
  misc_feature: Encodes the peptide sequence at SEQ ID NO 449
atgtacgaccctatcaaaggcaccactcgtcaagccaccaagccgcgaccagtctcgtataaaaagatggccctgctatctgaggcgatccatggcttaggaacaaagccgcagctagcagcctacgaagctcccattgacattggaaattggctgcggcctttgctagtcgagtttcaaaatgacttgggctacaccggcgctagcctaggagatgatcttggtgggctagtagatggcatgcatagggtggcagctaatctacatatcaagtcccccgagaattctcatgagtggtatgcattccaggtcggggtccattacgcacatctttgctaccccaagcaccatctcgatatccgtatctacacgggcatttttacttggattgccgtcctgattgatgatggcgtaagcaagaatgcagatgaatggaaacagttcatgtgctgttttcatgccaaccgcaagcagctcaaccctctggctcaggcatggtcagatctgttgcaactcagctaccagtactattcacccatcgtggcaaacttcatcgtcacctcggcacttaactttgtcaatgccaatatcctcgagcagactcaagttccgaagatgacatgtacggctggtggccaggcctggccttactaccttcgtgacaagaatggtattgctgaggcctatgcctggctctcgttcccgg

SEQ ID NO: 449 - protein, 235 aa, Muscodor strobelii
  misc_feature: SGI Peptide ID NO. 559717
  misc_feature (41)..(235): NCBI GI: 46124133 Blast Desc: FG06444.1 [Gibberella zeae PH-1]
  misc_feature (34)..(235): NCBI GI: 46137763 Blast Desc: FG10397.1 [Gibberella zeae PH-1]
  misc_feature (34)..(235): NCBI GI: 263199514 Blast Desc: longiborneol synthase [Gibberella zeae]
  misc_feature (111)..(235): NCBI GI: 169601396 Blast Desc: SNOG_03562 [Phaeosphaeria nodorum SN15] gi|111067647|gb|EAT88767.1| SNOG_03562 [Phaeosphaeria nodorum SN15]
  misc_feature (99)..(235): NCBI GI: 169851720 Blast Desc: CC1G_03563 [Coprinopsis cinerea okayama7#130] gi|116506403|gb|EAU89298.1| CC1G_03563 [Coprinopsis cinerea okayama7#130]
  misc_feature (100)..(235): NCBI GI: 145253523 Blast Desc: An17g00450 [Aspergillus niger] gi|134083841|emb|CAK97405.1| protein product [Aspergillus niger]
  misc_feature (93)..(235): NCBI GI: 145241856 Blast Desc: An09g02610 [Aspergillus niger] gi|134078116|emb|CAK40197.1| protein product [Aspergillus niger]
  misc_feature (108)..(235): NCBI GI: 170110152 Blast Desc: [Laccaria bicolor S238N-H82] gi|164638866|gb|EDR03141.1| [Laccaria bicolor S238N-H82]
  misc_feature (173)..(235): NCBI GI: 238578540 Blast Desc: MPER_12192 [Moniliophthora perniciosa FA553] gi|215450320|gb|EEB89683.1| MPER_12192 [Moniliophthora perniciosa FA553]
  misc_feature (117)..(235): NCBI GI: 170109005 Blast Desc: [Laccaria bicolor S238N-H82] gi|164639290|gb|EDR03562.1| [Laccaria bicolor S238N-H82]
  misc_feature: Useful for introducing or modulating the production of volatile compounds
MYDPIKGTTRQATKPRPVSYKKMALLSEAIHGLGTKPQLAAYEAPIDIGNWLRPLLVEFQNDLGYTGASLGDDLGGLVDGMHRVAANLHIKSPENSHEWYAFQVGVHYAHLCYPKHHLDIRIYTGIFTWIAVLIDDGVSKNADEWKQFMCCFHANRKQLNPLAQAWSDLLQLSYQYYSPIVANFIVTSALNFVNANILEQTQVPKMTCTAGGQAWPYYLRDKNGIAEAYAWLSFP

SEQ ID NO: 450 - DNA, 733 bp, Muscodor strobelii
  misc_feature: SGI EST ID NO. CUFF.1064.0
  misc_feature: Variant of the nucleotide sequence at SEQ ID NO 448
aaagaatcgcaccttaacaatagtctacatgtacgaccctatcaaaggcaccactcgtcaagccaccaagccgcgaccagtctcgtataaaaagatggccctgctatctgaggcgatccatggcttaggaacaaagccgcagctagcagcctacgaagctcccattgacattggaaattggctgcggcctttgctagtcgagtttcaaaatgacttgggctacaccggcgctagcctaggagatgatcttggtgggctagtagatggcatgcatagggtggcagctaatctacatatcaagtcccccgagaattctcatgagtggtatgcattccaggtcggggtccattacgcacatctttgctaccccaagcaccatctcgatatccgtatctacacgggcatttttacttggattgccgtcctgattgatgatggcgtaagcaagaatgcagatgaatggaaacagttcatgtgctgttttcatgccaaccgcaagcagctcaaccctctggctcaggcatggtcagatctgttgcaactcagctaccagtactattcacccatcgtggcaaacttcatcgtcacctcggcacttaactttgtcaatgccaatatcctcgagcagactcaagttccgaagatgacatgtacggctggtggccaggcctggccttactaccttcgtgacaagaatggtattgctgaggcctatgcctggctctcgttcccg

SEQ ID NO: 451 - DNA, 1689 bp, Muscodor strobelii
  misc_feature: SGI cDNA ID NO. 559718
  misc_feature: Elevated expression when VOC is produced
  misc_feature: Encodes the peptide sequence at SEQ ID NO 452
atgatggatccgagtccgctattgttattaattctcttgtgcatcatcctcgcggctcccaggaaaatcacctggtcgccatctcgtcctcggaacttcccaccgggaccgccgaggctgccgttcttaggcaatctacatcaaattctgcggtttccaaaggcatacaccagacttgcagagcttagccgaagctatggaactcatggagttatgggtttaaaactcggcccgactaccaacgttctggtcatcaatgagcggaaggctgttgaagccctcctcgaaaaacgcggggccatttactcctcgcggccgccattcctcgggtcagaatatgtccatccgtcggcagaagtacatctagcaatgatgtcgtatgggaagaaatggcatcgcatgcggaaaactttgacgatagagtttgtaacgagagctcagatccagaagcggacacctctcgtggaggcggagtcgacgcaactcatgatggagctcttacgagaacctgggaacttccataaccatgtgcttagatatcacggtgccataatcatggcttcagtatttgggataagggggaaatctatggacgaagacagtctgatggggcgcttcttttctattcaccacctttggagcgagatgctcgagccaggttctatccccccttatgatatatttcctttcttgaagtacgtaccgaacgtattgctcggcccctggcgtaactggaaggggtacgttcgctacgtcggtaggatacaaagagaactttactcggacttgcttaacgaggtgaagtcccggattaccgagggacggggcccggattgcctcattgctaagttgctttgcagcgaagagaaagaggcgtacagtgttactgatcttcagtatatcggcggtgttcttctagagggcggctctgacacgacggcaaatgctttcaagacttttctccacgctatggcagctttcccccaagtcctaaagcgtgcccaggcagaagtcgaccaggtcttcggggacaagcagatgcccacaggcacagatgctgcgaggctcccttatcttatggcttgtattctcgaggtcctccgctggcggcctggcgtggcagcaggaataccgcatgcgacaacgaaggatgacacttatgagggatatgtcagtggcattcttcctctcatgcatataaacgcgatgatgtcgcggctaactcgtattctatcacagtttatcccggcgggaacaaccgtcttgatgaatatatggggtattaaccatgaccccgaagtgtacacaaacccagaggccttcgaaccggagcgctttatgcggtatccggccgggggggacatatccgatgttaagcatgacaagaatactgaaattcctaaagagtactctagacgactatcgacattcggtgcaggaaggagagtgtgcattggacagtatatggccttggataacatgctattggcggcagcaaaagttgtttggggggttgacattcaagcagatggcccgttggatatgagtctcggtggtggttttggcaatggcatctcatcgagcccaaaaccctgtaagatcaatttcaatcctcgtgacgaacaacgaaaggagttgatggagaaaagttgggaagaacacgacaactacctaaagcagttcgagtga

SEQ ID NO: 452 - protein, 562 aa, Muscodor strobelii
  misc_feature: SGI Peptide ID NO. 559718
  misc_feature (34)..(536): Pfam Id: PF00067 Pfam Desc: Cytochrome P450
  misc_feature (34)..(391): Pfam Id: PF00067 Pfam Desc: Cytochrome P450
  misc_feature (412)..(446): Pfam Id: PF00067 Pfam Desc: Cytochrome P450
  misc_feature (8)..(562): NCBI GI: 169603513 Blast Desc: SNOG_04767 [Phaeosphaeria nodorum SN15] gi|111067407|gb|EAT88527.1| SNOG_04767 [Phaeosphaeria nodorum SN15]
  misc_feature (8)..(552): NCBI GI: 67524539 Blast Desc: AN2727.2 [Aspergillus nidulans FGSC A4] gi|40743839|gb|EAA63025.1| AN2727.2 [Aspergillus nidulans FGSC A4] gi|259486362|tpe|CBF84139.1| TPA: cytochrome P450, (Eurofung)
  misc_feature (11)..(562): NCBI GI: 121710950 Blast Desc: Cytochrome P450 oxidoreductase, [Aspergillus clavatus NRRL 1] gi|119401241|gb|EAW11665.1| Cytochrome P450 oxidoreductase, [Aspergillus clavatus NRRL 1]
  misc_feature (4)..(562): NCBI GI: 195971095 Blast Desc: m-hydroxybenzyl alcohol hydroxylase [Aspergillus clavatus]
  misc_feature (2)..(562): NCBI GI: 259479677 Blast Desc: TPA: cytochrome P450, (Eurofung) [Aspergillus nidulans FGSC A4]
  misc_feature (29)..(552): NCBI GI: 255948120 Blast Desc: Pc22g08110 [Penicillium chrysogenum Wisconsin 54-1255] gi|211591844|emb|CAP98099.1| Pc22g08110 [Penicillium chrysogenum Wisconsin 54-1255]
  misc_feature (30)..(559): NCBI GI: 212532697 Blast Desc: O-methylsterigmatocystin oxidoreductase, [Penicillium marneffei ATCC 18224] gi|210071869|gb|EEA25958.1| O-methylsterigmatocystin oxidoreductase, [Penicillium marneffei
  misc_feature (43)..(558): NCBI GI: 255948126 Blast Desc: Pc22g08150 [Penicillium chrysogenum Wisconsin 54-1255] gi|211591847|emb|CAP98103.1| Pc22g08150 [Penicillium chrysogenum Wisconsin 54-1255]
  misc_feature (6)..(533): NCBI GI: 121710948 Blast Desc: Cytochrome P450 oxidoreductase, [Aspergillus clavatus NRRL 1] gi|119401240|gb|EAW11664.1| Cytochrome P450 oxidoreductase, [Aspergillus clavatus NRRL 1]
  misc_feature (6)..(533): NCBI GI: 195971093 Blast Desc: m-cresol methyl hydroxylase [Aspergillus clavatus]
  misc_feature (55)..(550): SWISSPROT Homolog: EC 1.14.14.1 Unspecific monooxygenase
  misc_feature: Useful for introducing or modulating the production of volatile compounds
MMDPSPLLLLILLCIILAAPRKITWSPSRPRNFPPGPPRLPFLGNLHQILRFPKAYTRLAELSRSYGTHGVMGLKLGPTTNVLVINERKAVEALLEKRGAIYSSRPPFLGSEYVHPSAEVHLAMMSYGKKWHRMRKTLTIEFVTRAQIQKRTPLVEAESTQLMMELLREPGNFHNHVLRYHGAIIMASVFGIRGKSMDEDSLMGRFFSIHHLWSEMLEPGSIPPYDIFPFLKYVPNVLLGPWRNWKGYVRYVGRIQRELYSDLLNEVKSRITEGRGPDCLIAKLLCSEEKEAYSVTDLQYIGGVLLEGGSDTTANAFKTFLHAMAAFPQVLKRAQAEVDQVFGDKQMPTGTDAARLPYLMACILEVLRWRPGVAAGIPHATTKDDTYEGYVSGILPLMHINAMMSRLTRILSQFIPAGTTVLMNIWGINHDPEVYTNPEAFEPERFMRYPAGGDISDVKHDKNTEIPKEYSRRLSTFGAGRRVCIGQYMALDNMLLAAAKVVWGVDIQADGPLDMSLGGGFGNGISSSPKPCKINFNPRDEQRKELMEKSWEEHDNYLKQFE

SEQ ID NO: 453 - DNA, 1254 bp, Muscodor strobelii
  misc_feature: SGI EST ID NO. CUFF.1066.0
  misc_feature: Variant of the nucleotide sequence at SEQ ID NO 451
tcgaaacttccgaccgggggtctcgagtgtggtgtctcctatttataaaagctcggtccacgaccgccactcgaaggaacaaatattctacatagccttcttccaagctaccgttcaaaatgatggatccgagtccgctattgttattaattctcttgtgcatcatcctcgcggctcccaggaaaatcacctggtcgccatctcgtcctcggaacttcccaccgggaccgccgaggctgccgttcttaggcaatctacatcaaattctgcggtttccaaaggcatacaccagacttgcagagcttagccgaagctatggaactcatggagttatgggtttaaaactcggcccgactaccaacgttctggtcatcaatgagcggaaggctgttgaagccctcctcgaaaaacgcggggccatttactcctcgcggccgccattcctcgggtcagaatatgtccatccgtcggcagaagtacatctagcaatgatgtcgtatgggaagaaatggcatcgcatgcggaaaactttgacgatagagtttgtaacgagagctcagatccagaagcggacacctctcgtggaggcggagtcgacgcaactcatgatggagctcttacgagaacctgggaacttccataaccatgtgcttagatatcacggtgccataatcatggcttcagtatttgggataagggggaaatctatggacgaagacagtctgatggggcgcttcttttctattcaccacctttggagcgagatgctcgagccaggttctatccccccttatgatatatttcctttcttgaagtacgtaccgaacgtattgctcggcccctggcgtaactggaaggggtacgttcgctacgtcggtaggatacaaagagaactttactcggacttgcttaacgaggtgaagtcccggattaccgagggacggggcccggattgcctcattgctaagttgctttgcagcgaagagaaagaggcgtacagtgttactgatcttcagtatatcggcggtgttcttctagagggcggctctgacacgacggcaaatgctttcaagacttttctccacgctatggcagctttcccccaagtcctaaagcgtgcccaggcagaagtcgaccaggtcttcggggacaagcagatgcccacaggcacagatgctgcgaggctcccttatcttatggcttgtattctcgaggtcctccgctggcggcctggcgtggcagcaggaataccgc

SEQ ID NO: 454 - DNA, 270 bp, Muscodor strobelii
  misc_feature: SGI cDNA ID NO. 559719
  misc_feature: Encodes the peptide sequence at SEQ ID NO 455
atgggcgaagtacccagcgcctttgctacggttaactcgtcagagtatccattagccgactcagtggtccttgacaatgaaagtaccattactatcacgaaccaagccgacaggatccagaactggagacctggcgtaggggacaataagagtcctagtaggaaacacgaccataacctttcccaatacggcatatttgtggccaacaacttcacgcccgtggaggaggagcagatccggcgggagaacgagtgggtcgaggatcgttaa

SEQ ID NO: 455 - protein, 89 aa, Muscodor strobelii
  misc_feature: SGI Peptide ID NO. 559719
MGEVPSAFATVNSSEYPLADSVVLDNESTITITNQADRIQNWRPGVGDNKSPSRKHDHNLSQYGIFVANNFTPVEEEQIRRENEWVEDR

SEQ ID NO: 456 - DNA, 1461 bp, Muscodor strobelii
  misc_feature: SGI cDNA ID NO. 559721
  misc_feature: Encodes the peptide sequence at SEQ ID NO 457
atgggagagctggcagctcacatgaatataccgtacccggtgcactctcatgcgtggtatgcattccaggttggtgttcattacgcatatctttgctaccctaagcatcctctggatattcgcatctacaccggcgttttcacttggattgcggtgcttgtggatgacgaggcgagcaaaaacccggagcaatggcggtcttttacgcatcgtttttacagcggctgcgagcagcccggagtattggctcaagcgtggtctgatctgctgcgacggagctactggtattattctcctatcgcggctaacttcatcgtgtcatcgtccctcagatttgtcaacgcgaatgttttggagggctctgagctgcagacgatgacgcgcacagtagatggcggagcctggccgtattatctccgagacatggacggccttgcagaagcttatgtctggctcacgttcccgcatgtactatgcccggatatttcgagcttcttagaggccataccggatatggataagtacatcgtttttaccaatgatattctatccttctataaagaagagtatgcagtagggaaggatccagtggcgcaggcttggtatgaccacgccatgggctatgtcgctatgcataaatcctcagcacggtatagactcagcgacctcggtcttggcgagactgtgcttttgatggctcagcccaccgaagattcttgtctggtaactgcgggccaaggggcagaggcagattcgtgcagtggtctatggcatgctcaagccccccccacattcacagctactgcagccaacgtaaccagctcagcgtcatcgtcggaaacaacggctgcgaggatcacggatacagcggcggtcgtcggaggagtgattggcggactatttgctttggctctaatggcgggcggtatttttttccgctgccggcgtagtagtaagaaagcggacgatgagaaacgtcagtctggaacgtcttctatggttggcccaataatcggcaatccgatgaagcatgacaagtacccagctgaacgcggtgtattcccgacgacgggtcagagctccagttacccgtccaccccgacgcagatgcaagatcgcttctcgcctcgctcaccggcttggcagtcgtcgccttacgggtactcgcgagacagtatcgacactactacatctgcgcaaagtcatcacgtgtcgtctgaacccgcgccgctgaccagttcgcgcaatctcacagatcggtattccaatggcacggatcattactcatatggctccgagttccaggctgtcgatacctacaggccctacgagggcagtgctagacgtggcagcatcattatctcaacaggccagaccactctcgacacgggtatagataccgatgacaaacgccggacggcctggcccactagagacaagatgcctcgacgagatggttga

SEQ ID NO: 457 - protein, 486 aa, Muscodor strobelii
  misc_feature: SGI Peptide ID NO. 559721
  misc_feature (10)..(227): NCBI GI: 46124133 Blast Desc: FG06444.1 [Gibberella zeae PH-1]
  misc_feature (3)..(227): NCBI GI: 46137763 Blast Desc: FG10397.1 [Gibberella zeae PH-1]
  misc_feature (3)..(227): NCBI GI: 263199514 Blast Desc: longiborneol synthase [Gibberella zeae]
  misc_feature (41)..(223): NCBI GI: 170110152 Blast Desc: [Laccaria bicolor S238N-H82] gi|164638866|gb|EDR03141.1| [Laccaria bicolor S238N-H82]
  misc_feature (39)..(223): NCBI GI: 169851720 Blast Desc: CC1G_03563 [Coprinopsis cinerea okayama7#130] gi|116506403|gb|EAU89298.1| CC1G_03563 [Coprinopsis cinerea okayama7#130]
  misc_feature (38)..(223): NCBI GI: 242216337 Blast Desc: [Postia placenta Mad-698-R] gi|220726921|gb|EED80856.1| [Postia placenta Mad-698-R]
  misc_feature (38)..(227): NCBI GI: 242216337 Blast Desc: [Postia placenta Mad-698-R] gi|220726921|gb|EED80856.1| [Postia placenta Mad-698-R]
  misc_feature (93)..(223): NCBI GI: 238578540 Blast Desc: MPER_12192 [Moniliophthora perniciosa FA553] gi|215450320|gb|EEB89683.1| MPER_12192 [Moniliophthora perniciosa FA553]
  misc_feature (25)..(223): NCBI GI: 242218378 Blast Desc: [Postia placenta Mad-698-R] gi|220725848|gb|EED79818.1| [Postia placenta Mad-698-R]
  misc_feature (38)..(231): NCBI GI: 242216687 Blast Desc: [Postia placenta Mad-698-R] gi|220726694|gb|EED80635.1| [Postia placenta Mad-698-R]
MGELAAHMNIPYPVHSHAWYAFQVGVHYAYLCYPKHPLDIRIYTGVFTWIAVLVDDEASKNPEQWRSFTHRFYSGCEQPGVLAQAWSDLLRRSYWYYSPIAANFIVSSSLRFVNANVLEGSELQTMTRTVDGGAWPYYLRDMDGLAEAYVWLTFPHVLCPDISSFLEAIPDMDKYIVFTNDILSFYKEEYAVGKDPVAQAWYDHAMGYVAMHKSSARYRLSDLGLGETVLLMAQPTEDSCLVTAGQGAEADSCSGLWHAQAPPTFTATAANVTSSASSSETTAARITDTAAVVGGVIGGLFALALMAGGIFFRCRRSSKKADDEKRQSGTSSMVGPIIGNPMKHDKYPAERGVFPTTGQSSSYPSTPTQMQDRFSPRSPAWQSSPYGYSRDSIDTTTSAQSHHVSSEPAPLTSSRNLTDRYSNGTDHYSYGSEFQAVDTYRPYEGSARRGSIIISTGQTTLDTGIDTDDKRRTAWPTRDKMPRRDG

SEQ ID NO: 458 - DNA, 669 bp, Muscodor strobelii
  misc_feature: SGI cDNA ID NO. 559722
  misc_feature: Encodes the peptide sequence at SEQ ID NO 459
atgccatcaaaaatatgtccaaatgagctatcgttcagcacgcccgacacctgggcagacatttatggaccaagccataagggcgtggctcaaatcctaaaaggcgagttctacgacgtcttcggcgccgggtttacggttcagtcactggggactgagcgcgatcctgtcttagcgcagcagaagcgatcactcttcacgaatgccctggacgctcgtgcacttgcctcgcagaagcccgtcttgcagaggaatatcgacgtctttgttgagaaacttggcgtcaatcgtgatgttgacatggctaaatggtttatctaccttgggtttgatatccttggtgagatggcatttggcgattcatttggatgtgtcgatcgtgaagcatcacatccctggcttgacgccatgctgggcggtctacgatgggtcactattggggataacctgcgtagatatccctttgccgttcagattgtccagtatctcccagccagctggaaatcgagtttcctggaaattatggcaaaatttgctcgagacaagacagctgcccgtctacaggttcaaggcatacgaaacgacttcctcgatcacgtcgtccagaaagtccgagacggtgtcgtctcccaggaggaaatggaagcccactcgtggaatatggcgtaa

SEQ ID NO: 459 - protein, 222 aa, Muscodor strobelii
  misc_feature: SGI Peptide ID NO. 559722
  misc_feature (4)..(218): NCBI GI: 255931847 Blast Desc: Pc12g06380 [Penicillium chrysogenum Wisconsin 54-1255] gi|211582099|emb|CAP80265.1| Pc12g06380 [Penicillium chrysogenum Wisconsin 54-1255]
  misc_feature (4)..(218): NCBI GI: 238492291 Blast Desc: cytochrome P450, [Aspergillus flavus NRRL3357] gi|220695876|gb|EED52218.1| cytochrome P450, [Aspergillus flavus NRRL3357]
  misc_feature (4)..(217): NCBI GI: 188596513 Blast Desc: BCL4p [Botryotinia fuckeliana]
  misc_feature (4)..(184): NCBI GI: 238839258 Blast Desc: benzoate 4-monooxygenase cytochrome P450 [Microsporum canis CBS 113480]
  misc_feature (4)..(218): NCBI GI: 169782646 Blast Desc: [Aspergillus oryzae RIB40] gi|83774529|dbj|BAE64652.1| protein product [Aspergillus oryzae]
  misc_feature (4)..(218): NCBI GI: 259485752 Blast Desc: TPA: cytochrome P450, (Eurofung) [Aspergillus nidulans FGSC A4]
  misc_feature (4)..(218): NCBI GI: 121712479 Blast Desc: benzoate 4-monooxygenase cytochrome P450 [Aspergillus clavatus NRRL 1] gi|119402003|gb|EAW12425.1| benzoate 4-monooxygenase cytochrome P450 [Aspergillus clavatus NRRL 1]
  misc_feature (4)..(218): NCBI GI: 67525647 Blast Desc: AN3281.2 [Aspergillus nidulans FGSC A4] gi|40744069|gb|EAA63249.1| AN3281.2 [Aspergillus nidulans FGSC A4]
  misc_feature (4)..(218): NCBI GI: 259485758 Blast Desc: TPA: cytochrome P450, (Eurofung) [Aspergillus nidulans FGSC A4]
  misc_feature (4)..(218): NCBI GI: 121712467 Blast Desc: benzoate 4-monooxygenase cytochrome P450 [Aspergillus clavatus NRRL 1] gi|119401997|gb|EAW12419.1| benzoate 4-monooxygenase cytochrome P450 [Aspergillus clavatus NRRL 1]
  misc_feature (4)..(213): SWISSPROT Homolog: EC 1.14.13.12 Benzoate 4-monooxygenase
MPSKICPNELSFSTPDTWADIYGPSHKGVAQILKGEFYDVFGAGFTVQSLGTERDPVLAQQKRSLFTNALDARALASQKPVLQRNIDVFVEKLGVNRDVDMAKWFIYLGFDILGEMAFGDSFGCVDREASHPWLDAMLGGLRWVTIGDNLRRYPFAVQIVQYLPASWKSSFLEIMAKFARDKTAARLQVQGIRNDFLDHVVQKVRDGVVSQEEMEAHSWNMA

SEQ ID NO: 460 - DNA, 513 bp, Muscodor strobelii
  misc_feature: SGI cDNA ID NO. 559723
  misc_feature: Encodes the peptide sequence at SEQ ID NO 461
atggacctcttgtatgagacggtcccagccttcgaagacatatggattgaatgcttgggagatttaggccgatataggatggcaatagaggatgaagatataagagatcgagaagtttggacttccgtctcgagacaccggcttgtcctcgaatatgaaaaagtcaaagcacctcgttatgcagccgccgacgagtacttttctacatggtacggaatcaagcagagagttcagtatgttcccgggctgggaaagttaggatcgggagacgtcgtttttcaaggatgctttcacgatctcccctggggactgcagacccatatctatgcgccgttcaacgtcgaacttcgaaataggtattgcattgccggaaaccagtccggcatcagaccctctgaacggcaggagatcggactcgcagcgctcggcgcgcccaaggagggtctttacctccgggaggacatcgagatacaatgcaacctcgccatgaccggtccatcaaggcataaatga

SEQ ID NO: 461 - protein, 170 aa, Muscodor strobelii
  misc_feature: SGI Peptide ID NO. 559723
  misc_feature (43)..(165): NCBI GI: 256726757 Blast Desc: NECHADRAFT_57875 [Nectria haematococca mpVI 77-13-4]
  misc_feature (43)..(165): NCBI GI: 46122727 Blast Desc: FG05741.1 [Gibberella zeae PH-1]
  misc_feature (43)..(165): NCBI GI: 39942710 Blast Desc: MGG_03435 [Magnaporthe grisea 70-15] gi|145010021|gb|EDJ94677.1| MGG_03435 [Magnaporthe grisea 70-15]
  misc_feature (43)..(163): NCBI GI: 171691386 Blast Desc: protein product [Podospora anserina] gi|170945641|emb|CAP71754.1| protein product [Podospora anserina]
  misc_feature (43)..(160): NCBI GI: 164429382 Blast Desc: NCU04506 [Neurospora crassa OR74A] gi|157073459|gb|EAA27681.2| conserved [Neurospora crassa OR74A]
  misc_feature (48)..(163): NCBI GI: 169609863 Blast Desc: SNOG_08023 [Phaeosphaeria nodorum SN15] gi|160701932|gb|EAT84299.2| SNOG_08023 [Phaeosphaeria nodorum SN15]
  misc_feature (48)..(163): NCBI GI: 189205194 Blast Desc: conserved [Pyrenophora tritici-repentis Pt-1C-BFP] gi|187986031|gb|EDU51519.1| conserved [Pyrenophora tritici-repentis Pt-1C-BFP]
  misc_feature (43)..(163): NCBI GI: 255942253 Blast Desc: Pc18g00480 [Penicillium chrysogenum Wisconsin 54-1255] gi|211586628|emb|CAP94272.1| Pc18g00480 [Penicillium chrysogenum Wisconsin 54-1255]
  misc_feature (43)..(165): NCBI GI: 212544486 Blast Desc: conserved [Penicillium marneffei ATCC 18224] gi|210065366|gb|EEA19460.1| conserved [Penicillium marneffei ATCC 18224]
  misc_feature (43)..(163): NCBI GI: 67538458 Blast Desc: AN5399.2 [Aspergillus nidulans FGSC A4] gi|40743369|gb|EAA62559.1| AN5399.2 [Aspergillus nidulans FGSC A4] gi|259485156|tpe|CBF81973.1| TPA: conserved [Aspergillus FGSC
MDLLYETVPAFEDIWIECLGDLGRYRMAIEDEDIRDREVWTSVSRHRLVLEYEKVKAPRYAAADEYFSTWYGIKQRVQYVPGLGKLGSGDVVFQGCFHDLPWGLQTHIYAPFNVELRNRYCIAGNQSGIRPSERQEIGLAALGAPKEGLYLREDIEIQCNLAMTGPSRHK

SEQ ID NO: 462 - DNA, 2820 bp, Muscodor strobelii
  misc_feature: SGI EST ID NO. CUFF.1127.0
  misc_feature: Variant of the nucleotide sequence at SEQ ID NO 460
cttttgcattttttgaaaaggggcccacagcagcaaggtaaactttggaatccagagcaagatgccgcgccacctcgcactgccttgtcacctcgacaggctaagagtcaatctcaaacaaaaaaagaagtagatcaagatgttttgcggcttattaaacaacctgaaactcggcgcattagccaggatcaattaatggctgaggttaaaggcatatacgccggtctcgtcatagtcgagtccaaatgcatagaagttgataatgctcagtccccaaacagcgatgctaagttgaataatgagcagtggcaggctcttatagcattgcatcgtaccttgcttcacgaacatcatgacttctttttagcatcgcagcatccgtctgcgagtcaagctttgagacgattggcatttaaatacgccatgccggcgaggatgtggcgtcacggaattcacagctttcttgaattgctgcgtcatcgcttatctacatctctagaacacatgctcacattcatctacctggcatatttcatgatggacctcttgtatgagacggtcccagccttcgaagacatatggattgaatgcttgggagatttaggccgatataggatggcaatagaggatgaagatataagagatcgagaagtttggacttccgtctcgagacaccggcttgtcctcgaatatgaaaaagtcaaagcacctcgttatgcagccgccgacgagtacttttctacatggtacggaatcaagcagagagttcagtatgttcccgggctgggaaagttaggatcgggagacgtcgtttttcaaggatgctttcacgatctcccctggggactgcagacccatatctatgcgccgttcaacgtcgaacttcgaaataggtattgcattgccggaaaccagtccggcatcagaccctctgaacggcaggagatcggactcgcagcgctcggcgcgcccaaggagggtctttacctccgggaggacatcgagatacaatgcaacctcgccatgaccggtccatcaaggcataaatgaagacggcaagtaagaagatggtggagagaatcatcaaaaaggcggagctcctagacgccggcacctcgcagaccatgggagagaaccataatattgcactgttaccccatccccgcaacgacatctatacgacaaacgtgaccccgggtgtaaaatcgctactgcaatcgccgctaagtctacatcggacacctatacctctgcccccaccgcatccgatcatacgatctgtgtctccaactagcggctggtcgaacaacccgctacaagccaggggcatagcatagatacccatcgtcatctgcagtcaggggccgataacgaggtcggctagggattctgtctgcccagaatgtgcagaactgagcgcaagaggcaatactcctagtccctggtcgccgtcgacgaggaccgttgaactacccgattccggaactacctggcaacgctctggagatcaggaacaagctcaatcatacttggataggcaattggcgtcgttagtgtcggaggccaccgatcaatgcttacagcctatcgaactggacggtaggcaggaactccccgttgaacttgctgcgcggaacgagatgaagaagaacaaagatccgtcttattaatatctaatttggtgcaatacaaaagaggtcgaaatccttcaatataggtagtcgctaggtcggtaatcaagtacatacatatgaagagtaatttgttctgcaggcttttaaaaacgtcaacgagtctttacaaacaaactataaaacaaccagaaaagagcgcataatatacagaccgagaacgtaggtccaaatcgagtttaatacttatagacgacaatcgaatatatagtcttgatatctaaatatgttatagctgcaactgtctagttatttcataggacttttacgaactaattacacacgcaccatggtaatcaaagttcgaattgttcataagttgaatctttaaggaatagaccatccaggtcggccgaatctatttagagctgctgcagagtggccacttctaactgctcgtggcccagggaaaaggacatggtgctgcttcccggcaccaagaacatccaagcgaaagattggctaccatacaaaagaccggctgagctgaaaagggcctgcgagcatgtcaccgttatgcgattgctcttgtcgccgtcggtccactgccaagtcacacgaccttgttcgaaatatgtcccgccggctatctcctgttgccacagcacctagacatgcactcgatccctctgcgatatgtcgtcacccagctcctgtcgactgaggagaaaggcgaccaattctcgatgatcgacgtcgtgtgtctagcgccgaataggaaagactccctcttgtcgctttttcgtcaaatgccaataacaaccttggtcgtagcattcggaccagatttcccgacagagtgggttccactctataattcctccagccctgatgctgttcgtgaagccagacgcgccaactacctcagtgtcctccacaaccccgatagtatccattccctcctgcgggacactcagacgtatcagaatgaactgtataagccgaatagttccatagctgcaccgggcctagtacatactgtaccgtactgtgggaggcatttagactcttagagccgttttgttgttaccgatacagtagcggcattggtgcactttccgccaccgtgatattatatatagtcctagagtgactggatgcttatatagtattaccacggcgtgtcgtg

SEQ ID NO: 463 - DNA, 2289 bp, Muscodor strobelii
  misc_feature: SGI cDNA ID NO. 559724
  misc_feature: Encodes the peptide sequence at SEQ ID NO 464
atggatccgcaggaaaatgaaaatgatctccagtcctcgcttcgtaacattgcctcaaaacaagcaaagactacggtcataacgcagctgttgaagattcaatcggcccacatagaacaacaaaaatctctcgagtttgtgcaacagctccaatgcctgaaattcagcaacccgcgcaagcgtcggcgagacgaagatggtaacaggcgaccttacctcctccgtcgtcagcttgatgcgttcaaaagaggagattacgtagcgctgtcttacacctggagcccatctgagtgggaggtcgactgccagacgggtgggtacgaagttgagcgaaagaacaccaaagactttgagccttctccagtaagagacagcatcttcaatcgtatcaggaagtacatgaaatatacagacacaccatatctctggattgatcagcatgccatcgaacaaagaaacgggaaagaaaaggagataggcatgagcgcgatggacctagtgtatagtcgcagtgaacatcctgttgctatgctcactcgacccgtgggttcgaagagcgagttacagctccttattcgtatactggaagggtgtctcgttactccggacgacatgggataccgcctgtccgacgaaacgacgatagatgaagccgctgctgctatgggcctcttggaagaaattacctccgacacttggttcacgaggggttggacatttcaagagaactacagggccggggtcagaatgacgcttctcataccccatccctttcttttacgcaacacgaagccgcatgagctctttgagtccattgacaaagagctttgcattaatgcggtggacttctacaatgaagcaaccaaggtctgcctggcttaccgggattgctgtccgttttcatccgacgcggtcgctcagattctgaacagagtcggcaaatatacaacattggctgagaatggagatctctcggcacggaaatctatgacaccaagaattatcgccgatctgttggcccgagacctcaaggatacgtgggactttctgcctcttatcgcaaactgctgccagtactctgtttatttgaatagcgaattcctcagcactcgtggattcagtctaagcctgtcattgctcgcgctctgcttggtcaacggggagatactgtctaatcagccccagtctaaggatatggttgaatcatcgagacgcatgtccattgggggctttctagactctcattcctttgataggctacaatcgcccgatacgaccaacgttctgacctttaacaaaggctgcagatttgtggatgtcagactcacgaaggagggcattcggacaaacggccacctttggagatccgaccgtctcataccagcaacgagcttcactcaggggcgttattggatacaaaaagatcctagacagcccctgggtcctagtgaaatatggaggctaagacagcttgttgatggactttacactattaatgagccagagcttggtcagagactaagagaattcgtcgataagcacgatcagacgaagaatctgcctcgtcggtctaaatggcagccgatgtcatgtttccagcactggcagatacgaatggcttgtttgattgcaagagcaatccataagggcaaagccttatgcacagcccgcttagttggccgtcaacaatcaggatttgcgatcttcattgcagaacgctttcaagaatgtcttgtggatctctctgatgatgatactggcacgacagtctcgagttcccagtctgagacagacgcgactagtgaggccatctcaaattcgtggccagaaattcaagaaatcgcggacaacgaggagggcgaggagggcgaggaaggtgaagaaaacaaggaaggtgaggaaagtgaggaaagtgaggaaagtgaggaaagtgaggaaagtgaggaaagtgaggaaagtgaggaaagtgaggaaagtgaggaaagtgaggaaagtgaggaaagtgaggaaagtgaggaaagtgaggagagcgaggagagcgaggagagtgatatcaatcttccaacgtcttttttcacgtcattccaatctcggcaggaatcggacattcatgacttcaacagcatcgataaacacatatccatagaggtggaacacgactattcggcagagcaccacgagactgtactcagactcttcctcaaaggctggattcatgcactttgttttgtttctgagcgctctggcagggatgttgtctttccttggccctccgccttgcagtcctga

SEQ ID NO: 464 - protein, 762 aa, Muscodor strobelii
  misc_feature: SGI Peptide ID NO. 559724
  misc_feature (86)..(242): Pfam Id: PF06985 Pfam Desc: Heterokaryon incompatibility protein (HET)
  misc_feature (86)..(172): Pfam Id: PF06985 Pfam Desc: Heterokaryon incompatibility protein (HET)
  misc_feature (226)..(242): Pfam Id: PF06985 Pfam Desc: Heterokaryon incompatibility protein (HET)
  misc_feature (23)..(462): NCBI GI: 256722257 Blast Desc: NECHADRAFT_86861 [Nectria haematococca mpVI 77-13-4]
  misc_feature (27)..(491): NCBI GI: 46113901 Blast Desc: FG02946.1 [Gibberella zeae PH-1]
  misc_feature (7)..(460): NCBI GI: 238507972 Blast Desc: conserved [Aspergillus flavus NRRL3357] gi|220688706|gb|EED45058.1| conserved [Aspergillus flavus NRRL3357]
  misc_feature (2)..(463): NCBI GI: 28950026 Blast Desc: [Neurospora crassa]
  misc_feature (272)..(460): NCBI GI: 169784806 Blast Desc: [Aspergillus oryzae RIB40] gi|83775611|dbj|BAE65731.1| protein product [Aspergillus oryzae]
  misc_feature (127)..(470): NCBI GI: 189197077 Blast Desc: conserved [Pyrenophora tritici-repentis Pt-1C-BFP] gi|187980824|gb|EDU47450.1| conserved [Pyrenophora tritici-repentis Pt-1C-BFP]
  misc_feature (85)..(470): NCBI GI: 115387685 Blast Desc: [Aspergillus terreus NIH2624] gi|114195432|gb|EAU37132.1| [Aspergillus terreus NIH2624]
  misc_feature (84)..(469): NCBI GI: 225682264 Blast Desc: [Paracoccidioides brasiliensis Pb03]
  misc_feature (84)..(469): NCBI GI: 226289638 Blast Desc: [Paracoccidioides brasiliensis Pb18]
  misc_feature (692)..(761): NCBI GI: 256722257 Blast Desc: NECHADRAFT_86861 [Nectria haematococca mpVI 77-13-4]
MDPQENENDLQSSLRNIASKQAKTTVITQLLKIQSAHIEQQKSLEFVQQLQCLKFSNPRKRRRDEDGNRRPYLLRRQLDAFKRGDYVALSYTWSPSEWEVDCQTGGYEVERKNTKDFEPSPVRDSIFNRIRKYMKYTDTPYLWIDQHAIEQRNGKEKEIGMSAMDLVYSRSEHPVAMLTRPVGSKSELQLLIRILEGCLVTPDDMGYRLSDETTIDEAAAAMGLLEEITSDTWFTRGWTFQENYRAGVRMTLLIPHPFLLRNTKPHELFESIDKELCINAVDFYNEATKVCLAYRDCCPFSSDAVAQILNRVGKYTTLAENGDLSARKSMTPRIIADLLARDLKDTWDFLPLIANCCQYSVYLNSEFLSTRGFSLSLSLLALCLVNGEILSNQPQSKDMVESSRRMSIGGFLDSHSFDRLQSPDTTNVLTFNKGCRFVDVRLTKEGIRTNGHLWRSDRLIPATSFTQGRYWIQKDPRQPLGPSEIWRLRQLVDGLYTINEPELGQRLREFVDKHDQTKNLPRRSKWQPMSCFQHWQIRMACLIARAIHKGKALCTARLVGRQQSGFAIFIAERFQECLVDLSDDDTGTTVSSSQSETDATSEAISNSWPEIQEIADNEEGEEGEEGEENKEGEESEESEESEESEESEESEESEESEESEESEESEESEESEESEESEESEESDINLPTSFFTSFQSRQESDIHDFNSIDKHISIEVEHDYSAEHHETVLRLFLKGWIHALCFVSERSGRDVVFPWPSALQS

SEQ ID NO: 465 - DNA, 2153 bp, Muscodor strobelii
  misc_feature: SGI EST ID NO. CUFF.1135.0
  misc_feature: Variant of the nucleotide sequence at SEQ ID NO 463
ctgccagacgggtgggtacgaagttgagcgaaagaacaccaaagactttgagccttctccagtaagagacagcatcttcaatcgtatcaggaagtacatgaaatatacagacacaccatatctctggattgatcagcatgccatcgaacaaagaaacgggaaagaaaaggagataggcatgagcgcgatggacctagtgtatagtcgcagtgaacatcctgttgctatgctcactcgacccgtgggttcgaagagcgagttacagctccttattcgtatactggaagggtgtctcgttactccggacgacatgggataccgcctgtccgacgaaacgacgatagatgaagccgctgctgctatgggcctcttggaagaaattacctccgacacttggttcacgaggggttggacatttcaagagaactacagggccggggtcagaatgacgcttctcataccccatccctttcttttacgcaacacgaagccgcatgagctctttgagtccattgacaaagagctttgcattaatgcggtggacttctacaatgaagcaaccaaggtctgcctggcttaccgggattgctgtccgttttcatccgacgcggtcgctcagattctgaacagagtcggcaaatatacaacattggctgagaatggagatctctcggcacggaaatctatgacaccaagaattatcgccgatctgttggcccgagacctcaaggatacgtgggactttctgcctcttatcgcaaactgctgccagtactctgtttatttgaatagcgaattcctcagcactcgtggattcagtctaagcctgtcattgctcgcgctctgcttggtcaacggggagatactgtctaatcagccccagtctaaggatatggttgaatcatcgagacgcatgtccattgggggctttctagactctcattcctttgataggctacaatcgcccgatacgaccaacgttctgacctttaacaaaggctgcagatttgtggatgtcagactcacgaaggagggcattcggacaaacggccacctttggagatccgaccgtctcataccagcaacgagcttcactcaggggcgttattggatacaaaaagatcctagacagcccctgggtcctagtgaaatatggaggctaagacagcttgttgatggactttacactattaatgagccagagcttggtcagagactaagagaattcgtcgataagcacgatcagacgaagaatctgcctcgtcggtctaaatggcagccgatgtcatgtttccagcactggcagatacgaatggcttgtttgattgcaagagcaatccataagggcaaagccttatgcacagcccgcttagttggccgtcaacaatcaggatttgcgatcttcattgcagaacgctttcaagaatgtcttgtggatctctctgatgatgatactggcacgacagtctcgagttcccagtctgagacagacgcgactagtgaggccatctcaaattcgtggccagaaattcaagaaatcgcggacaacgaggagggcgaggagggcgaggaaggtgaagaaaacaaggaaggtgaggaaagtgaggaaagtgaggaaagtgaggaaagtgaggaaagtgaggaaagtgaggaaagtgaggaaagtgaggaaagtgaggaaagtgaggaaagtgaggaaagtgaggaaagtgaggaaagtgaggagagcgaggagagcgaggagagtgatatcaatcttccaacgtcttttttcacgtcattccaatctcggcaggaatcggacattcatgacttcaacagcatcgataaacacatatccatagaggtggaacacgactattcggcagagcaccacgagactgtactcagactcttcctcaaaggctggattcatgcactttgttttgtttctgagcgctctggcagggatgttgtctttccttggccctccgccttgcagtcctgacaaatcgcgactgctcttctccgtacacactttttgacgagtcctaaattgaagggtactgaagtttggaataacgatcaatcttatgagattatctcggtgtctcattagatgtagaatctcatatatctcctcattcactcaattatctcaatcactacgtcgg

SEQ ID NO: 466 - DNA, 2301 bp, Muscodor strobelii
  misc_feature: SGI cDNA ID NO. 559725
  misc_feature: Encodes the peptide sequence at SEQ ID NO 467
atggctctctcacaacgagcgaaggatatcatcttcgagctcccactcaaagacgcacttgatcacattcgacacagattacgcgactccgacaatacgaatctgcgccaggaagacgtcgccagtcttttactagctttagtcggctcttcagccgcgctcaatcttccttctcccgacggaagcggtgatgtggctactaaactattcagcatatacaaacatgttcgagaaggctcgatagagatagacaattttggttgcctcgtccgccacgtcgtgtccgaatcctccgacatcgacatctgggaagatgttttcaacatcatcggtaacctcagcagcctcactcctgccccgtccagcatcgccccgactttcaaagggacgcccgtcagatctagctcgagtcgacttgccgatggcgaaacgcgcgacattgttgaaagggagctcttttttgaaatcagggactgtacctttcgcaacgtagggggattctgcgacaagttttttaataatgagagttggcacaaaagacaagacgagatgctggagggtatgacggcagagcacgatggaaagaggtggaagtcattcccgtccactcctaccgaaccgctagtctgggactggcttcgttcgctggaagaccgcgccttaaccggtgcaccgcacaagctccacaccaccaagacggcccatcaatttaaggaacgcaagggccagatggatctgtttttccagacgcctgcgccagaaccgaacgatatattcgagtacaaacacattcttgtagtgggcgaacaaaagtcgtcctatgacacgggccgcttcaaggccgacttcctccagctcgcacgtctcgtacggtgcgtcttcatcgaccaaccgacccgccgattcgtccacgccttcaccctgtgcgcttccacgatggagctgtgggtctttgaccgatctggagcatacagctcggggccgtttgatattcacgacaaccccgacacattcgcgcgcgctctcgtcggctacgccaccatggacgacgatgccatgggcctggacatgttcatcgagcgcgaggacaagcatcactatgtcaccttgaatgacgtcgacaaagagacagcgggcaaggatagtcggattaagctcgtgaagccaatcgtgaggcagaaggccatcgtctgccgtgggactacgtgttacgagacccaagatggcggggttgccaagttctcatgggcgtcggacaagcgcaagctggaggtggaacagctgaggctggcccaggatcgaggcgtcaagggggtagcgagggtcgtggcgcaccgtcagatcactaccatcgccgagctgaggagaggcttggagtttggtgagcgtcacaagttccgaaatgaagaagtccacttcgaagatccgtcgtcagtcgtagccagagatacgtcaggccacaagcggaagtcgtccgatcaccagtcccatacgtcaggatccaagaaacggcggtcgaacagccagcagtcggaactggtccgaaaacagagtggcgaactagcaaccggcatgggcaagcccagcctatacagtgccggcgaggacaagtgggagaataggatttattcctgcctcgtcgtatcgccggccggccgggtggtcagcgacttccggaccgtcagagaactgctcgaggcgatacgggatgcaatcagggcacaccaatctctatacgagacaggcaacatactccaccgcgacatctcgtcaaataacatcatcattacagaccccgagtcagcggacggcttcaagggcatgctcatcgaccttgacctggccaaggtaagagacagcggcccgagcggagcgcggcaccagaccggaacgatgcagttcatggcggtggaggtgctgcgcaagacggatcacacctaccgccacgatctcgagtcctttttctacgtattgctctggatgtgcgcgcgccagtcgtggagtaatgggtttgctcatggagagaggccacctaaggaaagcgtgctccggaggtgggagattggtagttttaaagatattgcccggaacaagataggggatatgaccgtggacggacttgaaggtattatgggcgagtttccaaaatcgctggatagtgtgaagccgctctgtttgaagctgagaacaggtctatttggagatagtgccaggctggtgcttggaacgcctacaggagatccggatcacctctatacacttatgatatcagcattcaatgaggctgtcggcgatttgtag

SEQ ID NO: 467 - protein, 766 aa, Muscodor strobelii
  misc_feature: SGI Peptide ID NO. 559725
  misc_feature (3)..(766): NCBI GI: 119180178 Blast Desc: CIMG_08748 [Coccidioides immitis RS]
  misc_feature (2)..(764): NCBI GI: 154282547 Blast Desc: [Ajellomyces capsulatus NAm1] gi|150410249|gb|EDN05637.1| [Ajellomyces capsulatus NAm1]
  misc_feature (3)..(764): NCBI GI: 226277531 Blast Desc: conserved [Paracoccidioides brasiliensis Pb01]
  misc_feature (3)..(764): NCBI GI: 154280963 Blast Desc: [Ajellomyces capsulatus NAm1] gi|150411473|gb|EDN06861.1| [Ajellomyces capsulatus NAm1]
  misc_feature (2)..(764): NCBI GI: 239609518 Blast Desc: serine/threonine-protein kinase Sgk2 [Ajellomyces dermatitidis ER-3]
  misc_feature (2)..(764): NCBI GI: 261196588 Blast Desc: serine/threonine-protein kinase Sgk2 [Ajellomyces dermatitidis SLH14081] gi|239595942|gb|EEQ78523.1| serine/threonine-protein kinase Sgk2 [Ajellomyces dermatitidis
  misc_feature (2)..(766): NCBI GI: 154285276 Blast Desc: [Ajellomyces capsulatus NAm1] gi|150407074|gb|EDN02615.1| [Ajellomyces capsulatus NAm1]
  misc_feature (2)..(763): NCBI GI: 154283407 Blast Desc: [Ajellomyces capsulatus NAm1] gi|150410679|gb|EDN06067.1| [Ajellomyces capsulatus NAm1]
  misc_feature (8)..(764): NCBI GI: 154282847 Blast Desc: [Ajellomyces capsulatus NAm1] gi|150410399|gb|EDN05787.1| [Ajellomyces capsulatus NAm1]
  misc_feature (10)..(764): NCBI GI: 261201093 Blast Desc: serine/threonine-protein kinase Sgk2 [Ajellomyces dermatitidis SLH14081] gi|239594019|gb|EEQ76600.1| serine/threonine-protein kinase Sgk2 [Ajellomyces dermatitidis
MALSQRAKDIIFELPLKDALDHIRHRLRDSDNTNLRQEDVASLLLALVGSSAALNLPSPDGSGDVATKLFSIYKHVREGSIEIDNFGCLVRHVVSESSDIDIWEDVFNIIGNLSSLTPAPSSIAPTFKGTPVRSSSSRLADGETRDIVERELFFEIRDCTFRNVGGFCDKFFNNESWHKRQDEMLEGMTAEHDGKRWKSFPSTPTEPLVWDWLRSLEDRALTGAPHKLHTTKTAHQFKERKGQMDLFFQTPAPEPNDIFEYKHILVVGEQKSSYDTGRFKADFLQLARLVRCVFIDQPTRRFVHAFTLCASTMELWVFDRSGAYSSGPFDIHDNPDTFARALVGYATMDDDAMGLDMFIEREDKHHYVTLNDVDKETAGKDSRIKLVKPIVRQKAIVCRGTTCYETQDGGVAKFSWASDKRKLEVEQLRLAQDRGVKGVARVVAHRQITTIAELRRGLEFGERHKFRNEEVHFEDPSSVVARDTSGHKRKSSDHQSHTSGSKKRRSNSQQSELVRKQSGELATGMGKPSLYSAGEDKWENRIYSCLVVSPAGRVVSDFRTVRELLEAIRDAIRAHQSLYETGNILHRDISSNNIIITDPESADGFKGMLIDLDLAKVRDSGPSGARHQTGTMQFMAVEVLRKTDHTYRHDLESFFYVLLWMCARQSWSNGFAHGERPPKESVLRRWEIGSFKDIARNKIGDMTVDGLEGIMGEFPKSLDSVKPLCLKLRTGLFGDSARLVLGTPTGDPDHLYTLMISAFNEAVGDL

SEQ ID NO: 468 - DNA, 823 bp, Muscodor strobelii
  misc_feature: SGI cDNA ID NO. 559726
  misc_feature: Encodes the peptide sequence at SEQ ID NO 469
atggctctctcacaacgagcgaaggatatcatcttcgagctcccactcaaagacgcacttgatcacattcgacacagattacgcgactccgacaatacgaatctgcgccaggaagacgtcgccagtcttttactagctttagtcggctcttcagccgcgctcaatcttccttctcccgacggaagcggtgatgtggctactaaactattcagcatatacaaacatgttcgagaaggctcgatagagatagacaattttggttgcctcgtccgccacgtcgtgtccgaatcctccgacatcgacatctgggaagatgttttcaacatcatcggtaacctcagcagcctcactcctgccccgtccagcatcgccccgactttcaaagggacgcccgtcagatctagctcgagtcgacttgccgatggcgaaacgcgcgacattgttgaaagggagctcttttttgaaatcagggactgtacctttcgcaacgtagggggattctgcgacaagttttttaataatgagagttggcacaaaagacaagacgagatgctggagggtatgacggcagagcacgatggaaagaggtggaagtcattcccgtccactcctaccgaaccgctagtctgggactggcttcgttcgctggaagaccgcgccttaaccggtgcaccgcacaagctccacaccaccaagacggcccatcaatttaaggaacgcaagggccagatggatctgtttttccagacgcctgcgccagaaccgaacgatatattcgagtacaaacacattcttgtagtgggcgaacaaaagtcgtcctatg

SEQ ID NO: 469 - protein, 274 aa, Muscodor strobelii
  misc_feature: SGI Peptide ID NO. 559726
  misc_feature (3)..(271): NCBI GI: 119180178 Blast Desc: CIMG_08748 [Coccidioides immitis RS]
  misc_feature (2)..(273): NCBI GI: 240106704 Blast Desc: CPC735_014890 [Coccidioides posadasii C735 delta SOWgp]
  misc_feature (3)..(271): NCBI GI: 154280963 Blast Desc: [Ajellomyces capsulatus NAm1] gi|150411473|gb|EDN06861.1| [Ajellomyces capsulatus NAm1]
  misc_feature (3)..(273): NCBI GI: 226277531 Blast Desc: conserved [Paracoccidioides brasiliensis Pb01]
  misc_feature (2)..(271): NCBI GI: 261196588 Blast Desc: serine/threonine-protein kinase Sgk2 [Ajellomyces dermatitidis SLH14081] gi|239595942|gb|EEQ78523.1| serine/threonine-protein kinase Sgk2 [Ajellomyces dermatitidis
  misc_feature (2)..(271): NCBI GI: 239609518 Blast Desc: serine/threonine-protein kinase Sgk2 [Ajellomyces dermatitidis ER-3]
  misc_feature (10)..(273): NCBI GI: 261201093 Blast Desc: serine/threonine-protein kinase Sgk2 [Ajellomyces dermatitidis SLH14081] gi|239594019|gb|EEQ76600.1| serine/threonine-protein kinase Sgk2 [Ajellomyces dermatitidis
  misc_feature (10)..(273): NCBI GI: 239607107 Blast Desc: serine/threonine-protein kinase Sgk2 [Ajellomyces dermatitidis ER-3]
  misc_feature (3)..(271): NCBI GI: 261206026 Blast Desc: serine/threonine-protein kinase Sgk2 [Ajellomyces dermatitidis SLH14081] gi|239592809|gb|EEQ75390.1| serine/threonine-protein kinase Sgk2 [Ajellomyces dermatitidis
  misc_feature (3)..(273): NCBI GI: 225563071 Blast Desc: conserved [Ajellomyces capsulatus G186AR]
MALSQRAKDIIFELPLKDALDHIRHRLRDSDNTNLRQEDVASLLLALVGSSAALNLPSPDGSGDVATKLFSIYKHVREGSIEIDNFGCLVRHVVSESSDIDIWEDVFNIIGNLSSLTPAPSSIAPTFKGTPVRSSSSRLADGETRDIVERELFFEIRDCTFRNVGGFCDKFFNNESWHKRQDEMLEGMTAEHDGKRWKSFPSTPTEPLVWDWLRSLEDRALTGAPHKLHTTKTAHQFKERKGQMDLFFQTPAPEPNDIFEYKHILVVGEQKSSY

SEQ ID NO: 470 - DNA, 1185 bp, Muscodor strobelii
  misc_feature: SGI cDNA ID NO. 559727
  misc_feature: Elevated expression when VOC is produced
  misc_feature: Encodes the peptide sequence at SEQ ID NO 471
atgcaaagagtcgcattccaatcacgcacaatgtcatctacgaagatcttgctcacgggagccacaggctacgttggtggcaccattctgcataggctgatgggctcctctagaccctcgcttcgaagtctgcagatctcggtgctcatccgtggtcaagagcgcgcggaccagctgtccagggtgtacggagaacgcatcacgtgtgttctcttcaacgactacgacgagaccgaactgatcacgcaggtcgcgagccagcatgacattgtagtcaatgtgggctcaggcttccatccggccagcgcagaggccatagtcgagggtctcaggaagcgaagagcattcaccggtgacacggcctcttcgtcgcctccgtggatgctgcacacgagcggttgctccaatatctcggataggccactgactggcgaggcgttccccgaccgagagtgggacgatggcgacgggactacggtgtatgacttcgagaagctcgagaacgagcgtgaatggtacccgcagcgagctgccgaactggccgttctaagccatcccgctgtcgaggccggtgaggtcgcggccctcagcatccaggctgcggccatattcggcacgggggagggccagtttcaaaacgctggtttgatgatccccatcatgatgcaatacgtactcgccaagggtcacgggttctacctgggcgacggcactggcgtcatcgattacgtccatgtcgccgatttggccagcttctacgtgttgttggtgatcgagattctagagaacggtggcgcgagactaccccacggtagtcatggtattgtctttccgacagctggccgcgtcctaatgaaggatatcgcgcagggctgtcttgacgcggcgtttgcggccggggtgctgccgcgagacgacacgtcctctaatagggaagtcagacttgttacgcttgaggaagcagccacaacgacggcgggcaacatcgtcatcgccgaagtcggttgggctgggcaccgcaagaccaagggcacggtagcgccgagtttgggctggcacccgaccaggtgcgccgaggcatggctacaggatttcaaggacgagctgcggttcgctctcgggggaaagagggccgtgaccatcgacagctgcattgctgagcgagaaacacttccgggtgactag

SEQ ID NO: 471 - protein, 394 aa, Muscodor strobelii
  misc_feature: SGI Peptide ID NO. 559727
  misc_feature (16)..(280): Pfam Id: PF01370 Pfam Desc: NAD dependent epimerase/dehydratase family
  misc_feature (11)..(389): NCBI GI: 256720613 Blast Desc: NECHADRAFT_96603 [Nectria haematococca mpVI 77-13-4]
  misc_feature (15)..(393): NCBI GI: 46120378 Blast Desc: FG04836.1 [Gibberella zeae PH-1]
  misc_feature (14)..(387): NCBI GI: 238494650 Blast Desc: conserved [Aspergillus flavus NRRL3357] gi|220695211|gb|EED51554.1| conserved [Aspergillus flavus NRRL3357]
  misc_feature (11)..(388): NCBI GI: 171681804 Blast Desc: protein product [Podospora anserina] gi|170940861|emb|CAP66511.1| protein product [Podospora anserina]
  misc_feature (14)..(387): NCBI GI: 169777501 Blast Desc: [Aspergillus oryzae RIB40] gi|83771953|dbj|BAE62083.1| protein product [Aspergillus oryzae]
  misc_feature (14)..(389): NCBI GI: 189201467 Blast Desc: conserved [Pyrenophora tritici-repentis Pt-1C-BFP] gi|187984169|gb|EDU49657.1| conserved [Pyrenophora tritici-repentis Pt-1C-BFP]
  misc_feature (11)..(373): NCBI GI: 46111867 Blast Desc: FG02815.1 [Gibberella zeae PH-1]
  misc_feature (10)..(370): NCBI GI: 261356988 Blast Desc: NAD dependent epimerase/dehydratase family protein [Verticillium albo-atrum VaMs.102]
  misc_feature (12)..(369): NCBI GI: 238497742 Blast Desc: NAD dependent epimerase/dehydratase family protein [Aspergillus flavus NRRL3357] gi|220693380|gb|EED49725.1| NAD dependent epimerase/dehydratase family protein [Aspergillus
  misc_feature (12)..(376): NCBI GI: 169768436 Blast Desc: [Aspergillus oryzae RIB40] gi|83766546|dbj|BAE56686.1| protein product [Aspergillus oryzae]
  misc_feature: Useful for introducing or modulating the production of volatile compounds
MQRVAFQSRTMSSTKILLTGATGYVGGTILHRLMGSSRPSLRSLQISVLIRGQERADQLSRVYGERITCVLFNDYDETELITQVASQHDIVVNVGSGFHPASAEAIVEGLRKRRAFTGDTASSSPPWMLHTSGCSNISDRPLTGEAFPDREWDDGDGTTVYDFEKLENEREWYPQRAAELAVLSHPAVEAGEVAALSIQAAAIFGTGEGQFQNAGLMIPIMMQYVLAKGHGFYLGDGTGVIDYVHVADLASFYVLLVIEILENGGARLPHGSHGIVFPTAGRVLMKDIAQGCLDAAFAAGVLPRDDTSSNREVRLVTLEEAATTTAGNIVIAEVGWAGHRKTKGTVAPSLGWHPTRCAEAWLQDFKDELRFALGGKRAVTIDSCIAERETLPGD

SEQ ID NO: 472 - DNA, 1854 bp, Muscodor strobelii
  misc_feature: SGI EST ID NO. CUFF.1208.0
  misc_feature: Variant of the nucleotide sequence at SEQ ID NO 470
cagaaacagcatactagacctgtcagtagatccacagacaatcaatgaacccgcattgagtcggtgcgcacttcgtggtcagttactgtgggccggtagtcttgtagcgacgtatttcgaagttcggcagcatttggaaacaaggcgaggctcgatcaaaaaaggcaaggcgaagtagatcttcagtgcccagtgcccagtactccgtaccgtatcgtagccacgaacgggttgcagcatgtgaagattacctacctcgcctactccatatcggagaatcgtcgtggatgtctgttggcagttgctgcattgtatagcaggggtgagaacagggggcgatcctgtgttgatcggagccccttgccccacaagtgacgagaaggacagacaagcctcgaacaaatactcagctatgcaaagagtcgcattccaatcacgcacaatgtcatctacgaagatcttgctcacgggagccacaggctacgttggtggcaccattctgcataggctgatgggctcctctagaccctcgcttcgaagtctgcagatctcggtgctcatccgtggtcaagagcgcgcggaccagctgtccagggtgtacggagaacgcatcacgtgtgttctcttcaacgactacgacgagaccgaactgatcacgcaggtcgcgagccagcatgacattgtagtcaatgtgggctcaggcttccatccggccagcgcagaggccatagtcgagggtctcaggaagcgaagagcattcaccggtgacacggcctcttcgtcgcctccgtggatgctgcacacgagcggttgctccaatatctcggataggccactgactggcgaggcgttccccgaccgagagtgggacgatggcgacgggactacggtgtatgacttcgagaagctcgagaacgagcgtgaatggtacccgcagcgagctgccgaactggccgttctaagccatcccgctgtcgaggccggtgaggtcgcggccctcagcatccaggctgcggccatattcggcacgggggagggccagtttcaaaacgctggtttgatgatccccatcatgatgcaatacgtactcgccaagggtcacgggttctacctgggcgacggcactggcgtcatcgattacgtccatgtcgccgatttggccagcttctacgtgttgttggtgatcgagattctagagaacggtggcgcgagactaccccacggtagtcatggtattgtctttccgacagctggccgcgtcctaatgaaggatatcgcgcagggctgtcttgacgcggcgtttgcggccggggtgctgccgcgagacgacacgtcctctaatagggaagtcagacttgttacgcttgaggaagcagccacaacgacggcgggcaacatcgtcatcgccgaagtcggttgggctgggcaccgcaagaccaagggcacggtagcgccgagtttgggctggcacccgaccaggtgcgccgaggcatggctacaggatttcaaggacgagctgcggttcgctctcgggggaaagagggccgtgaccatcgacagctgcattgctgagcgagaaacacttccgggtgactagcctaaggctcatgcaagctagctgggctaggcggaagtataagtgccatcgtagacaacgctcagcacctcgtcgccgtatctcgtggtggagctagtggtcagtgcactacatgatcattttccaataactatatagtctcaggtagttagtcatatttattatgtcttctctcccctttggagatcccctcaatatacagttcagagatcgcctacagtggttcagagtgccgcctattcttccatgccttcccg

SEQ ID NO: 473 - DNA, 579 bp, Muscodor strobelii
  misc_feature: SGI cDNA ID NO. 559728
  misc_feature: Elevated expression when VOC is produced
  misc_feature: Encodes the peptide sequence at SEQ ID NO 474
atggtgtcaatctctctcaaatcctcgcttgtcagaggaggcacacgagagcgccagcgccgtttggcacagtacgtcaagatgctcgtcgagaatgaccaggccgtaccatggtattacactttcgcaaccaaaatctttagctggacgctattggctgggtatgttgtactcccttcgaccttcacgtctttgaaacagtcagacgccttcctagataccgtcgagaaacatgcgtctatacttcaaccttttcaaaaccctcctctactcgtcatcgcactgctactttttgtcgtatcgacggtggccttagcctacatctggtggatttggagggccagctacatttgggtgctcaatcacatcatgctgcctttgctgagcaattcggcgttgggattcgcaacgacattgctcaacatatacactggccagaacggcgcgtggtctgccattgcgatcgctactacaatcgccaccagtctgagcctcttgacttccgttactgggtatatcgtgtatgacttgtggctgcttcgacccattcgacatgagcaggccgagaggtcacaataa

SEQ ID NO: 474 - protein, 192 aa, Muscodor strobelii
  misc_feature: SGI Peptide ID NO. 559728
  misc_feature (24)..(187): NCBI GI: 119487669 Blast Desc: NFIA_031020 [Neosartorya fischeri NRRL 181] gi|119410723|gb|EAW20669.1| conserved [Neosartorya fischeri NRRL 181]
  misc_feature (24)..(164): NCBI GI: 156050913 Blast Desc: SS1G_08044 [Sclerotinia sclerotiorum 1980] gi|154692444|gb|EDN92182.1| SS1G_08044 [Sclerotinia sclerotiorum 1980]
  misc_feature (24)..(187): NCBI GI: 242771762 Blast Desc: conserved [Talaromyces stipitatus ATCC 10500] gi|218721528|gb|EED20946.1| conserved [Talaromyces stipitatus ATCC 10500]
  misc_feature (24)..(190): NCBI GI: 242759970 Blast Desc: conserved [Talaromyces stipitatus ATCC 10500] gi|218723090|gb|EED22507.1| conserved [Talaromyces stipitatus ATCC 10500]
  misc_feature (25)..(184): NCBI GI: 261198453 Blast Desc: conserved [Ajellomyces dermatitidis SLH14081] gi|239594780|gb|EEQ77361.1| conserved [Ajellomyces dermatitidis SLH14081]
  misc_feature (24)..(187): NCBI GI: 170116718 Blast Desc: [Laccaria bicolor S238N-H82] gi|164635551|gb|EDQ99857.1| [Laccaria bicolor S238N-H82]
  misc_feature (25)..(189): NCBI GI: 255951536 Blast Desc: Pc22g26690 [Penicillium chrysogenum Wisconsin 54-1255] gi|255952604|ref|XP_002567055.1| Pc17g01060 [Penicillium chrysogenum Wisconsin 54-1255] gi|211586558|emb|CAP79393.1|
  misc_feature (25)..(189): NCBI GI: 255951838 Blast Desc: Pc24g00250 [Penicillium chrysogenum Wisconsin 54-1255] gi|211904307|emb|CAP86933.1| Pc24g00250 [Penicillium chrysogenum Wisconsin 54-1255]
  misc_feature (25)..(189): NCBI GI: 255951611 Blast Desc: Pc23g00020 [Penicillium chrysogenum Wisconsin 54-1255] gi|211904193|emb|CAP79496.1| Pc23g00020 [Penicillium chrysogenum Wisconsin 54-1255]
  misc_feature (25)..(189): NCBI GI: 255930609 Blast Desc: Pc08g00040 [Penicillium chrysogenum Wisconsin 54-1255] gi|255951794|ref|XP_002566663.1| Pc24g00010 [Penicillium chrysogenum Wisconsin 54-1255] gi|211581478|emb|CAP79242.1|
  misc_feature: Useful for introducing or modulating the production of volatile compounds
MVSISLKSSLVRGGTRERQRRLAQYVKMLVENDQAVPWYYTFATKIFSWTLLAGYVVLPSTFTSLKQSDAFLDTVEKHASILQPFQNPPLLVIALLLFVVSTVALAYIWWIWRASYIWVLNHIMLPLLSNSALGFATTLLNIYTGQNGAWSAIAIATTIATSLSLLTSVTGYIVYDLWLLRPIRHEQAERSQ

SEQ ID NO: 475 - DNA, 1557 bp, Muscodor strobelii
  misc_feature: SGI EST ID NO. CUFF.1342.1
  misc_feature: Variant of the nucleotide sequence at SEQ ID NO 473
ggccaactttatgtcgttcccattataggacgtgctaagtatcaaattaatgctatcatttatgcagggttactgctatgcataaaagtcgtggggccagaattggacgggatgactacggtgagcctcacacggtgtcatcgccaaaattggacgccatcagcgacttttataatctttagatgccgcaagagaggaagccgatttcgttacctactgtaccagctgagctcctaacgctgtttcctatttcgtaatcataccaatccactataatggtgtcaatctctctcaaatcctcgcttgtcagaggaggcacacgagagcgccagcgccgtttggcacagtacgtcaagatgctcgtcgagaatgaccaggccgtaccatggtattacactttcgcaaccaaaatctttagctggacgctattggctgggtatgttgtactcccttcgaccttcacgtctttgaaacagtcagacgccttcctagataccgtcgagaaacatgcgtctatacttcaaccttttcaaaaccctcctctactcgtcatcgcactgctactttttgtcgtatcgacggtggccttagcctacatctggtggatttggagggccagctacatttgggtgctcaatcacatcatgctgcctttgctgagcaattcggcgttgggattcgcaacgacattgctcaacatatacactggccagaacggcgcgtggtctgccattgcgatcgctactacaatcgccaccagtctgagcctcttgacttccgttactgggtatatcgtgtatgacttgtggctgcttcgacccattcgacatgagcaggccgagaggtcacaataagaacaggctggagagcggggggatcgtaggttgagtttcgttgttagctgataaaagcgggtctcgagcttgagatttccagcggactttggcgaccgatgagtgattaatcattttaagcctgacgaccatgtgtaagtagagatgaacaataagaccgaagctagacacccgcgtcaacaataaaaggcaatctgctcttcagacggcaagttgacttctatgacgaaagtactagtccctgcttcagccccgcaaaccgtcttgacacatggaaggacatgctgtcgatactgaggagaaaacgcaatgaaaactatgctgagttggccaagtcgactgcaacgcagccggtgtagtcgcagcttcctgcaatgctatacgttattgcagcattggctctcatgcttcctggacctttgttcgttgttatatgcgggattactatgatctacgctgccacggacgatctccttggcaggcgatcttgaatgggcgcgcgcaagcttgttattgttcatctggcaatttcgactggggtgtttaggggatttccaccatattttccacttcttccgtcacccgtgtagttatccccagtacagatctacagtaaaacctctttatagcgaatcacctctatagcgagttcctgatcataacggaccgaatacgtgtctgaattgtttttaccatacataca

SEQ ID NO: 476 - DNA, 2376 bp, Muscodor strobelii
  misc_feature: SGI cDNA ID NO. 559729
  misc_feature: Encodes the peptide sequence at SEQ ID NO 477
atgcgcctcttgaaactcgaaaacgacggacgtctcgcgtttaccgacgatcttgttgataataatatcccacgatacgctatactctcgcatacctgggggcccgatagccaggaagtcacattcaaagatatcttggagggtaccggtcgacaaaaagatggctattggaagattgaattttgctctactcaggccgcagccgatggacttcactatttctgggtcgatacgtgttgtattgacagatcaaacaacaccgagctgtccgaagctatcaactcgatgttccagtggtaccaaaatgccgagaaatgctatgtgtgcttatccgatgtcgagaaagacgataccgcgcacaccaacgaaccgctgcgagctacgtggaaaaggcaatttcgggagagcagatggttcacgcgaggctggacccttcaggagcttattgcaccacaagaagtcgaattctttgcgtcgaacgggcagcgactgggagacaagaagtcactcgaacagctagtctgtgagataaccggggttcccgttgatgtcctacgaggaagtccactggtccagtatagcatcgatacgcgaatgtcatggtcgaagcgacgcgagacgaagaagcaagaagacaaggcgtactcgttgttgggcattttcgatgttcatatgcctttgatatatggcgagggagaggaaaaggcgttaggtcggctacgaagagagattgatttacaatcaggcaaaccaatactcgacaagcttcctatcgctacgggcgccgctttcgattcccacgccgaagaacataatgcgacttgccttcccaacacgagagttggccttctgcgcgaaataatggaatggatggatagcccaacagccaaagccgtcttctggctgaacggcatggccggcacagggaagtcaaccatctcacggaccttagcccgtgagtcgtccggtctaggccggctcggtgctagcttcttcttcaagaggggcgagggcgaccgggggggagcgtccaaattcttcaccacaatcgctgctcagttgattcagtgcgagccagccctggcgacatacgtaaaggatgtcatcgagaccgatcctgccattctggacaaggcgatgcgggagcagttcaacaagctgatatttgagcctctctctacgctatcttcaccaaacaagaagcctatcaatcttgtcatcgtcgtagatgccctagatgaatgcgaccgagaagaggatgtcaagatgcttattcatctgctctctggtgctgatacctccaagtcagcccgactacggatcttcttgacgagtcggcccgagttacctattcgcctgggattttatgatataaaaggtacataccaaggtctgatcctccacgagattgaacagaccatcattgagcaggatctctttgtctactttaagcacgaacttgccaaaatcaaagaagagttcaataaaaccaagccacctgctcaacaattaccttcagaatggcctaaacaatccgaaatgcagacactcgtgacgatggctgttccgctcttcatcttcgctgctactgtatgccgattctttgccgaccgtcggactggcactccaaggtctaagctagagcgaatattggcgcatccaacgacgagcgagaattacaaacttgatgcaacatacttacctgttctcgagcagctcatagtagacatgtcgaatgaacggaaaaccaaagtgttaaaactattcaaacgtcttgtcggctcgatcgtcttgcttgcaagccccttgccaacagctgccttaggaaagctactcgatatatccctggacgacatcgatagccaacttgattttcttcactccgtcttgagtgttccttcttcaccaactgttcccgtacggctactgcacttgtcatttcgcgactttctagtcgatccgtcaaagcgtggcacgaacttgttctgggtagatgcagaggaagtccaccggcaactagcggccgactgctttcgagtgatgaacacggccctccggaaagatatctgcgacgtgcaatggccaggcacatcatcctcgtctatcgatcataatacgatcaatgataagattaggccggaagttcagtacgcctgtcagtactgggcatatcacatccagaaggccggggagcgtttattcgataatggtcaggttcattgcttcctgcagcagcacttcctacactggctggaggcattaagcattattggcagggcttctcaaagctttcgggacattcacacattgcaatcatcacttcaggtaactataacacgactcaaaactcctccgtgctctgctaatccgatttag

SEQ ID NO: 477 - protein, 791 aa, Muscodor strobelii
  misc_feature: SGI Peptide ID NO. 559729
  misc_feature (26)..(147): Pfam Id: PF06985 Pfam Desc: Heterokaryon incompatibility protein (HET)
  misc_feature (1)..(772): NCBI GI: 189209021 Blast Desc: vegetative incompatibility protein HET-E-1 [Pyrenophora tritici-repentis Pt-1C-BFP] gi|187976936|gb|EDU43562.1| vegetative incompatibility protein
  misc_feature (255)..(779): NCBI GI: 171678525 Blast Desc: protein product [Podospora anserina] gi|170937332|emb|CAP61990.1| protein product [Podospora anserina]
  misc_feature (252)..(772): NCBI GI: 154310178 Blast Desc: BC1G_07009 [Botryotinia fuckeliana B05.10] gi|150851570|gb|EDN26763.1| BC1G_07009 [Botryotinia fuckeliana B05.10]
  misc_feature (253)..(776): NCBI GI: 116191741 Blast Desc: CHGG_05588 [Chaetomium globosum CBS 148.51] gi|88181501|gb|EAQ88969.1| CHGG_05588 [Chaetomium globosum CBS 148.51]
  misc_feature (253)..(776): NCBI GI: 116199375 Blast Desc: CHGG_07843 [Chaetomium globosum CBS 148.51] gi|88179122|gb|EAQ86590.1| CHGG_07843 [Chaetomium globosum CBS 148.51]
  misc_feature (244)..(776): NCBI GI: 116182430 Blast Desc: CHGG_01843 [Chaetomium globosum CBS 148.51] gi|88186140|gb|EAQ93608.1| CHGG_01843 [Chaetomium globosum CBS 148.51]
  misc_feature (250)..(764): NCBI GI: 46130696 Blast Desc: FG08952.1 [Gibberella zeae PH-1]
  misc_feature (254)..(776): NCBI GI: 171676738 Blast Desc: protein product [Podospora anserina] gi|170936436|emb|CAP61093.1| protein product [Podospora anserina]
  misc_feature (254)..(764): NCBI GI: 154936828 Blast Desc: NWD2 [Podospora anserina]
  misc_feature (243)..(775): NCBI GI: 256723335 Blast Desc: NECHADRAFT_51778 [Nectria haematococca mpVI 77-13-4]
MRLLKLENDGRLAFTDDLVDNNIPRYAILSHTWGPDSQEVTFKDILEGTGRQKDGYWKIEFCSTQAAADGLHYFWVDTCCIDRSNNTELSEAINSMFQWYQNAEKCYVCLSDVEKDDTAHTNEPLRATWKRQFRESRWFTRGWTLQELIAPQEVEFFASNGQRLGDKKSLEQLVCEITGVPVDVLRGSPLVQYSIDTRMSWSKRRETKKQEDKAYSLLGIFDVHMPLIYGEGEEKALGRLRREIDLQSGKPILDKLPIATGAAFDSHAEEHNATCLPNTRVGLLREIMEWMDSPTAKAVFWLNGMAGTGKSTISRTLARESSGLGRLGASFFFKRGEGDRGGASKFFTTIAAQLIQCEPALATYVKDVIETDPAILDKAMREQFNKLIFEPLSTLSSPNKKPINLVIVVDALDECDREEDVKMLIHLLSGADTSKSARLRIFLTSRPELPIRLGFYDIKGTYQGLILHEIEQTIIEQDLFVYFKHELAKIKEEFNKTKPPAQQLPSEWPKQSEMQTLVTMAVPLFIFAATVCRFFADRRTGTPRSKLERILAHPTTSENYKLDATYLPVLEQLIVDMSNERKTKVLKLFKRLVGSIVLLASPLPTAALGKLLDISLDDIDSQLDFLHSVLSVPSSPTVPVRLLHLSFRDFLVDPSKRGTNLFWVDAEEVHRQLAADCFRVMNTALRKDICDVQWPGTSSSSIDHNTINDKIRPEVQYACQYWAYHIQKAGERLFDNGQVHCFLQQHFLHWLEALSIIGRASQSFRDIHTLQSSLQVTITRLKTPPCSANPI

SEQ ID NO: 478 - DNA, 5652 bp, Muscodor strobelii
  misc_feature: SGI EST ID NO. CUFF.1445.0
  misc_feature: Variant of the nucleotide sequence at SEQ ID NO 476
gtctgtttctcgaacattccatatccagttgtggacgaatcagatgatgcctcttacttcgatcgtcgtttcggatagcgaagcttttgccacagcttcgtaccacaacataatcatctccattaccgcagctatggatgagttcgatcctctaggggacatttcttttgaccaatacagcgcttggtctcctctcgacctgggtcgcgaattgacgcagcgtaactcacaagtgtcccctcaatgctcgccggagcctgaggaacctgaactgcccctgctacagcttgctaactggcaggaagacgcctcatatgatgaaaacccaccaacctgtattcactactcgattgagtggaagctgacttataatgggaaaatccttagcagggatactgaatcagaccttgttctcgcgcctggtgcatactggctgcgatacctgcggcctaagcttgaaacgcgcgtaggaaagaaattgtcggcagacatatctttcgagattgatgacattaatgtgacagtatttgtttaagaccgtagggagcgggaccttgtgaagtgcttcgacgcgctagatgtagactgggacgtcattgagaagtaactcggggtttggagctttctcttttcgaaagggagacgtcttaaacttgacattgcctttaattacgttgatccaaacaatggtggaccaacacagcaagccaagagacgcggaatggtctcagccacgaagtctatgctagaagaccgaggaaagcaattacatgcagagcaatcttcaggtcagtcctctgtctggtgtcaggtatacaacctcatgcgttgtccggggccaccttgtcatttggggccgtactgctggcgcgacaagacggcgaacaggcattacagacttcagacacaccatctccgaaccttgatcaagctagtggaacagggccacaggctggaggggcatgatgatgtaccagaggaaatccgcgatcagctgtatgcggaggagcaacaatccatagagcgcaaaaggaagcgtggcaatgctcagcagccatcgatccagattaccaacgtcatgcccggcaaggcaactgaagacgcggaacagcgggcagctgtgcttcggagccccattgagatatcggggccaagagatggagcggtcaagaggtactgtgactggcaaggcacgcaggttgatgatggagagctgaaacttgaatttcagaaagctggtgatctaacgttgagcgaaggtcttgacctcgaacaacttcatgaagaacaggacgttcgattcctgcttgaccggggcattaaacgcggcattgctaagcgattcgtccgtgatatcaagacctgggccgggaactatgattcgcatatctaaagcagttgacatacatatagtagctattatagagcttagagattttctactgtgagcccagcatgccgaaaatgcccctcggcacttgatgtcctcgagcccaccgtgtcgatgctccactccagaaacgccgcaaagtcctgtctagggagactgctatactgctgccaggtatacttgatgaacgcctttagctcggcaaagaattcttcaatcggattcaagtctggcgagtagggaggtagatatagcagcttaacaccggcatcgctacataactgctcaaccctctcggaatgatgaaacgagacattgtccatgataaggaccgacttcggctcgggccagcggccacagtgaagtcaagagctgttcgatgaaatcctcaaatatagcgctatcggttgtaccttgaagacgcgtgacaagacgatgccgtcttgtgcgtatgctggcaggatttgatatctgttctcacggtggaagtgggcgatctggaccggcgccacaccttgaggcgaccatcctgttcgtctaaacccggctctcttgtcgcagccagactcattaacatagacgaggtggtaagagcggaaggccaataaggaattgcagtacaggtctcgcaaatctgcattacgctgtttcgcaatgcggcgcagtatcttcttcgaccacccgatggaagcaagggctctactgatactcatccttgtcacctcggcatcgaactcactggctagaaacgtgaccatttcgtcctgatacatgtctggcttctcgagaagacgggcacacaacgcctggagcatcggcggcgatacgcttctcggtcgtcccacagcgttcggtggggaccgggtagcaccgaagcatcgcaggttcgctcgaatggctcgaatggtccgggggccacagcctgcggtatctgcgatctttttgttagtaaacagtccgctcgtgatcattccctcgatcagttcgtgctgcgacgaggccaggttcggtgccattatggtaatgaggttgtctggcaatgaggttgaagggacagggcgaccaaaaggacaggtggacgaagcgttccccgcttgccaagatcccggcaagtccccatcatgatctagcattagcatcgccttgtattttttttttcgctcaacaccaatattcatcacgatttattaagagataagaaacaacgagcatacgaaagcaatacccatatacttacgctgaatcaatctgcaagatatcaagcgtcatactgaccactgagcagccggacccagccaaccatgcgtacgggacatcattcggaaaacgcttcaacgaccggccggcttggttttcaacatcttggcgacgttttacagtatcggaatacataatcactgctctccaatgagatgtgattctctaggttcagcctgcctcggatcgtactccaagcgagatgacttgattggatagatctgcgagtctcctgattgggcgccgcctcgcgccaggacgacagcactgccatctcagctcttcgtctctcgacgccagatcaccacctctaccccagtctcatcacaaaccttgagaaatacatcgactgcgatctcctactgcaacaaccttgacccaccacccctcctgtcacccgcttgaaggcgcgattcgaacattggagtatcgggaacacgcctcttaatttcgatgcgaacacgaccttcggccatactatgcgcctcttgaaactcgaaaacgacggacgtctcgcgtttaccgacgatcttgttgataataatatcccacgatacgctatactctcgcatacctgggggcccgatagccaggaagtcacattcaaagatatcttggagggtaccggtcgacaaaaagatggctattggaagattgaattttgctctactcaggccgcagccgatggacttcactatttctgggtcgatacgtgttgtattgacagatcaaacaacaccgagctgtccgaagctatcaactcgatgttccagtggtaccaaaatgccgagaaatgctatgtgtgcttatccgatgtcgagaaagacgataccgcgcacaccaacgaaccgctgcgagctacgtggaaaaggcaatttcgggagagcagatggttcacgcgaggctggacccttcaggagcttattgcaccacaagaagtcgaattctttgcgtcgaacgggcagcgactgggagacaagaagtcactcgaacagctagtctgtgagataaccggggttcccgttgatgtcctacgaggaagtccactggtccagtatagcatcgatacgcgaatgtcatggtcgaagcgacgcgagacgaagaagcaagaagacaaggcgtactcgttgttgggcattttcgatgttcatatgcctttgatatatggcgagggagaggaaaaggcgttaggtcggctacgaagagagattgatttacaatcaggcaaaccaatactcgacaagcttcctatcgctacgggcgccgctttcgattcccacgccgaagaacataatgcgacttgccttcccaacacgagagttggccttctgcgcgaaataatggaatggatggatagcccaacagccaaagccgtcttctggctgaacggcatggccggcacagggaagtcaaccatctcacggaccttagcccgtgagtcgtccggtctaggccggctcggtgctagcttcttcttcaagaggggcgagggcgaccgggggggagcgtccaaattcttcaccacaatcgctgctcagttgattcagtgcgagccagccctggcgacatacgtaaaggatgtcatcgagaccgatcctgccattctggacaaggcgatgcgggagcagttcaacaagctgatatttgagcctctctctacgctatcttcaccaaacaagaagcctatcaatcttgtcatcgtcgtagatgccctagatgaatgcgaccgagaagaggatgtcaagatgcttattcatctgctctctggtgctgatacctccaagtcagcccgactacggatcttcttgacgagtcggcccgagttacctattcgcctgggattttatgatataaaaggtacataccaaggtctgatcctccacgagattgaacagaccatcattgagcaggatctctttgtctactttaagcacgaacttgccaaaatcaaagaagagttcaataaaaccaagccacctgctcaacaattaccttcagaatggcctaaacaatccgaaatgcagacactcgtgacgatggctgttccgctcttcatcttcgctgctactgtatgccgattctttgccgaccgtcggactggcactccaaggtctaagctagagcgaatattggcgcatccaacgacgagcgagaattacaaacttgatgcaacatacttacctgttctcgagcagctcatagtagacatgtcgaatgaacggaaaaccaaagtgttaaaactattcaaacgtcttgtcggctcgatcgtcttgcttgcaagccccttgccaacagctgccttaggaaagctactcgatatatccctggacgacatcgatagccaacttgattttcttcactccgtcttgagtgttccttcttcaccaactgttcccgtacggctactgcacttgtcatttcgcgactttctagtcgatccgtcaaagcgtggcacgaacttgttctgggtagatgcagaggaagtccaccggcaactagcggccgactgctttcgagtgatgaacacggccctccggaaagatatctgcgacgtgcaatggccaggcacatcatcctcgtctatcgatcataatacgatcaatgataagattaggccggaagttcagtacgcctgtcagtactgggcatatcacatccagaaggccggggagcgtttattcgataatggtcaggttcattgcttcctgcagcagcacttcctacactggctggaggcattaagcattattggcagggcttctcaaagctttcgggacattcacacattgcaatcatcacttcaggatgaaaactgcaccgagttgtcatattttcttaatgatgctttacgctttgcccgcacgaatgtttcaggtatagaggctgcgccgctgcaagtatactgctcggcacttgtctttgcgccagagaagagtactatccgcaatacttttcatggtgacatcccaaagtggatacgtcttggcccaaaggtgaatgcggac

SEQ ID NO: 479 - DNA, 1014 bp, Muscodor strobelii
  misc_feature: SGI cDNA ID NO. 559730
  misc_feature: Encodes the peptide sequence at SEQ ID NO 480
atgtggcgagaagacctcctccgtgagaaacgactgcggcaagcacacgttccgcgtcttgaagaatacagcagagcattggtagaagagtatgggagagtatacagtaccgcttttaggaagagatacatgctcccttgtgatcttctagagaatgatagattggatatatttcacaaatatttcttggtcgcgcgacaaaacgaacccacgccttctgctgggctatattgtcgtccagtgcccgagcatcctagaattctggacttaggttgcggtacaggtatctgggtcattgacgtcgctgatcgcttgggctcgaccgtgcacgatcatattgaaggctgggatatcaatcttattcaacctgaattaattccaaagggcgtctatttcgacagacgcgacatcgaagaaccttggactggcgtggcgctaaattcttatgacctcattcatatgcgtatgctcaacggcagcatcatgaattgggatcggctctacggcagaatctttaatcacttgaaaccaggcgttggggtgatcgaacaggtggagattgattggcgtcctaagtgcgatcctgaaggtgactcgggcatggggtttctagagcgagaactggaactacgcggttcaaaacttgctcagtggtcggcacaattgcaccaggccttccaacttgctgggctgccgctagagggacacccggatattgaagcgcagttagaaggcctcgggtttgttgacatccaacacttcgagacgccaataccttataatccatggccagaacaggagcacgagaaagagatggctaggtggttcaatcttggattgactcaaggcataaatgcattgactcaacgtgctcttgtcgagttcctgcatatcccagaactggatgttcgcgggctcatcgagtccgtcaaagaggatatttgcaaacgacaatggcgagctttctgtactatgcatatttgggtggctcgaaggcctctaccgcgagattaa

SEQ ID NO: 480 - protein, 337 aa, Muscodor strobelii
  misc_feature: SGI Peptide ID NO. 559730
  misc_feature (22)..(333): NCBI GI: 171695002 Blast Desc: protein product [Podospora anserina] gi|170947743|emb|CAP59906.1| protein product [Podospora anserina]
  misc_feature (30)..(333): NCBI GI: 189196999 Blast Desc: methyltransferase LaeA [Pyrenophora tritici-repentis Pt-1C-BFP] gi|187980785|gb|EDU47411.1| methyltransferase LaeA [Pyrenophora tritici-repentis Pt-1C-BFP]
  misc_feature (27)..(333): NCBI GI: 62130748 Blast Desc: methyltransferase LaeA [Aspergillus parasiticus] gi|62130750|gb|AAX68415.1| methyltransferase LaeA [Aspergillus parasiticus]
  misc_feature (27)..(333): NCBI GI: 62130744 Blast Desc: methyltransferase LaeA [Aspergillus flavus] gi|62130746|gb|AAX68413.1| methyltransferase LaeA [Aspergillus sojae] gi|154127115|dbj|BAF74528.1| methyltransferase LAEA
  misc_feature (27)..(333): NCBI GI: 169770391 Blast Desc: [Aspergillus oryzae RIB40] gi|83767524|dbj|BAE57663.1| protein product [Aspergillus oryzae]
  misc_feature (21)..(333): NCBI GI: 242778258 Blast Desc: regulator of secondary metabolism LaeA [Talaromyces stipitatus ATCC 10500] gi|218722821|gb|EED22239.1| regulator of secondary metabolism LaeA [Talaromyces stipitatus ATCC 10500]
  misc_feature (29)..(334): NCBI GI: 77543192 Blast Desc: methyltransferase [Monascus pilosus] gi|77543193|gb|ABA87011.1| methyltransferase [Monascus pilosus]
  misc_feature (21)..(333): NCBI GI: 212533505 Blast Desc: regulator of secondary metabolism LaeA [Penicillium marneffei ATCC 18224] gi|210072273|gb|EEA26362.1| regulator of secondary metabolism LaeA [Penicillium marneffei ATCC 18224]
  misc_feature (38)..(333): NCBI GI: 238487202 Blast Desc: regulator of secondary metabolism LaeA [Aspergillus flavus NRRL3357] gi|220699718|gb|EED56057.1| regulator of secondary metabolism LaeA [Aspergillus flavus NRRL3357]
  misc_feature (14)..(333): NCBI GI: 240274627 Blast Desc: methyltransferase [Ajellomyces capsulatus H143]
MWREDLLREKRLRQAHVPRLEEYSRALVEEYGRVYSTAFRKRYMLPCDLLENDRLDIFHKYFLVARQNEPTPSAGLYCRPVPEHPRILDLGCGTGIWVIDVADRLGSTVHDHIEGWDINLIQPELIPKGVYFDRRDIEEPWTGVALNSYDLIHMRMLNGSIMNWDRLYGRIFNHLKPGVGVIEQVEIDWRPKCDPEGDSGMGFLERELELRGSKLAQWSAQLHQAFQLAGLPLEGHPDIEAQLEGLGFVDIQHFETPIPYNPWPEQEHEKEMARWFNLGLTQGINALTQRALVEFLHIPELDVRGLIESVKEDICKRQWRAFCTMHIWVARRPLPRD

SEQ ID NO: 481 - DNA, 3106 bp, Muscodor strobelii
  misc_feature: SGI EST ID NO. CUFF.1260.0
  misc_feature: Variant of the nucleotide sequence at SEQ ID NO 479
cgatcagaagcatgacaaagcggctccaaatagcaatcttctgccttctcgagcagggggcccttggtagtggcacacgcgaatgaccatggcttctgcaccgcaaaagtgaccgacgcgactttctgtcatgacttggtgtcgaatccctaactcggacataaggtcacgtgaggactcgacgagatcacacattgagtctgccgggtctgcctagtccaccgatccgacatcaggcgaaggaaggagatgacatatagatcaatggcctctctgtttttagtcacccttttagtttcgttccttactgtagctatcaatagcattcattaccattagttcacgacctgtcaatgccgagcgaacgctaacccggttaagtctggtgtacatttctagcactaagtggcattctgagatccatcttccccatggccatcggtgccatgcgggcagctagaggtggcgccccatgcgtcgcagtcgccaccagtgtccgtggccatcgtgagaatggctcccgtcccaagaacccaccaccgatttccaatcgccttcttgtagttccccggatctttttcttagctggaaagcttcaagccggcctctgctcaacgatctagcactagcgcgcccacaactgctatagtgaacttcaacgagaagaaatgtggcgagaagacctcctccgtgagaaacgactgcggcaagcacacgttccgcgtcttgaagaatacagcagagcattggtagaagagtatgggagagtatacagtaccgcttttaggaagagatacatgctcccttgtgatcttctagagaatgatagattggatatatttcacaaatatttcttggtcgcgcgacaaaacgaacccacgccttctgctgggctatattgtcgtccagtgcccgagcatcctagaattctggacttaggttgcggtacaggtatctgggtcattgacgtcgctgatcgcttgggctcgaccgtgcacgatcatattgaaggctgggatatcaatcttattcaacctgaattgtaggtccatatgtttctccaaccgcgatatgctaaatggtgcggcagaattccaaagggcgtctatttcgacagacgcgacatcgaagaaccttggactggcgtggcgctaaattcttatgacctcattcatatgcgtatgctcaacggcagcatcatgaattgggatcggctctacggcagaatctttaatcacttgaaaccaggcgttggggtgatcgaacaggtggagattgattggcgtcctaagtgcgatcctgaaggtgactcgggcatggggtttctagagcgagaactggaactacgcggttcaaaacttgctcagtggtcggcacaattgcaccaggccttccaacttgctgggctgccgctagagggacacccggatattgaagcgcagttagaaggcctcgggtttgttgacatccaacacttcgagacgccaataccttataatccatggccagaacaggagcacgagaaagagatggctaggtggttcaatcttggattgactcaaggcataaatgcattgactcaacgtgctcttgtcgagttcctgcatatcccagaactggatgttcgcgggctcatcgagtccgtcaaagaggatatttgcaaacgacaatggcgagctttctgtactatgcatatttgggtggctcgaaggcctctaccgcgagattaaatgccagcgggttgcgtatctggtaattagtaactggtatatcttttcgtacacgtaaaaaagagctccctttcgacaatgtcgcgcgtttcgctatccgagagtcgactcgagctagacttgacgggcgttcctggaaaagtccgagcgatgctggacgggggaggggcgagggcgctgaagctgttgaggatgtcgaaacatcttcctagatgtcgatatcggaggattcgggcatgacgtgacggacaagaaggcagaaatgaagaagtttcaccacgccctctggaacatgctattgtttggagaacagtttagcaggctgacacccaagcattcatcaaatacatcggaagatagcacccaaaattggagctcacataacggtataagaaggagcacgaatatataaagctttattgcagtttatcgttctaataccttttgattgcccgtattttcttatttatatgctattgtaccactttacgcagacatttgccctaatgctcgaggcacatatatataccatggacacgctccctatcgaactttgcttcatggttacctctttgcagcacttgtacatccctgcagcctgtcttattctatatacaaatatatgtataacgtcaatttcgatagctcctcagcactgcgtgtaacatgtcaatatgaagcttccgttaccatattaaaagagccaatcggcgcaggcgcagaccttagaagagaatttaaaaagaagctggaagttccgctgcagagcccatgctttactcaactttttacaaatactattttacaccgttgcaattggccgcttctgtgggccatttagaggttatctctctcttgctccaacatgagagaaacattaattaccgggtctagtatttgagttggacggcgcaattctttgcactacattatacacataaccttgccgcaaggccgttgattgatgaaggtgctgctgcgcttgtcttggcgttgggaatcaaagcgctttacctcgcagcaggcacagatctccctgatattatagaatatttcacgaaagagaagagactcgatccgaatgtgccaaacagcaattgtttctatgatcattcgacacattgacacaatagaggcgagaatcgaatttcgtatcgcaactcatatttggtgaaatctttgaagtttccgagccgtgaggtagcatcatgttcattcaaacacgtccctaaacacattctaagaccgccactaccgcgaacagacatttgagtagaaaatcaaagatgatgaatagttcacaaccatatttctgcatcattgcttgaattttaagagatggtgagttatggtaacgcaatctagtgtgctcggag

SEQ ID NO: 482 - DNA, 1332 bp, Muscodor strobelii
  misc_feature: SGI cDNA ID NO. 559731
  misc_feature: Encodes the peptide sequence at SEQ ID NO 483
atgcgtggcctcttcagccttgctacggctactttggtggcggcccttgtttctcacgtcactggttcaaccatcgtccacccgggtggtattgatgacattatcatcaccgaagacaatattctcaacagcaccaccaaatatgactttccgggatctgacgactcaactaaatcgttgaaagtcaacgctgctcaagcggctagcaacccactgcctctctctcttgttaacaactaccagtctggaataaatgcgtacatcacgggacaggaccagtcgggcagaccctgcttcatcgacactaacggtcaatatatctatcctcaggctgatggcactggagtaccattgcctatcactgctgccgtcgcgattcccttaggtggcgttggttcgaccaccaatttccagatcccagacactctactttctgctcgaatctatttcgctgttggaaatctcaagttttacacagtgaaagatggaaacggcgtttcggctatcgttcagcctgccgcagtgaaccctcaagatccttcggctggggttcaatggggttttgtcgagttcaactacgatagcaacactctgtacggcaacattagcttcgttgactttgtgggcctgccacttggcatggggttgactgtcggtggaagtcagcaagtcgtgcagggccttatgcctggcgctgtcaacaacatctgcaatggacttaatagtcagcacaaattagacggaaagcaatgggatcagctttgccagtcttctggaggccaggcccttcgagttctgtcccccaacttgtttatctctgccgatggaagcaggttttctggctattacgatgcgtatgttaaccaagtctggtctcaatacacaagccaggatctgatcgtcgacactcaaacttctgcaggcgaggtcgcctgtcgggcttctggaaaccagatgacctgcgttggtgataatcgggcttacccgaagcctacctcagccgatattttcggctgtaactccggaccttttactatcattgatagcgataatagcgttcaccgtgctgttgttccacgactttgcgccgctttcgtgcgttccaccctattgctggctggcgggaacgtccagccctcgctccctgcttcgtcttactacaccgttagcccaaccaaccactattctcgcctcgtgcaccaatacgaaaccaatggaaccggctacgctttctcgtatgatgatgtcaacccatctggccagaacgctgctggtgagcttgctggattaaaccccaccaaccttaagtttaccgtcggtggatggtcttga

SEQ ID NO: 483 - protein, 443 aa, Muscodor strobelii
  misc_feature: SGI Peptide ID NO. 559731
  misc_feature (1)..(443): NCBI GI: 212526330 Blast Desc: conserved [Penicillium marneffei ATCC 18224] gi|210072720|gb|EEA26807.1| conserved [Penicillium marneffei ATCC 18224]
  misc_feature (1)..(441): NCBI GI: 242780568 Blast Desc: conserved [Talaromyces stipitatus ATCC 10500] gi|218719770|gb|EED19189.1| conserved [Talaromyces stipitatus ATCC 10500]
  misc_feature (1)..(443): NCBI GI: 242774018 Blast Desc: glucan endo-1,3-beta-glucosidase precursor, [Talaromyces stipitatus ATCC 10500] gi|218721977|gb|EED21395.1| glucan endo-1,3-beta-glucosidase precursor, [Talaromyces ATCC
  misc_feature (22)..(440): NCBI GI: 256726304 Blast Desc: NECHADRAFT_94692 [Nectria haematococca mpVI 77-13-4]
  misc_feature (1)..(441): NCBI GI: 46111053 Blast Desc: FG02408.1 [Gibberella zeae PH-1]
  misc_feature (1)..(441): NCBI GI: 212531815 Blast Desc: glucan endo-1,3-beta-glucosidase precursor, [Penicillium marneffei ATCC 18224] gi|210071428|gb|EEA25517.1| glucan endo-1,3-beta-glucosidase precursor, [Penicillium ATCC
  misc_feature (24)..(441): NCBI GI: 261361626 Blast Desc: glucanase B [Verticillium albo-atrum VaMs.102]
  misc_feature (1)..(441): NCBI GI: 255931147 Blast Desc: Pc12g02400 [Penicillium chrysogenum Wisconsin 54-1255] gi|211581749|emb|CAP79867.1| Pc12g02400 [Penicillium chrysogenum Wisconsin 54-1255]
  misc_feature (72)..(441): NCBI GI: 242761177 Blast Desc: conserved [Talaromyces stipitatus ATCC 10500] gi|218723326|gb|EED22743.1| conserved [Talaromyces stipitatus ATCC 10500]
  misc_feature (65)..(441): NCBI GI: 169600283 Blast Desc: SNOG_02972 [Phaeosphaeria nodorum SN15] gi|111068583|gb|EAT89703.1| SNOG_02972 [Phaeosphaeria nodorum SN15]
  misc_feature (72)..(416): SWISSPROT Homolog: EC 3.2.1.39 Glucan endo-1,3-beta-D-glucosidase
MRGLFSLATATLVAALVSHVTGSTIVHPGGIDDIIITEDNILNSTTKYDFPGSDDSTKSLKVNAAQAASNPLPLSLVNNYQSGINAYITGQDQSGRPCFIDTNGQYIYPQADGTGVPLPITAAVAIPLGGVGSTTNFQIPDTLLSARIYFAVGNLKFYTVKDGNGVSAIVQPAAVNPQDPSAGVQWGFVEFNYDSNTLYGNISFVDFVGLPLGMGLTVGGSQQVVQGLMPGAVNNICNGLNSQHKLDGKQWDQLCQSSGGQALRVLSPNLFISADGSRFSGYYDAYVNQVWSQYTSQDLIVDTQTSAGEVACRASGNQMTCVGDNRAYPKPTSADIFGCNSGPFTIIDSDNSVHRAVVPRLCAAFVRSTLLLAGGNVQPSLPASSYYTVSPTNHYSRLVHQYETNGTGYAFSYDDVNPSGQNAAGELAGLNPTNLKFTVGGWS

SEQ ID NO: 484 - DNA, 206 bp, Muscodor strobelii
  misc_feature: SGI cDNA ID NO. 559732
  misc_feature: Encodes the peptide sequence at SEQ ID NO 485
atgtctccttcaaaacagtcgacgaagagtgcccacgaagaaacagatgcagcccgtgctgacgttgacgaggtcgaaggcgatgctgaatacgtggagaacgaaaacgtagagggaacggccgattcaaatgtggtcggtgaagatgacgaggaaggagacgagaaggaagccgaagcagccagcgacgaggatgaagacgaaga

SEQ ID NO: 485 - protein, 68 aa, Muscodor strobelii
  misc_feature: SGI Peptide ID NO. 559732
MSPSKQSTKSAHEETDAARADVDEVEGDAEYVENENVEGTADSNVVGEDDEEGDEKEAEAASDEDEDE

SEQ ID NO: 486 - DNA, 173 bp, Muscodor strobelii
  misc_feature: SGI EST ID NO. CUFF.1305.0
  misc_feature: Variant of the nucleotide sequence at SEQ ID NO 484
gccagcgacgaggatgaagacgaagatgacgacgacgatgctgaagacgccgaagcagaggatgagaacgcacaagaagaagcagccgacgaggatgccgcggatgaagctgcggaagatgaagacgacgacgatgaagaagagactaaagagtcgcgcgggaccaagcgcac

SEQ ID NO: 487 - DNA, 2328 bp, Muscodor strobelii
  misc_feature: SGI cDNA ID NO. 559733
  misc_feature: Elevated expression when VOC is produced
  misc_feature: Encodes the peptide sequence at SEQ ID NO 488
atgggcctgcctgaaaaggacatggcgccgacttaccgggaggagaaatccgaccaagaagccgcaccaccaagttacaataatgtcccaagcaccgacttatcccctgaggaaatcgatggactaaactcagcattcgtctcgttggatctcccaaagaataccgacaccgtgactgtagacacttgcttggcacacttaaaacttctttctgcatttcagaacttgaaagaggccattggttacgccgatgggctatgggacatctacgatagtcgcgtgcactcggccgacaaggatacagcaggcaaagatgagaaggccacggctattattcagtcgcaactggcgctagtcagggagaagagatgggctctttacgtcgcaagagctgttgatcgatatgaaacgtggtggaatagcttcgagagtgatcctctcaacgaggatgacatgccaattgagagcgaacgattctctcaattcacaaatccaaagaacaacggatacttccgctccttactacctccaattgacgtcttgatgatctggcacgctcatatgttaaacccaagagcctatctagaggactgcataagacatgggttgagatctctatggcatgccgggataccttggcagcttgtcaacaatgcgatcgactccaaattcaattacactgcgactcctgaacaaaaggccgaatgggaagagacatctcgaaggaagtgggacaatcctgacgacccaatgtcaaaaactcttccaaattgcaaccactgcaaccgaactaacttcgcgttgtggactacgtgtggcagagccgaggatggcacttccaaatccaagtcttccgacgatgttgtcggtcggggctatggggatgccgaattccaacatacatgcgcaggctgcggcaaaattctcacgagagacttccttgaagtctccaagttcaagagagatgtccaaaatctattggtttataagagaccgatgccgggtactatacttgatatcaaaactggcaaaccactcagaatcccgattactgaagagatgagaaactgctacgggcgcacgttccccaatcgaatgatacggaatcatcttcgtagtaagatactggagtctcccgccgacgagtcaatggaggaggttcgaaagatcattgaagccacactgatcaacactgagcatctaaagaaaattgaccgggtgaagaccagggatctagcaaagaggtacaaacttggccaagaagcccgtgtcgcagtgcgcaagatgatgtcgaagtactggggcaatagttcgctcttcgcattggatcttgcgggtgcagtcacaagacagggaatttttactgaaaaaatgtataagatggattggttgcacagccctgcagctcgtgaaactatggttcgtcttatcacaaaatattggcgatttagggacatcatggataaacatccggatgaagttgccgtgccgactttggatgtcgatctcgcatggcatacccatcagctcagtccatctagctactacaactctatgagtccaaagaatcaaaagttcattgaccatgatgacaaaatcgacgagattaagttgtccagttcatttgagtggacttcgaaaacatatcaaaatctctacggcaaggtctactcggaatgtacatgctggtactgcgaatctatcagatcgagtcactcccgttctagcatcagcaccctgattagaggagatagagtcagcgaaggttttcataactccggtcgtgccgcactatgtccacccgacaacagcgcccacatctcggcccataactccgtccaagtaaagaacaccgattacagacgtaaagccgtccatgagcagcttcaccgagcccatcagcaacgactagaacataactacgagcgcgctaaaaagagagccaagcgaaagggacgtgatttgcccccaagagatgagtactacggttactattggggatatccttatctttattatggcccttatgtctatccggcgttctacgtctgccctgtctactacgactctcccggaactactgtttcgggatcgggagccgtcggcgcttgtgctgctggtacgtgcggtgggacggttgcggctggcgcttgtgcaggcggagccgctggaggttgcggtaataattctggctcgtgtggcaccgctgggggcggcggctgcgggtcttccggatcggcttgcggaggaggaggtggcggcggcggcggcggcggcggatgtggagggggaggaggtggtggtggtggtggatgcggaggcggctag

SEQ ID NO: 488 - protein, 775 aa, Muscodor strobelii
  misc_feature: SGI Peptide ID NO. 559733
  misc_feature (496)..(518): Pfam Id: PF07173 Pfam Desc: Domain of function (DUF1399)
  misc_feature (21)..(715): NCBI GI: 256722855 Blast Desc: NECHADRAFT_72838 [Nectria haematococca mpVI 77-13-4]
  misc_feature (22)..(714): NCBI GI: 46115966 Blast Desc: FG03825.1 [Gibberella zeae PH-1]
  misc_feature (20)..(688): NCBI GI: 171694618 Blast Desc: protein product [Podospora anserina] gi|170947551|emb|CAP59712.1| protein product [Podospora anserina]
  misc_feature (21)..(733): NCBI GI: 164427647 Blast Desc: NCU02877 [Neurospora crassa OR74A] gi|157071827|gb|EAA36323.2| [Neurospora crassa OR74A]
  misc_feature (22)..(716): NCBI GI: 116193903 Blast Desc: CHGG_06669 [Chaetomium globosum CBS 148.51] gi|88182582|gb|EAQ90050.1| CHGG_06669 [Chaetomium globosum CBS 148.51]
  misc_feature (3)..(756): NCBI GI: 261354605 Blast Desc: conserved [Verticillium albo-atrum VaMs.102]
  misc_feature (17)..(714): NCBI GI: 116182906 Blast Desc: CHGG_02081 [Chaetomium globosum CBS 148.51] gi|88186378|gb|EAQ93846.1| CHGG_02081 [Chaetomium globosum CBS 148.51]
  misc_feature (18)..(700): NCBI GI: 261361416 Blast Desc: conserved [Verticillium albo-atrum VaMs.102]
  misc_feature (5)..(546): NCBI GI: 156054953 Blast Desc: SS1G_06323 [Sclerotinia sclerotiorum 1980] gi|154704103|gb|EDO03842.1| SS1G_06323 [Sclerotinia sclerotiorum 1980]
  misc_feature (34)..(720): NCBI GI: 238843170 Blast Desc: conserved [Microsporum canis CBS 113480]
  misc_feature: Useful for introducing or modulating the production of volatile compounds
MGLPEKDMAPTYREEKSDQEAAPPSYNNVPSTDLSPEEIDGLNSAFVSLDLPKNTDTVTVDTCLAHLKLLSAFQNLKEAIGYADGLWDIYDSRVHSADKDTAGKDEKATAIIQSQLALVREKRWALYVARAVDRYETWWNSFESDPLNEDDMPIESERFSQFTNPKNNGYFRSLLPPIDVLMIWHAHMLNPRAYLEDCIRHGLRSLWHAGIPWQLVNNAIDSKFNYTATPEQKAEWEETSRRKWDNPDDPMSKTLPNCNHCNRTNFALWTTCGRAEDGTSKSKSSDDVVGRGYGDAEFQHTCAGCGKILTRDFLEVSKFKRDVQNLLVYKRPMPGTILDIKTGKPLRIPITEEMRNCYGRTFPNRMIRNHLRSKILESPADESMEEVRKIIEATLINTEHLKKIDRVKTRDLAKRYKLGQEARVAVRKMMSKYWGNSSLFALDLAGAVTRQGIFTEKMYKMDWLHSPAARETMVRLITKYWRFRDIMDKHPDEVAVPTLDVDLAWHTHQLSPSSYYNSMSPKNQKFIDHDDKIDEIKLSSSFEWTSKTYQNLYGKVYSECTCWYCESIRSSHSRSSISTLIRGDRVSEGFHNSGRAALCPPDNSAHISAHNSVQVKNTDYRRKAVHEQLHRAHQQRLEHNYERAKKRAKRKGRDLPPRDEYYGYYWGYPYLYYGPYVYPAFYVCPVYYDSPGTTVSGSGAVGACAAGTCGGTVAAGACAGGAAGGCGNNSGSCGTAGGGGCGSSGSACGGGGGGGGGGGGCGGGGGGGGGGCGGG

SEQ ID NO: 489 - DNA, 3395 bp, Muscodor strobelii
  misc_feature: SGI EST ID NO. CUFF.1321.0
  misc_feature: Variant of the nucleotide sequence at SEQ ID NO 487
cagctttcctctaccaaacttaccccgacaaagtccacacgcattgaaaccagggcgcagcgcgaatagcgcgccaaggggttacccgcagttccgaatgctcgcagaagcttatttccgcaactaatacattcacggcgatggagacccagacacccactgcggctgatagcccaaggcagaatatgaagggcacaggcagtgcacaaggatcatatcgagaatgtttccagaaaaggcaaatgcatagaagcttttagtgtcgttcgctgcgcgataatccacagccttcatgcgccgctctgctgcagtctccatcctgatcctccgctttcccgcgtgaagagggtgggttacgcaatgagctgaaagcaagaagcagcagtgctgccgacaaatagctgcgcgccactgagcgtggttgccctcgctgatttgaacagcctaagacactcatattcggtcttcgtcctttcccaaccaggtgtcacagcgacgaaggtgctctcacaaacgttcagatacggcgtacgagcactgcctcaatgcagatcacggaatggcatttgcactatactctttactttgagctatgttcgcacagcttactctcggtgatctgtttgggaaacattcgccttcccatttgggaccgactttccagtctgattgtatataaagcgaggaagatatttgtactagccaagcattattatcacaacaatcagcttgtttaattgaggtatcaaagcaatcgtattcaaaaagccgattctcgacactcctgagttcttccagtatgggcctgcctgaaaaggacatggcgccgacttaccgggaggagaaatccgaccaagaagccgcaccaccaagttacaataatgtcccaagcaccgacttatcccctgaggaaatcgatggactaaactcagcattcgtctcgttggatctcccaaagaataccgacaccgtgactgtagacacttgcttggcacacttaaaacttctttctgcatttcagaacttgaaagaggccattggttacgccgatgggctatgggacatctacgatagtcgcgtgcactcggccgacaaggatacagcaggcaaagatgagaaggccacggctattattcagtcgcaactggcgctagtcagggagaagagatgggctctttacgtcgcaagagctgttgatcgatatgaaacgtggtggaatagcttcgagagtgatcctctcaacgaggatgacatgccaattgagagcgaacgattctctcaattcacaaatccaaagaacaacggatacttccgctccttactacctccaattgacgtcttgatgatctggcacgctcatatgttaaacccaagagcctatctagaggactgcataagacatgggttgagatctctatggcatgccgggataccttggcagcttgtcaacaatgcgatcgactccaaattcaattacactgcgactcctgaacaaaaggccgaatgggaagagacatctcgaaggaagtgggacaatcctgacgacccaatgtcaaaaactcttccaaattgcaaccactgcaaccgaactaacttcgcgttgtggactacgtgtggcagagccgaggatggcacttccaaatccaagtcttccgacgatgttgtcggtcggggctatggggatgccgaattccaacatacatgcgcaggctgcggcaaaattctcacgagagacttccttgaagtctccaagttcaagagagatgtccaaaatctattggtttataagagaccgatgccgggtactatacttgatatcaaaactggcaaaccactcagaatcccgattactgaagagatgagaaactgctacgggcgcacgttccccaatcgaatgatacggaatcatcttcgtagtaagatactggagtctcccgccgacgagtcaatggaggaggttcgaaagatcattgaagccacactgatcaacactgagcatctaaagaaaattgaccgggtgaagaccagggatctagcaaagaggtacaaacttggccaagaagcccgtgtcgcagtgcgcaagatgatgtcgaagtactggggcaatagttcgctcttcgcattggatcttgcgggtgcagtcacaagacagggaatttttactgaaaaaatgtataagatggattggttgcacagccctgcagctcgtgaaactatggttcgtcttatcacaaaatattggcgatttagggacatcatggataaacatccggatgaagttgccgtgccgactttggatgtcgatctcgcatggcatacccatcagctcagtccatctagctactacaactctatgagtccaaagaatcaaaagttcattgaccatgatgacaaaatcgacgagattaagttgtccagttcatttgagtggacttcgaaaacatatcaaaatctctacggcaaggtctactcggaatgtacatgctggtactgcgaatctatcagatcgagtcactcccgttctagcatcagcaccctgattagaggagatagagtcagcgaaggttttcataactccggtcgtgccgcactatgtccacccgacaacagcgcccacatctcggcccataactccgtccaagtaaagaacaccgattacagacgtaaagccgtccatgagcagcttcaccgagcccatcagcaacgactagaacataactacgagcgcgctaaaaagagagccaagcgaaagggacgtgatttgcccccaagagatgagtactacggttactattggggatatccttatctttattatggcccttatgtctatccggcgttctacgtctgccctgtctactacgactctcccggaactactgtttcgggatcgggagccgtcggcgcttgtgctgctggtacgtgcggtgggacggttgcggctggcgcttgtgcaggcggagccgctggaggttgcggtaataattctggctcgtgtggcaccgctgggggcggcggctgcgggtcttccggatcggcttgcggaggaggaggtggcggcggcggcggcggcggcggatgtggagggggaggaggtggtggtggtggtggatgcggaggcggctagagatgagctggtcaagagactgggtatgatgatggcattaatatctctgatgggcatttcctcgcttcgctcgttcctatctccaacaatgggtggtattacgatatattcctggctgagccttgccaatcctgtcgtttacttagcgttcttcgacgtgagagtttcatataccacattcgctcaagtttcggctatgtattcttttatctctataccctatcgctcacaacaaaaacttaaacgcacaatccaatacgcattttcc

SEQ ID NO: 490 - DNA, 1284 bp, Muscodor strobelii
  misc_feature: SGI cDNA ID NO. 559734
  misc_feature: Encodes the peptide sequence at SEQ ID NO 491
atgatcgagcaaggagaatcttccacctgggcgtcaaaccgccacatcaccatctatgagcaggacgctcatccccgccaatacgaggacgtagcaggcaagagcaacacggatctccgcgaactcgaagtatcaggctgcagtgaactggaggcagcgcttgattccatcacgtctcataagaacgtcgataaagggcattatgaaatcggtaaagggagagacctacctaggtctgagtatctatatcacaacaatgtccaggatgacctggagcccctcaaatcagacgagatatcaagaagcgtcaccatgacgactggtctatggtcaataaacgaagactacgaactatggctagccgcagacgcagcagagatgtgtggtcctccagaactagaagaagtcgatcgaaaaacactagataacttcgagatgagcgatccctggatggacggcgtccttaaacacgcatcttggtcaatcgactccgctgagttcggggaagataaggatgaccccgacgtttctcatcccgagcactcaagtcctgaacatgatgacgacgccaataacgcgggcgacgcatttgcgcagttcgacaacaactacgaacaccccattgccgaaatcacagaacaccctgacaacgccgacatcgcagacgaggcatttgcacaattccacgacgcccatgcatatctcgtcgacgaactcgaacaacctcccgagacaaacgtgtcgctcgaaaatcttgcatacgaggcaaatatgttcctacagccagaacaaccacaacaaccacaacacacgcagccaccagctccatcgacaccagaagcgcgcagcgcccacacacccaccactcccggcccaagccaaccacccatcgaactacccctaacagagatccaacgaataatcagagatctagacctcccaccctatatatcagacgccgaagcgctttgccaagccgaaatgtcaggctggttcatcccacggagtttccgtgtgttgggtgttcgacaacgaccgccgcggtatcgaccacagtatcagtcgcaaaacgtccagacacagagcgttgctacaaagagtggaactgcgcaaagcggtcctgtgcaaacggcccatcctcctgggtatcacacattgtttccggagtcgtttagaataacggtgccgactgtgagggaatgtgtgagacgtcaacaggatcggattcgaactcatacgccgaaccgtctgcgtttgcctcctcgcttgcgacatgagcgttga

SEQ ID NO: 491 - protein, 427 aa, Muscodor strobelii
  misc_feature: SGI Peptide ID NO. 559734
MIEQGESSTWASNRHITIYEQDAHPRQYEDVAGKSNTDLRELEVSGCSELEAALDSITSHKNVDKGHYEIGKGRDLPRSEYLYHNNVQDDLEPLKSDEISRSVTMTTGLWSINEDYELWLAADAAEMCGPPELEEVDRKTLDNFEMSDPWMDGVLKHASWSIDSAEFGEDKDDPDVSHPEHSSPEHDDDANNAGDAFAQFDNNYEHPIAEITEHPDNADIADEAFAQFHDAHAYLVDELEQPPETNVSLENLAYEANMFLQPEQPQQPQHTQPPAPSTPEARSAHTPTTPGPSQPPIELPLTEIQRIIRDLDLPPYISDAEALCQAEMSGWFIPRSFRVLGVRQRPPRYRPQYQSQNVQTQSVATKSGTAQSGPVQTAHPPGYHTLFPESFRITVPTVRECVRRQQDRIRTHTPNRLRLPPRLRHER

SEQ ID NO: 492 - DNA, 160 bp, Muscodor strobelii
  misc_feature: SGI EST ID NO. CUFF.1343.0
  misc_feature: Variant of the nucleotide sequence at SEQ ID NO 490
ccgaaatcacagaacaccctgacaacgccgacatcgcagacgaggcatttgcacaattccacgacgcccatgcatatctcgtcgacgaactcgaacaacctcccgagacaaacgtgtcgctcgaaaatcttgcatacgaggcaaatatgttcctacagcc

SEQ ID NO: 493 - DNA, 1794 bp, Muscodor strobelii
  misc_feature: SGI cDNA ID NO. 559735
  misc_feature: Encodes the peptide sequence at SEQ ID NO 494
atgctgtcccaaaatcggcggttgcggcacctgcaaggcatatatctgcgcaacctgagcttcatcaagccccagggccgagctaccgacgatctcgacgctgatctggcaaccaccaagtcccacgagctgccacaacaccagctgcaccatgcccgctcctccgaaagcttgcggccgcgacccaacacgcgaagaagaagcactacattggccaatgcgactcccgtcacccgccagaagcaattggagtacagcgtcgagagtagagctgccgacgtcttcttctcgttgcactgcgacggcgaggatgatccgatatacatcagcgaagtaggagagcggtccatgaacttcaacttccgcttcttcgacctgtcacataccggtccatccgtcacgcgactgtcacaggtacacatcaagatatgggcgaaacgcggcgcatcatggggcctcctactatctcaagacatcgacctccgctctctaaactaccttggaagcctgcgtaaccatctgttcccgcccaattgcctcatcttccacctcgacgatggcatgtactcgctcgacctcggcggcaaacgcccagagcccaaacaaacacacaccctcatgacatcgtcctacaacgcgctaatgaagctatccaacctcaacaactccatccaagacgccctcgccacacgcgaaacgctcacccaccaaatcaacgccatcctctccgacatacccagagacatcgtcccgcaagccgaggactccgcccatctcgcccagaaatacgtctcgtcccaaacccgcgccctccgcaccgcccaatcccgccgcaactccctccaagcctccatcgccgcccgcagagcccagatagacgaaggtcgaaccgcccaatccaagaccggctccgacgtcgagcacgcacgctccaagatccccgcctccgaatccatggtctcagtaacgagagaatcaatccatggccaacgccgcagaatctgcgaagacctagcacatatctaccccataaccccaaccccctcgggcgcgcctttatcattcaacatatgcaccatccccctgccaaactcagactacgacccgacatcctcgacctccaccgacgaccagctctccgcgggcttaggctatgtcgcgcaattaacccacgcgctacaattttacctctcagtgcccttaccctacccaataacgcccttcggctcacgatccagtatacgagacgctatatccctccttccagaagcacagcgtgaattcccgctttttctgcgcggaggggcaagtcatcagtatagatttgactatggctggtttctgctcaataagaacattgaaacactctgcgttgcgtctggtctgaagatcgtggatattcgccatacgctgccaaacctcaagtacctattgtacgtctgcagtgccggctctgacgaggttccggagaggaaacgaggagggattagagggttacttgctggaaggctgaggagtaaagtgggtggtggtagttttgatgatgggggatctagtacggccgggagtaggaggggcagtatggatagtgagatcttgaatgggaagcagagggaacatttgagtcgggcgttggggaggcctgatagagatagagagaggggaaatgagaatgggaatgggaaggatgcgagggagagtagtgtggcgagtaaggttaggttgccgtttgaggatatgacggttagtctgaggactaaggggttgagggagaatgttggggcgaatgtttga

SEQ ID NO: 494 - protein, 597 aa, Muscodor strobelii
  misc_feature: SGI Peptide ID NO. 559735
  misc_feature (1)..(590): NCBI GI: 145609171 Blast Desc: MGG_13375 [Magnaporthe grisea 70-15] gi|145016583|gb|EDK01013.1| MGG_13375 [Magnaporthe grisea 70-15]
  misc_feature (1)..(594): NCBI GI: 171694674 Blast Desc: protein product [Podospora anserina] gi|170947579|emb|CAP59740.1| protein product [Podospora anserina]
  misc_feature (1)..(594): NCBI GI: 116182858 Blast Desc: CHGG_02057 [Chaetomium globosum CBS 148.51] gi|88186354|gb|EAQ93822.1| CHGG_02057 [Chaetomium globosum CBS 148.51]
  misc_feature (1)..(593): NCBI GI: 256720814 Blast Desc: NECHADRAFT_96615 [Nectria haematococca mpVI 77-13-4]
  misc_feature (1)..(593): NCBI GI: 46134081 Blast Desc: FG09180.1 [Gibberella zeae PH-1]
  misc_feature (1)..(526): NCBI GI: 85111854 Blast Desc: NCU02846 [Neurospora crassa OR74A] gi|28925904|gb|EAA34900.1| [Neurospora crassa OR74A] gi|38566932|emb|CAE76235.1| related to UV radiation resistance
  misc_feature (1)..(593): NCBI GI: 154321285 Blast Desc: BC1G_01517 [Botryotinia fuckeliana B05.10] gi|150852055|gb|EDN27247.1| BC1G_01517 [Botryotinia fuckeliana B05.10]
  misc_feature (1)..(526): NCBI GI: 11289280 Blast Desc: BC1G_01517 [Botryotinia fuckeliana B05.10] gi|150852055|gb|EDN27247.1| BC1G_01517 [Botryotinia fuckeliana B05.10]
  misc_feature (92)..(593): NCBI GI: 156054342 Blast Desc: SS1G_06019 [Sclerotinia sclerotiorum 1980] gi|154703799|gb|EDO03538.1| SS1G_06019 [Sclerotinia sclerotiorum 1980]
  misc_feature (151)..(532): NCBI GI: 261361327 Blast Desc: conserved [Verticillium albo-atrum VaMs.102]
MLSQNRRLRHLQGIYLRNLSFIKPQGRATDDLDADLATTKSHELPQHQLHHARSSESLRPRPNTRRRSTTLANATPVTRQKQLEYSVESRAADVFFSLHCDGEDDPIYISEVGERSMNFNFRFFDLSHTGPSVTRLSQVHIKIWAKRGASWGLLLSQDIDLRSLNYLGSLRNHLFPPNCLIFHLDDGMYSLDLGGKRPEPKQTHTLMTSSYNALMKLSNLNNSIQDALATRETLTHQINAILSDIPRDIVPQAEDSAHLAQKYVSSQTRALRTAQSRRNSLQASIAARRAQIDEGRTAQSKTGSDVEHARSKIPASESMVSVTRESIHGQRRRICEDLAHIYPITPTPSGAPLSFNICTIPLPNSDYDPTSSTSTDDQLSAGLGYVAQLTHALQFYLSVPLPYPITPFGSRSSIRDAISLLPEAQREFPLFLRGGASHQYRFDYGWFLLNKNIETLCVASGLKIVDIRHTLPNLKYLLYVCSAGSDEVPERKRGGIRGLLAGRLRSKVGGGSFDDGGSSTAGSRRGSMDSEILNGKQREHLSRALGRPDRDRERGNENGNGKDARESSVASKVRLPFEDMTVSLRTKGLRENVGANV

SEQ ID NO: 495 - DNA, 2331 bp, Muscodor strobelii
  misc_feature: SGI EST ID NO. CUFF.1369.0
  misc_feature: Variant of the nucleotide sequence at SEQ ID NO 493
caacatctcatgatcttgccgccctaaccatgcgccggctccccgcggagctgccgcaacgccaatcaatatcaccacgaccatgctgtcccaaaatcggcggttgcggcacctgcaaggcatatatctgcgcaacctgagcttcatcaagccccagggccgagctaccgacgatctcgacgctgatctggcaaccaccaagtcccacgagctgccacaacaccagctgcaccatgcccgctcctccgaaagcttgcggccgcgacccaacacgcgaagaagaagcactacattggccaatgcgactcccgtcacccgccagaagcaattggagtacagcgtcgagagtagagctgccgacgtcttcttctcgttgcactgcgacggcgaggatgatccgatatacatcagcgaagtaggagagcggtccatgaacttcaacttccgcttcttcgacctgtcacataccggtccatccgtcacgcgactgtcacaggtacacatcaagatatgggcgaaacgcggcgcatcatggggcctcctactatctcaagacatcgacctccgctctctaaactaccttggaagcctgcgtaaccatctgttcccgcccaattgcctcatcttccacctcgacgatggcatgtactcgctcgacctcggcggcaaacgcccagagcccaaacaaacacacaccctcatgacatcgtcctacaacgcgctaatgaagctatccaacctcaacaactccatccaagacgccctcgccacacgcgaaacgctcacccaccaaatcaacgccatcctctccgacatacccagagacatcgtcccgcaagccgaggactccgcccatctcgcccagaaatacgtctcgtcccaaacccgcgccctccgcaccgcccaatcccgccgcaactccctccaagcctccatcgccgcccgcagagcccagatagacgaaggtcgaaccgcccaatccaagaccggctccgacgtcgagcacgcacgctccaagatccccgcctccgaatccatggtctcagtaacgagagaatcaatccatggccaacgccgcagaatctgcgaagacctagcacatatctaccccataaccccaaccccctcgggcgcgcctttatcattcaacatatgcaccatccccctgccaaactcagactacgacccgacatcctcgacctccaccgacgaccagctctccgcgggcttaggctatgtcgcgcaattaacccacgcgctacaattttacctctcagtgcccttaccctacccaataacgcccttcggctcacgatccagtatacgagacgctatatccctccttccagaagcacagcgtgaattcccgctttttctgcgcggaggggcaagtcatcagtatagatttgactatggctggtttctgctcaataagaacattgaaacactctgcgttgcgtctggtctgaagatcgtggatattcgccatacgctgccaaacctcaagtacctattgtacgtctgcagtgccggctctgacgaggttccggagaggaaacgaggagggattagagggttacttgctggaaggctgaggagtaaagtgggtggtggtagttttgatgatgggggatctagtacggccgggagtaggaggggcagtatggatagtgagatcttgaatgggaagcagagggaacatttgagtcgggcgttggggaggcctgatagagatagagagaggggaaatgagaatgggaatgggaaggatgcgagggagagtagtgtggcgagtaaggttaggttgccgtttgaggatatgacggttagtctgaggactaaggggttgagggagaatgttggggcgaatgtttgactgaagggaaaggagaaggaggatggtgagaaagagaggtggtggagatagatacccgtatgtttgagaatgtgatattgctgacaaggtagcatgcgattgtggattgtgaatctggatttaggcttcggtgaaaatcataggagttgaaaggaaagatcataaaaatcctcgcagagatagaatgtctacttcacctcagctcacactagtaagatttcgagatgggaggccggttggcacaacaactttatggtgctacgtcatgtggggacgtttctacccatatctgaggtaggacaggcaagtaagtattttcgatcgaatggtagtcgggaaggaaggaagggtgtgtgcatggtgcaggtgcgatattgttgcacacggtctgcatagaaaggaaccccgctcggaaagttatatttccagatgaacccgtatcatccttagtcaaa

SEQ ID NO: 496 - DNA, 3135 bp, Muscodor strobelii
  misc_feature: SGI cDNA ID NO. 559736
  misc_feature: Encodes the peptide sequence at SEQ ID NO 497
atggattacttctcgtggatagtagcgtggctgatatggacgccattagttgcggctctgggccagcagccgatcatcagcttcactaatgttccagggggcttccctattaccggcggtaacatcaccaaaccccagattctggtcgctaaaaatgagtattggggagtcatacgtgccgcgggtgacttggcaaaagatttcggtcgagtcagtggaataaatctcactttaagcaatggcgagaagggagcgaaaccagccgaatatgattacaagccgataactaagaactatacgcattacgaggtcagcgatacacagacattttatggacctaacttcgcggatccatcagccgcgagtactgtcatcattgcagggacaattggtcactcacagatcattgacgatcttatcacctcaaagaagatcaacgtgtcgggaattgatggcaagtgggaatcattcacgacgcaattggtcgagagtccgattcccggatgctccaaagctgttgttatcgctggcagtgatcctcgcggagtcattttcggtctatacgatattagcgagcaaatcggcgtaagcccttggtactggtgggcggatgtgccaatcaagcagaacaagaacatattcctacttcctaaggaaaaagttcaggggccaccttcggtcaaatatcgtggattcttccttaatgacgagcaaccaggactttcgggctgggtacaagggaattacaacaatactccttacggagtgggatacgacagcaacttctaccccaacgtcttcgagcttctcctccgactacgcgccaattatctatggccagctctatggggcaccatgtttgagatcgatgatccagcaaaccagccaatcgccgatgcctgggagattgtgctcggaagttctcatacggagcctatgatgcgtgctcagaatgagttccaaaatttctacatcaacgcagggttaggcccgtgggcatacaatctcaacaataagacgattgatgaatactttgtgtacggggcgcaaagagcaaagccatatgcgcggaacagtctgtggacgatgagcatgagagggactggtgacacagctatcgaagggcttggcgttggtgctatcgtgtccatgcttgagactctcgtcgcaaaccagcgaaatattattgaagatgtactcgacgtcgatattctaaaggtaccacaaatgtggtgtctttacaaagaggtcatgtcttatatccagcaaggcttgactgtccccgaggacattacccttctgtgggcagatgacaactggggaaatgttcgcagagtacctgttgatgacgagaagactcgatctggtagcgcgggagtgtattaccactttgactacgtcggcgatacgagagactacaagtggatcaataccattcagctacagaagacggccgagcaaatgcaactggcctactcccacggcgcagatcgaatatgggttgtcaatgtcggagatctgaagcctttagagattcccattagtcatttcttggatatggcatatgataccgacatgtggggagtcaacaatgcgagcgattggacttcagcctgggccggccgtgagtttggaaccgatgttgcagacagcataacggacatcttggatcgatacgggatgtatgcagcacgacgaaaattcgagcttgtcgagccttacgtctactcggtagtgaactacaatgaagctgatctcgtccttggacagtggcagaagcttgttgatgacgctcaggctgtctacgacaaactggatgagagctacaagccagcattcttcgagatgatcttacatcccgttcttggcggccagattattcatcaggttcatattggcgcagagaagaatattatttgggcgaatcagcatagaaactcggcgaacgacatgatcacggatgttctagctacttttaaagctgacggagagctcacagctagatgggatagtctacttggtgggaagtggaagcatatgcttgaccaaacgcattttggatacgacggctactggcaacaaccgatgcgaaacgtactaccagcaatggagtatgtgcagaccgccatatcatccatcgcaggaaacgtcggcattgccgtcgaaggcctaaacgcaagtataccgggcgacgacaagtatcattcaaactctggcaacactctggtcctcccacctcttgatccctacggcgccaagacgaggtggtttgatgtcttctctcgcggaacaaaagactgcggctggcaagcctctgtcgacaccccctatgtcaagctctcacagaacaaaggaacagttggaccgaatagcggctcagacacccgtgtcctcgtatcagtcgactgggaatcagcacccaaaatcagcaattcaacaacagccaacataaacttcacaaccagctgcggcaccgacggtttcgcctcatggtacagctcccccatcgtccaactgcccatcaacatccgccaaatcccatcctcctttacctcaggattcgtagaatcagataaacacatctccatcgaagcaccacactaccaacggatctacaccccctcaaccaccaatctatcctacaacaccctcacaaactacggccgaacactcggcggcgtaaccctctggccacaaaccactctccctcaaaaatccgacacagcaccagctctagagtacgacgtctacatcttcaccccaactcccaccgcaaacataactctttacctctccccatcgcagaactacctatcagataaataccccctacaattcggcgtctcgctcttccccgctggatcctcccaagcagcgccacaagtcatgcgtttcgtaccagatagcataggggcggatttaccggtgggttggggtagagcggtgagcgatagtatatggggtcttgatccttctcataatacgacgatgaggtggaatgttgggaaggagggggcttatacgctcagggtttggggattggcgcctagtgttgttgtgcagaagattgttgttaatcttggaggtgtaaggcagagttatttgggcccccctgagagctatcttgtaaaataa

SEQ ID NO: 497 - protein, 1044 aa, Muscodor strobelii
  misc_feature: SGI Peptide ID NO. 559736
  misc_feature (9)..(1043): NCBI GI: 85095029 Blast Desc: NCU06143 [Neurospora crassa OR74A] gi|28921463|gb|EAA30769.1| conserved [Neurospora crassa OR74A]
  misc_feature (5)..(1043): NCBI GI: 261361382 Blast Desc: conserved [Verticillium albo-atrum VaMs.102]
  misc_feature (6)..(1043): NCBI GI: 256726610 Blast Desc: NECHADRAFT_39598 [Nectria haematococca mpVI 77-13-4]
  misc_feature (15)..(1043): NCBI GI: 46116082 Blast Desc: FG03883.1 [Gibberella zeae PH-1]
  misc_feature (10)..(1043): NCBI GI: 171681547 Blast Desc: protein product [Podospora anserina] gi|170940732|emb|CAP65960.1| protein product [Podospora anserina]
  misc_feature (18)..(1043): NCBI GI: 145612003 Blast Desc: MGG_08014 [Magnaporthe grisea 70-15] gi|145019248|gb|EDK03476.1| MGG_08014 [Magnaporthe grisea 70-15]
  misc_feature (69)..(1044): NCBI GI: 154296000 Blast Desc: BC1G_13153 [Botryotinia fuckeliana B05.10] gi|150843805|gb|EDN18998.1| BC1G_13153 [Botryotinia fuckeliana B05.10]
  misc_feature (69)..(1043): NCBI GI: 156039894 Blast Desc: SS1G_12083 [Sclerotinia sclerotiorum 1980] gi|154696140|gb|EDN95878.1| SS1G_12083 [Sclerotinia sclerotiorum 1980]
  misc_feature (19)..(1043): NCBI GI: 119482718 Blast Desc: NFIA_025630 [Neosartorya fischeri NRRL 181] gi|119409542|gb|EAW19490.1| conserved [Neosartorya fischeri NRRL 181]
  misc_feature (17)..(1043): NCBI GI: 121711379 Blast Desc: conserved [Aspergillus clavatus NRRL 1] gi|119401456|gb|EAW11879.1| conserved [Aspergillus clavatus NRRL 1]
MDYFSWIVAWLIWTPLVAALGQQPIISFTNVPGGFPITGGNITKPQILVAKNEYWGVIRAAGDLAKDFGRVSGINLTLSNGEKGAKPAEYDYKPITKNYTHYEVSDTQTFYGPNFADPSAASTVIIAGTIGHSQIIDDLITSKKINVSGIDGKWESFTTQLVESPIPGCSKAVVIAGSDPRGVIFGLYDISEQIGVSPWYWWADVPIKQNKNIFLLPKEKVQGPPSVKYRGFFLNDEQPGLSGWVQGNYNNTPYGVGYDSNFYPNVFELLLRLRANYLWPALWGTMFEIDDPANQPIADAWEIVLGSSHTEPMMRAQNEFQNFYINAGLGPWAYNLNNKTIDEYFVYGAQRAKPYARNSLWTMSMRGTGDTAIEGLGVGAIVSMLETLVANQRNIIEDVLDVDILKVPQMWCLYKEVMSYIQQGLTVPEDITLLWADDNWGNVRRVPVDDEKTRSGSAGVYYHFDYVGDTRDYKWINTIQLQKTAEQMQLAYSHGADRIWVVNVGDLKPLEIPISHFLDMAYDTDMWGVNNASDWTSAWAGREFGTDVADSITDILDRYGMYAARRKFELVEPYVYSVVNYNEADLVLGQWQKLVDDAQAVYDKLDESYKPAFFEMILHPVLGGQIIHQVHIGAEKNIIWANQHRNSANDMITDVLATFKADGELTARWDSLLGGKWKHMLDQTHFGYDGYWQQPMRNVLPAMEYVQTAISSIAGNVGIAVEGLNASIPGDDKYHSNSGNTLVLPPLDPYGAKTRWFDVFSRGTKDCGWQASVDTPYVKLSQNKGTVGPNSGSDTRVLVSVDWESAPKISNSTTANINFTTSCGTDGFASWYSSPIVQLPINIRQIPSSFTSGFVESDKHISIEAPHYQRIYTPSTTNLSYNTLTNYGRTLGGVTLWPQTTLPQKSDTAPALEYDVYIFTPTPTANITLYLSPSQNYLSDKYPLQFGVSLFPAGSSQAAPQVMRFVPDSIGADLPVGWGRAVSDSIWGLDPSHNTTMRWNVGKEGAYTLRVWGLAPSVVVQKIVVNLGGVRQSYLGPPESYLVK

SEQ ID NO: 498 - DNA, 3651 bp, Muscodor strobelii
  misc_feature: SGI EST ID NO. CUFF.1443.1
  misc_feature: Variant of the nucleotide sequence at SEQ ID NO 496
acggggtccactaacggctctgcgtgcagcatcatgggagtataacctgcaggttggctgcggggaaaatctagactctaagatgtcatttcacataccgtatatccgcctgcgatgtatcccttgacttctcatttaccctagcctcgcgtacctgagcgatgccacataggtaattggctccatggcctccgctctaggaacgtgtttgccatttgtccgggtgtgttgactaagcgaggcgaatgcaagctgagtacgactagcccattgtgacgtctccatcctactggcacaataaaaggccatgatgcacgctctagacatagagatgtgtgcagtgtcttttcccaccgattggttgtctcctgcggctgagacagtttttgcgaaagtcgatttgcctccgtaattgcttgatcgattgacctcgagtccctccatggattacttctcgtggatagtagcgtggctgatatggacgccattagttgcggctctgggccagcagccgatcatcagcttcactaatgttccagggggcttccctattaccggcggtaacatcaccaaaccccagattctggtcgctaaaaatgagtattggggagtcatacgtgccgcgggtgacttggcaaaagatttcggtcgagtcagtggaataaatctcactttaagcaatggcgagaagggagcgaaaccagccgaatatgattacaagccgataactaagaactatacgcattacgaggtcagcgatacacagacattttatggacctaacttcgcggatccatcagccgcgagtactgtcatcattgcagggacaattggtcactcacagatcattgacgatcttatcacctcaaagaagatcaacgtgtcgggaattgatggcaagtgggaatcattcacgacgcaattggtcgagagtccgattcccggatgctccaaagctgttgttatcgctggcagtgatcctcgcggagtcattttcggtctatacgatattagcgagcaaatcggcgtaagcccttggtactggtgggcggatgtgccaatcaagcagaacaagaacatattcctacttcctaaggaaaaagttcaggggccaccttcggtcaaatatcgtggattcttccttaatgacgagcaaccaggactttcgggctgggtacaagggaattacaacaatactccttacggagtgggatacgacagcaacttctaccccaacgtcttcgagcttctcctccgactacgcgccaattatctatggccagctctatggggcaccatgtttgagatcgatgatccagcaaaccagccaatcgccgatgcctgggagattgtgctcggaagttctcatacggagcctatgatgcgtgctcagaatgagttccaaaatttctacatcaacgcagggttaggcccgtgggcatacaatctcaacaataagacgattgatgaatactttgtgtacggggcgcaaagagcaaagccatatgcgcggaacagtctgtggacgatgagcatgagagggactggtgacacagctatcgaagggcttggcgttggtgctatcgtgtccatgcttgagactctcgtcgcaaaccagcgaaatattattgaagatgtactcgacgtcgatattctaaaggtaccacaaatgtggtgtctttacaaagaggtcatgtcttatatccagcaaggcttgactgtccccgaggacattacccttctgtgggcagatgacaactggggaaatgttcgcagagtacctgttgatgacgagaagactcgatctggtagcgcgggagtgtattaccactttgactacgtcggcgatacgagagactacaagtggatcaataccattcagctacagaagacggccgagcaaatgcaactggcctactcccacggcgcagatcgaatatgggttgtcaatgtcggagatctgaagcctttagagattcccattagtcatttcttggatatggcatatgataccgacatgtggggagtcaacaatgcgagcgattggacttcagcctgggccggccgtgagtttggaaccgatgttgcagacagcataacggacatcttggatcgatacgggatgtatgcagcacgacgaaaattcgagcttgtcgagccttacgtctactcggtagtgaactacaatgaagctgatctcgtccttggacagtggcagaagcttgttgatgacgctcaggctgtctacgacaaactggatgagagctacaagccagcattcttcgagatgatcttacatcccgttcttggcggccagattattcatcaggttcatattggcgcagagaagaatattatttgggcgaatcagcatagaaactcggcgaacgacatgatcacggatgttctagctacttttaaagctgacggagagctcacagctagatgggatagtctacttggtgggaagtggaagcatatgcttgaccaaacgcattttggatacgacggctactggcaacaaccgatgcgaaacgtactaccagcaatggagtatgtgcagaccgccatatcatccatcgcaggaaacgtcggcattgccgtcgaaggcctaaacgcaagtataccgggcgacgacaagtatcattcaaactctggcaacactctggtcctcccacctcttgatccctacggcgccaagacgaggtggtttgatgtcttctctcgcggaacaaaagactgcggctggcaagcctctgtcgacaccccctatgtcaagctctcacagaacaaaggaacagttggaccgaatagcggctcagacacccgtgtcctcgtatcagtcgactgggaatcagcacccaaaatcagcaattcaacaacagccaacataaacttcacaaccagctgcggcaccgacggtttcgcctcatggtacagctcccccatcgtccaactgcccatcaacatccgccaaatcccatcctcctttacctcaggattcgtagaatcagataaacacatctccatcgaagcaccacactaccaacggatctacaccccctcaaccaccaatctatcctacaacaccctcacaaactacggccgaacactcggcggcgtaaccctctggccacaaaccactctccctcaaaaatccgacacagcaccagctctagagtacgacgtctacatcttcaccccaactcccaccgcaaacataactctttacctctccccatcgcagaactacctatcagataaataccccctacaattcggcgtctcgctcttccccgctggatcctcccaagcagcgccacaagtcatgcgtttcgtaccagatagcataggggcggatttaccggtgggttggggtagagcggtgagcgatagtatatggggtcttgatccttctcataatacgacgatgaggtggaatgttgggaaggagggggcttatacgctcagggtttggggattggcgcctagtgttgttgtgcagaagattgttgttaatcttggaggtgtaaggcagagttatttgggcccccctgagagctatcttgtaaaataaggatgaaacacgtttgtgaagtcactacgaactctggaagcagcatagatattaatatgatgttggtgtcgcga

SEQ ID NO: 499 - DNA, 3174 bp, Muscodor strobelii
  misc_feature: SGI cDNA ID NO. 559737
  misc_feature: Encodes the peptide sequence at SEQ ID NO 500
atgtcggcgatagacccgggcgcttcgtctatcactgtcgctgttcgagtgcgacccttcacaatcagagaagccgcacagttacaacgacacgatgacggaacagtatttcttggagatggctccttagcgggagcacccactccgaaactcaaaacgaacggcatcagatctgtcatcagagtcattgacgaccggtgcttagtgttcgatcccccagaagacaacccagtccagaaattctcaagatctgtagtaccaaacgggaagaaggtcaaagatcaaactttcgcattcgatcgcatatttgacgagaacgtgtcgcaagcagaagtatacgaggcgacgacgaagggtttgttggatagtgtcctggacggctacaatgcgaccgttttcgcatatggcgctacaggatgcggcaaaacacacactatcaccggcacaacccagatgccaggtattatcttcctgaccatgcaggagctgttcgagaaaatcaacgactgcagcgatgagaagcacaccgagatatccctttcctacttggagatctacaacgagacgatccgtgatctgctcctcccgggcggcagcaaacagggtttgatgctacgggaggactccaaccaagctgttacggtaccaggtctcacgagccaccatcccaaggacgtacaagaggtcatggatatgattgtccagggaaacgaataccgcacagtgtcacccacatgtgccaatgctacgtcttcgcgatcacatgccgtactgcagatcaatgtcgctatgaaggacagaaatgctgctgttaatgagcctcatactatggctacattgagcattatagatcttgctggtagtgagcgtgccagcgcaaccaaaaaccgaggcgaacgactagtcgaaggcgccaacatcaataaatcgttacttgctctgggtagttgcatcaacgcactttgcgacacccgcaaaaaggctcacgtaccatatcgcaacagtaagctaactcggcttctaaaattctcgctcggcggaaactgcaagacggtcatgattgtctgtgtcagtccgtcaagcgctcacttcgatgagactcaaaacactcttcgctacgcaaacagagcgaagaacatccagaccaaggtgacaagaaatgtctttaacgtcaatcgccatgtcaaagacttcttggtcaagattgatgagcaaatggcgctcatcaatgagttgaaagcacaacagaaagatgccgagcgcattttctttgcgaaattccaaaagcagcaagagaagagggaagccgtcgctcgagaaggcgtcctgagaatacgccaagcttacgacaactcgctacctgagcgccaggataaggtttctcacatgaagaaacttcgtggcattgaacgacggattggtctcctttcttcctggattgcggcattcgataccgtctgcgatatgcgagaggacgatgcgatgcctcccagtctcgagaccgttcggaagacggcacagggcattctgttagagctggaggacggcagacatcatcttcatcagaaactggataagacgaattgggagcgcgctattgacggagctcttcaacacagtatttcccaacttcccacaggtgatggtcagaccgatgccggtgaaattgccagcttgactcgagaggcggaattactcaagtcgaactttgctcgtgaagcataccgagatgtgctagaacaggacaaggcaggtgatgctggggtcatgcaaattcttctcaccgcgcaattcgaaattctaacatcgcttgccgacatgatgagtatgagcgaagaagaggcggtttcgcacgcaaggcagacgatccacaaactgctcgagacagggtttacagcagcctctcaagttgtcaaacccgatggtgccaagatgcctgttgagatgtacccacccaccaagcgcggaacgccaaagcgaaggagaacgtcaactatgccaaagattgatgtaaagcccatacctaacccggtcttggcagctgtggcggaagtggagcctcaatcgatgttcgcctctcctatgaagggcacaccacgccgtcgcaaagcggttaatactcgcaagggggtcaccttttcgccagccaggaagaagacaccgtcgaagcgctcagtgcgttggcgcgatgacgatggcgagtccggtactcttgctgacttcgcatcaacaccccaaaagctcaacttcacgcctgaacaacagcagctttctccagagaagtcattgccgttgcctcaaatcactgaggtgcccgcattcgaaaacgattctgccgaagaaacaagcccttcactcttagcgcctgaaatgtccagcttgccagtcgcaaagcctaacaggttccaagccggcttcttatctaagtctagaccatctcaaggtggtggctcacccgtgccacccaccatgtctttgaacttgggttctccatcagattctgacgacaagccgagtccacttcgcaaccttgacctgacgcgaactgctaatatcagtgcgccgaagcgatactcatctatcagccctagaccggctcctagattatccccgaagtctttctcggcctcattaccaatgagggtaacgtcaggagatgagaataatcctccctcatccggatcagactccgagtcatcacagttgattgatacatctaagcttcgatcagctatccacgcacagaagagacccaagcgtctctcatcgattgcatcgacgggcactgcagcctcaaatgctagacgagtatcatcgatcggttctctcggcggtcacagacagagcagcagctatcccacgccctctttgtcttcgagcacaaacggaatctctaagcttcaacgcggcagtgcggaaagacgcagaagtccacctattacgtgttcaccgtctgagatgcaccttcgcgactccgcctcgaagacatcggcattcactgcgggacaggctagacgaatgaacatgggcggctctatgagagcctctgcgttcggtagcccaagcgagaagaaggagcaaggtgaaggtgcgaccggtactcgtcgtatcactattggtggtccggggatggctggtagcgcgaagaaggatagaagtgttgtttggcgatga

SEQ ID NO: 500 - protein, 1057 aa, Muscodor strobelii
  misc_feature: SGI Peptide ID NO. 559737
  misc_feature (16)..(381): Pfam Id: PF00225 Pfam Desc: Kinesin motor domain
  misc_feature (7)..(845): NCBI GI: 240111396 Blast Desc: kinesin, [Coccidioides posadasii C735 delta SOWgp]
  misc_feature (13)..(838): NCBI GI: 226292917 Blast Desc: kinesin heavy chain [Paracoccidioides brasiliensis Pb18]
  misc_feature (7)..(845): NCBI GI: 119189013 Blast Desc: CIMG_04554 [Coccidioides immitis RS]
  misc_feature (13)..(845): NCBI GI: 225562743 Blast Desc: kinesin family protein [Ajellomyces capsulatus G186AR]
  misc_feature (7)..(844): NCBI GI: 238843135 Blast Desc: kinesin family protein [Microsporum canis CBS 113480]
  misc_feature (13)..(851): NCBI GI: 226280790 Blast Desc: kinesin heavy chain [Paracoccidioides brasiliensis Pb01]
  misc_feature (13)..(845): NCBI GI: 240279554 Blast Desc: kinesin family protein [Ajellomyces capsulatus H143]
  misc_feature (13)..(845): NCBI GI: 154279780 Blast Desc: HCAG_04543 [Ajellomyces capsulatus NAm1] gi|150412646|gb|EDN08033.1| HCAG_04543 [Ajellomyces capsulatus NAm1]
  misc_feature (7)..(844): NCBI GI: 169594924 Blast Desc: SNOG_00193 [Phaeosphaeria nodorum SN15] gi|160700973|gb|EAT91688.2| SNOG_00193 [Phaeosphaeria nodorum SN15]
  misc_feature (89)..(958): NCBI GI: 164425688 Blast Desc: NCU06144 [Neurospora crassa OR74A] gi|157071022|gb|EAA30770.2| NCU06144 [Neurospora crassa OR74A]
MSAIDPGASSITVAVRVRPFTIREAAQLQRHDDGTVFLGDGSLAGAPTPKLKTNGIRSVIRVIDDRCLVFDPPEDNPVQKFSRSVVPNGKKVKDQTFAFDRIFDENVSQAEVYEATTKGLLDSVLDGYNATVFAYGATGCGKTHTITGTTQMPGIIFLTMQELFEKINDCSDEKHTEISLSYLEIYNETIRDLLLPGGSKQGLMLREDSNQAVTVPGLTSHHPKDVQEVMDMIVQGNEYRTVSPTCANATSSRSHAVLQINVAMKDRNAAVNEPHTMATLSIIDLAGSERASATKNRGERLVEGANINKSLLALGSCINALCDTRKKAHVPYRNSKLTRLLKFSLGGNCKTVMIVCVSPSSAHFDETQNTLRYANRAKNIQTKVTRNVFNVNRHVKDFLVKIDEQMALINELKAQQKDAERIFFAKFQKQQEKREAVAREGVLRIRQAYDNSLPERQDKVSHMKKLRGIERRIGLLSSWIAAFDTVCDMREDDAMPPSLETVRKTAQGILLELEDGRHHLHQKLDKTNWERAIDGALQHSISQLPTGDGQTDAGEIASLTREAELLKSNFAREAYRDVLEQDKAGDAGVMQILLTAQFEILTSLADMMSMSEEEAVSHARQTIHKLLETGFTAASQVVKPDGAKMPVEMYPPTKRGTPKRRRTSTMPKIDVKPIPNPVLAAVAEVEPQSMFASPMKGTPRRRKAVNTRKGVTFSPARKKTPSKRSVRWRDDDGESGTLADFASTPQKLNFTPEQQQLSPEKSLPLPQITEVPAFENDSAEETSPSLLAPEMSSLPVAKPNRFQAGFLSKSRPSQGGGSPVPPTMSLNLGSPSDSDDKPSPLRNLDLTRTANISAPKRYSSISPRPAPRLSPKSFSASLPMRVTSGDENNPPSSGSDSESSQLIDTSKLRSAIHAQKRPKRLSSIASTGTAASNARRVSSIGSLGGHRQSSSYPTPSLSSSTNGISKLQRGSAERRRSPPITCSPSEMHLRDSASKTSAFTAGQARRMNMGGSMRASAFGSPSEKKEQGEGATGTRRITIGGPGMAGSAKKDRSVVWR

SEQ ID NO: 501 - DNA, 174 bp, Muscodor strobelii
  misc_feature: SGI EST ID NO. CUFF.1354.0
  misc_feature: Variant of the nucleotide sequence at SEQ ID NO 499
cacgatgacggaacagtatttcttggagatggctccttagcgggagcacccactccgaaactcaaaacgaacggcatcagatctgtcatcagagtcattgacgaccggtgcttagtgttcgatcccccagaagacaacccagtccagaaattctcaagatctgtagtaccaaac

SEQ ID NO: 502 - DNA, 2052 bp, Muscodor strobelii
  misc_feature: SGI cDNA ID NO. 559738
  misc_feature: Encodes the peptide sequence at SEQ ID NO 503
atgaagctctctcctacagctgcgcttgccgctcttgcggcagtggcgcaggcgaacaagtcttccggccatctcatcaccaccacggtcaccgattggattccggtctggactacttcgcctgttttggtacactcgacggttactgagtctggagacggcgatgtcaagacacataccgtcgaagtgtctagttacatgtccgttataatcacttcgcctttccctcacgaggcaactatcactgagttggcatctaccgacatttcgaccaccagtcattctggcagtggccatacttggaacacggagtgcacgagcaacaaggtgtcagactgtcccatcacggcaactgatgagcaagtcttcaccagcacaatgcttccggtccctgtcaacaacctctcaagcatcgctaataagtcggcgaccacgtctcccttcactagcacgatgcttccggttcctgtcggcctctcaaccctctcgaccgcgctcgttgagccgacaacgtcgttccatttcactacctgtgcgcgacagactggtgatgcacgaacgactgtctgtcctcctcatccgtcttcttcctcatctcggccctatgaccacaacactccaccggactcagatctgaagacgacaacggatttggtctgggtcacttgcactgtgtttgcagagccatctgcagagccatcggtcacaatctttcgcgctgatgaaatcggtaaagaatgcagcactgcagtttccacacataatgatactgctaagtcacacagtcatactgctacgccttatggcacggagtctgcatcagagtcaattctcaccaccgtcgatatttatccaagctctacgaagactcacaagccccacagctcggagtcatcaatttctgagtcgttatcatggcccttttcgtggtcatcaggaactaccacatggacaatcccagtcactattctgacgacaccgagtcagctgtctacaatctcgtccgcgctgacggcagagctgacaacgggtatcgtttcatcggcgactgatgaccctcttacaaaaccctctccatggtggaacacatcatggtgggacacagtattgcccacctcggagacacaaacccaaacacatccggatgcaacgcatagtcccccagcctcggtgcctcacaattcctcgactgcggccggaatccctaccatgcctcctaagaagcgccccgacgccgaggaaacaagcacgtctcttaacatgacacggactcaccctacctcactcaacttcaactcctggacagctgtcggcaatcctaccttcacagcaccaggccatcaacgccctacacttacattcacacaaccaaagcccatcacaatcaatggtaccgtaacgagtatgacatggttcccggagacgggcaagccgaagccaactacaatctgtagcgaatcacatcacatgtcctcgcacaacagcagtatcgtcaagactctaccacctaagcccaccactacccctgatgtgtggacctctgtccactttcctcctcccggaaaggcgaactctacattccctcacatcacgatcccgctgaccatcatcacgacattggattggtctcctccgactagcaccgatcccgtggacactctccacccgcctcctccattcgggactcagatctccgcacagcctcccaagccgaccagtgagtcactcgatcccgtcggtcatctcacggtgaccccggtatcctccaaatctcgcggctcgaccgatgatacacccaacatgacaactccaacgggtcacatccctacaccagttactggtcctacggagggcgaacctatttcaactcaatatttgagtagctccgtggaggcaccgtctacgctgactgcgcagactaagacgacgcccactggtcagttcccaagaccgatcactgggcctactgatgatatgagtggattgactcatcatttgacgagacctactgaggctccttctacaatgcggactgttgttagacgtgattag

SEQ ID NO: 503 - protein, 683 aa, Muscodor strobelii
  misc_feature: SGI Peptide ID NO. 559738
MKLSPTAALAALAAVAQANKSSGHLITTTVTDWIPVWTTSPVLVHSTVTESGDGDVKTHTVEVSSYMSVIITSPFPHEATITELASTDISTTSHSGSGHTWNTECTSNKVSDCPITATDEQVFTSTMLPVPVNNLSSIANKSATTSPFTSTMLPVPVGLSTLSTALVEPTTSFHFTTCARQTGDARTTVCPPHPSSSSSRPYDHNTPPDSDLKTTTDLVWVTCTVFAEPSAEPSVTIFRADEIGKECSTAVSTHNDTAKSHSHTATPYGTESASESILTTVDIYPSSTKTHKPHSSESSISESLSWPFSWSSGTTTWTIPVTILTTPSQLSTISSALTAELTTGIVSSATDDPLTKPSPWWNTSWWDTVLPTSETQTQTHPDATHSPPASVPHNSSTAAGIPTMPPKKRPDAEETSTSLNMTRTHPTSLNFNSWTAVGNPTFTAPGHQRPTLTFTQPKPITINGTVTSMTWFPETGKPKPTTICSESHHMSSHNSSIVKTLPPKPTTTPDVWTSVHFPPPGKANSTFPHITIPLTIITTLDWSPPTSTDPVDTLHPPPPFGTQISAQPPKPTSESLDPVGHLTVTPVSSKSRGSTDDTPNMTTPTGHIPTPVTGPTEGEPISTQYLSSSVEAPSTLTAQTKTTPTGQFPRPITGPTDDMSGLTHHLTRPTEAPSTMRTVVRRD

SEQ ID NO: 504 - DNA, 732 bp, Muscodor strobelii
  misc_feature: SGI cDNA ID NO. 559739
  misc_feature: Encodes the peptide sequence at SEQ ID NO 505
atgatccgtgacgaatctgccttcgccaacggttggaacccgcccaaacttgatcgcacgatgacggacatctacaaaagcgaattctacaattcagactttactatcacgtcggcatccccgtcgccgcagatacggatcactctgccccttagcaacgggctattcgcgcaaaggctgcagaccgacaacactcggcacctaaaggcttcgcaatctcccgtatcttccgtgtcgcagggtagatcgccatcccgccagggctcgccgtacgcatcggccgtcaacgagttccccaagagcacaagccaggtacgtatggagtcagcacagcaacagcgcgagaagagggaagccgagcaggatgtcagggcactgcaacaacagctcacccggcacaaccagggctcacagtcacagctacagcagcaaggaacacccagtaccaactcgccaaaggacgctgtgtcagagttcaacgacttcgacagtgattcgaattttcctctgtttctgcctcaagtgaatgcaaccaacgacttcgttcctgtctacgatggcaacgccactgcagagcgcattcgacttctccattccgtcaaatatacagatcccacaacagcatctattcgtcgggagacaaaatacactgcagcagcagtcggcatcgtcagtgtcctcattctcacatataagctccacagaaacaacgacggcgagttcaggcaatag

SEQ ID NO: 505 - protein, 243 aa, Muscodor strobelii
  misc_feature: SGI Peptide ID NO. 559739
  misc_feature (15)..(179): NCBI GI: 171690196 Blast Desc: protein product [Podospora anserina] gi|170945046|emb|CAP71157.1| protein product [Podospora anserina]
  misc_feature (13)..(171): NCBI GI: 256729402 Blast Desc: NECHADRAFT_71246 [Nectria haematococca mpVI 77-13-4]
  misc_feature (14)..(171): NCBI GI: 85077320 Blast Desc: NCU01640 [Neurospora crassa OR74A] gi|18307454|emb|CAD21514.1| related to 26S proteasome subunit RPN4 [Neurospora crassa] gi|28917048|gb|EAA26772.1| [Neurospora
  misc_feature (15)..(177): NCBI GI: 39973453 Blast Desc: conserved [Magnaporthe grisea 70-15] gi|145017902|gb|EDK02181.1| conserved [Magnaporthe grisea 70-15]
  misc_feature (15)..(177): NCBI GI: 58257413 Blast Desc: 26S proteasome regulatory subunit-like protein [Magnaporthe grisea]
  misc_feature (13)..(171): NCBI GI: 46116892 Blast Desc: FG04288.1 [Gibberella zeae PH-1]
  misc_feature (15)..(173): NCBI GI: 156034492 Blast Desc: SS1G_13549 [Sclerotinia sclerotiorum 1980] gi|154698952|gb|EDN98690.1| SS1G_13549 [Sclerotinia sclerotiorum 1980]
  misc_feature (15)..(173): NCBI GI: 154295544 Blast Desc: BC1G_13397 [Botryotinia fuckeliana B05.10] gi|150844023|gb|EDN19216.1| BC1G_13397 [Botryotinia fuckeliana B05.10]
  misc_feature (23)..(171): NCBI GI: 116204843 Blast Desc: CHGG_10305 [Chaetomium globosum CBS 148.51] gi|88176433|gb|EAQ83901.1| CHGG_10305 [Chaetomium globosum CBS 148.51]
  misc_feature (15)..(173): NCBI GI: 145240307 Blast Desc: An08g06850 [Aspergillus niger] gi|134077316|emb|CAK45655.1| protein product [Aspergillus niger]
MIRDESAFANGWNPPKLDRTMTDIYKSEFYNSDFTITSASPSPQIRITLPLSNGLFAQRLQTDNTRHLKASQSPVSSVSQGRSPSRQGSPYASAVNEFPKSTSQVRMESAQQQREKREAEQDVRALQQQLTRHNQGSQSQLQQQGTPSTNSPKDAVSEFNDFDSDSNFPLFLPQVNATNDFVPVYDGNATAERIRLLHSVKYTDPTTASIRRETKYTAAAVGIVSVLILTYKLHRNNDGEFRQ

SEQ ID NO: 506 - DNA, 3630 bp, Muscodor strobelii
  misc_feature: SGI cDNA ID NO. 559740
  misc_feature: Reduced expression when VOC is produced
  misc_feature: Encodes the peptide sequence at SEQ ID NO 507
atggccgtcgacaagaagaacgacggccgccacaagaagatcgtgctgctctccgccatcggcaagacccacgagcccaaggccagcgtcgtcgacgacggcgccatccgcatcgtcctgtcccccgccgtccgtgtcaccccgggcgtgcccagaggtctggacgtccaagtcacaccccccggctccaagagcatatcgaaccgcgccctggttttggccgccctaggccagggcacatgccgcgtcaagaacctgctgcactctgacgatgtgcagtacatgttgtcggccatcgcccagctgggtggtgcgacctactcgtgggaggaggccggagaggttctggttgtcaccggcagaggcggcaagcttcagtcgagcgaggagcccctctacctcggcaatgccggcacagcctcgcgattcttgaccactgtcgtggccctgtgcgccccggccaagtccagctcgactgttctgacgggcaatgcacgcatgaaacagcggccaatcgggcctctggtcgatgccttgcggtccaatggcctcaagatcaattatcaaggcaaggaaggttgcttgcccgtgcaggtcgacgccgctgccggccttgacggcggtgtcatcgagcttgcagccaccatctcctcccaatacgtttcgtcgttgctgatgtgtgccccgtacgccaagaagcccgtcaccctgcgccttgtgggcgggaaacctatttcccagctgtatatcgatatgaccatcgctatgatggccaaattcggtgtcgtggtgactagggcccaggacgaggaacacacataccacattccccaaggtgtctaccaaaatccacccgagtatgttgtcgagagcgatgcgagctcagccacctatcctcttgctatcgctgccatcacgggaacaacctgtaccgtgcccaacatcggcaccagctcgctgcagggtgatgctcgctttgccgtcgatgttctccgtcccatgggctgtaaagtggagcagaccgagtcctccaccaccgtaactggaccgagccccggttccctgcacggcatcgaggtggatatggagcctatgacggatgcgttcttaacggcgtccgttctggctgctgtagcctcgggcaagaccaccatcaccggcatcgccaaccaacgtgtcaaggaatgcaatcgtatcgccgccatgcgggtgcaattagctaagttcggggtcgaatgcgaagagctagacgatggcatcatcgtctctggacagaagactttgtccgagccttcgggggccatttactgctacgatgatcaccgcgtggccatgagtttcagcgtattggccgtcgcatcacctcaccccgtggtggtcatggaacgtgagtgcaccgccaagacttggcccggttggtgggatatactggcacaatcgttccaggtctcgctatctggagataccactgccgtcgatgatactcatacgtctcaaaaagacgatgccggaccttcggttttcatcattggcatgcgcggcgcaggcaagacgactactggtggttggatgggcaatattttgggccgaccgttcatcgacttggatcatgagcttgagcggcgcgccggtatgacaatccccgaaatgatccgcgatagctctcagggctgggaaggcttccgccgcgacgagcttgcgcttttgcgagatgtcttgaagaaccaaggccgtggccacgtcttctcttgcggtggcggcatcgtcgagacccccgaggcacgagagctactcatctcgcaccatcgcaatggcggtgttgtgctcctcgtgcatcgcgatactgagcaaaatgtagaatatctcatgcgcgacaagacccgcccggcgtactcggaggagattcggggcgtgtacgaaagacgcaagcctttgttccaagagtgcagtaattacgagtatcatagtccgtacctcgatccatccggtggtcttcgtgatcctccgccggacttcatacggtttgcttcgatgatcagcggcaggaatcctcactttgaggagatcaagaagaagaagccctctttcttcgtagctttaaccctacccaatgtctcttcggcattggaggtgatcccgcgggtgtgcgtagggtccgatgccgtcgagctgcgcgtcgatcttctcgatgatttgtcgcctgagaatgtgggcaatcaaatctcattactgcggtcggctaccaagctccccatcatattcacgttacgctccaagtcgcaagggggtcgatttgactattcatccgaagacgaactgttgccattattcaaaacagctatgcgcataggtgtcgagtacgttgacctggaaatgtcactctctaatgccactctagatgccattctgaagatgcgcgctggctctacacgcgtgatcgcctcccaccacgacccggcgggtaagctttcctggaagaatggcggatggcagtcgtggtacaatcgagcattggagtacggcgatgtcatcaagctggtgggcgtggcaggtaagcttgaagataactttgctctcgccgaattcagggataggatgttcgctgcgcatggcagacccatcatcgctctcaatatgggcaccaccggaaagttatcgcgagttctcaatcgtttccttactcccgtctctcatcccgatcttcccttcaaagctgctcctgggcagctttcggcggctgagattcgccaaggtcttacgctgattggagaacttgagcggaaaagcttctaccttttcggaagtcctattcaaaagtcgaggtcccccgcactacataacactctcttcaggcagaccggccttccgcatgagtacagcatattcgagacggagaatgtagctgatttcaaggacttgattcgggccccagagtttgggggtgcctcggtcacgataccactgaagctagacatcatgccactgcttgacgacgtgtcagatgccgccaaagtcatcggagccgtcaacaccatcatccctacactctcaccagatggtaccgcacgtcttctcggcgataacacggactggcagggcatggtatattctctacatgccacaggcttcgaatcacccagcgccgaccatgccaccagtggtatggtcatcggatccggcggcacgacgcgagctgcggtctacgcactgcactcccttggcctcagccccatctaccttgtagcacggaataagcagactgtcgaagctctctgctcctcgttcccaagtgactacaagcttgtgcatgtcgaggacgcgagccatgtgcgacaactgccgagcgtgatcatcagcacggtacctgctgatcgggctgtcgaatcatcaatgcgcgaaattctcgtctcggtactgagacaacctagacaagcgggcaggctgcggatctttttggaaatggcgtaccagccgaggcacaccgccctgatgggacttgctgaggactcgggttggatttcggttccaggcctggaggtgcttacgagtcagggcttctatcagttccaacgatggaccggtatcacgcccgtcttctcggatgctcgagcagcggtcctcggcgaataa

SEQ ID NO: 507 - protein, 1209 aa, Muscodor strobelii
  misc_feature: SGI Peptide ID NO. 559740
  misc_feature (696)..(918): Pfam Id: PF01487 Pfam Desc: Type I 3-dehydroquinase
  misc_feature (46)..(477): Pfam Id: PF00275 Pfam Desc: EPSP synthase (3-phosphoshikimate 1-carboxyvinyltransferase)
  misc_feature (1039)..(1164): Pfam Id: PF01488 Pfam Desc: Shikimate / quinate 5-dehydrogenase
  misc_feature (932)..(1012): Pfam Id: PF08501 Pfam Desc: Shikimate dehydrogenase substrate binding domain
  misc_feature (513)..(680): Pfam Id: PF01202 Pfam Desc: Shikimate kinase
  misc_feature (1055)..(1164): Pfam Id: PF01488 Pfam Desc: Shikimate / quinate 5-dehydrogenase
  misc_feature (513)..(664): Pfam Id: PF01202 Pfam Desc: Shikimate kinase
  misc_feature (1)..(1208): NCBI GI: 85077284 Blast Desc: pentafunctional AROM polypeptide [Neurospora crassa OR74A] gi|18376380|emb|CAD21207.1| PENTAFUNCTIONAL AROM POLYPEPTIDE [Neurospora crassa] gi|28917040|gb|EAA26764.1| AROM
  misc_feature (1)..(1209): NCBI GI: 171690198 Blast Desc: protein product [Podospora anserina] gi|170945047|emb|CAP71158.1| protein product [Podospora anserina]
  misc_feature (1)..(1208): NCBI GI: 256729198 Blast Desc: [Nectria haematococca mpVI 77-13-4]
  misc_feature (1)..(1208): NCBI GI: 116204841 Blast Desc: CHGG_10304 [Chaetomium globosum CBS 148.51] gi|88176432|gb|EAQ83900.1| CHGG_10304 [Chaetomium globosum CBS 148.51]
  misc_feature (14)..(1209): NCBI GI: 46116890 Blast Desc: FG04287.1 [Gibberella zeae PH-1]
  misc_feature (1)..(1209): NCBI GI: 261354892 Blast Desc: pentafunctional AROM polypeptide [Verticillium albo-atrum VaMs.102]
  misc_feature (1)..(1209): NCBI GI: 156034494 Blast Desc: SS1G_13550 [Sclerotinia sclerotiorum 1980] gi|154698953|gb|EDN98691.1| SS1G_13550 [Sclerotinia sclerotiorum 1980]
  misc_feature (1)..(1188): NCBI GI: 53854589 Blast Desc: arom [Sclerotinia sclerotiorum]
  misc_feature (1)..(1188): NCBI GI: 145610533 Blast Desc: MGG_01128 [Magnaporthe grisea 70-15] gi|145017901|gb|EDK02180.1| MGG_01128 [Magnaporthe grisea 70-15]
  misc_feature (1)..(1208): NCBI GI: 119495188 Blast Desc: pentafunctional polypeptide (AroM), [Neosartorya fischeri NRRL 181] gi|119412546|gb|EAW22487.1| pentafunctional polypeptide (AroM), [Neosartorya fischeri NRRL 181]
  misc_feature (1)..(1205): SWISSPROT Homolog: EC 4.2.1.10 3-dehydroquinate dehydratase
  misc_feature (1)..(1205): SWISSPROT Homolog: EC 4.2.3.4 3-dehydroquinate synthase
  misc_feature (1)..(1205): SWISSPROT Homolog: EC 2.5.1.19 3-phosphoshikimate 1-carboxyvinyltransferase
  misc_feature (1)..(1205): SWISSPROT Homolog: EC 2.7.1.71 Shikimate kinase
  misc_feature (1)..(1205): SWISSPROT Homolog: EC 1.1.1.25 Shikimate dehydrogenase
  misc_feature: Useful for introducing or modulating the production of volatile compounds
MAVDKKNDGRHKKIVLLSAIGKTHEPKASVVDDGAIRIVLSPAVRVTPGVPRGLDVQVTPPGSKSISNRALVLAALGQGTCRVKNLLHSDDVQYMLSAIAQLGGATYSWEEAGEVLVVTGRGGKLQSSEEPLYLGNAGTASRFLTTVVALCAPAKSSSTVLTGNARMKQRPIGPLVDALRSNGLKINYQGKEGCLPVQVDAAAGLDGGVIELAATISSQYVSSLLMCAPYAKKPVTLRLVGGKPISQLYIDMTIAMMAKFGVVVTRAQDEEHTYHIPQGVYQNPPEYVVESDASSATYPLAIAAITGTTCTVPNIGTSSLQGDARFAVDVLRPMGCKVEQTESSTTVTGPSPGSLHGIEVDMEPMTDAFLTASVLAAVASGKTTITGIANQRVKECNRIAAMRVQLAKFGVECEELDDGIIVSGQKTLSEPSGAIYCYDDHRVAMSFSVLAVASPHPVVVMERECTAKTWPGWWDILAQSFQVSLSGDTTAVDDTHTSQKDDAGPSVFIIGMRGAGKTTTGGWMGNILGRPFIDLDHELERRAGMTIPEMIRDSSQGWEGFRRDELALLRDVLKNQGRGHVFSCGGGIVETPEARELLISHHRNGGVVLLVHRDTEQNVEYLMRDKTRPAYSEEIRGVYERRKPLFQECSNYEYHSPYLDPSGGLRDPPPDFIRFASMISGRNPHFEEIKKKKPSFFVALTLPNVSSALEVIPRVCVGSDAVELRVDLLDDLSPENVGNQISLLRSATKLPIIFTLRSKSQGGRFDYSSEDELLPLFKTAMRIGVEYVDLEMSLSNATLDAILKMRAGSTRVIASHHDPAGKLSWKNGGWQSWYNRALEYGDVIKLVGVAGKLEDNFALAEFRDRMFAAHGRPIIALNMGTTGKLSRVLNRFLTPVSHPDLPFKAAPGQLSAAEIRQGLTLIGELERKSFYLFGSPIQKSRSPALHNTLFRQTGLPHEYSIFETENVADFKDLIRAPEFGGASVTIPLKLDIMPLLDDVSDAAKVIGAVNTIIPTLSPDGTARLLGDNTDWQGMVYSLHATGFESPSADHATSGMVIGSGGTTRAAVYALHSLGLSPIYLVARNKQTVEALCSSFPSDYKLVHVEDASHVRQLPSVIISTVPADRAVESSMREILVSVLRQPRQAGRLRIFLEMAYQPRHTALMGLAEDSGWISVPGLEVLTSQGFYQFQRWTGITPVFSDARAAVLGE

SEQ ID NO: 508 - DNA, 4249 bp, Muscodor strobelii
  misc_feature: SGI EST ID NO. CUFF.1789.0
  misc_feature: Variant of the nucleotide sequence at SEQ ID NO 506
cgacaagaagaacgacggccgccacaagaagatcgtgctgctctccgccatcggcaagacccacgagcccaaggccagcgtcgtcgacgacggcgccatccgcatcgtcctgtcccccgccgtccgtgtcaccccgggcgtgcccagaggtctggacgtccaagtcacaccccccggctccaagagcatatcgaaccgcgccctggttttggccgccctaggccagggcacatgccgcgtcaagaacctgctgcactctgacgatgtgcagtacatgttgtcggccatcgcccagctgggtggtgcgacctactcgtgggaggaggccggagaggttctggttgtcaccggcagaggcggcaagcttcagtcgagcgaggagcccctctacctcggcaatgccggcacagcctcgcgattcttgaccactgtcgtggccctgtgcgccccggccaagtccagctcgactgttctgacgggcaatgcacgcatgaaacagcggccaatcgggcctctggtcgatgccttgcggtccaatggcctcaagatcaattatcaaggcaaggaaggttgcttgcccgtgcaggtcgacgccgctgccggccttgacggcggtgtcatcgagcttgcagccaccatctcctcccaatacgtttcgtcgttgctgatgtgtgccccgtacgccaagaagcccgtcaccctgcgccttgtgggcgggaaacctatttcccagctgtatatcgatatgaccatcgctatgatggccaaattcggtgtcgtggtgactagggcccaggacgaggaacacacataccacattccccaaggtgtctaccaaaatccacccgagtatgttgtcgagagcgatgcgagctcagccacctatcctcttgctatcgctgccatcacgggaacaacctgtaccgtgcccaacatcggcaccagctcgctgcagggtgatgctcgctttgccgtcgatgttctccgtcccatgggctgtaaagtggagcagaccgagtcctccaccaccgtaactggaccgagccccggttccctgcacggcatcgaggtggatatggagcctatgacggatgcgttcttaacggcgtccgttctggctgctgtagcctcgggcaagaccaccatcaccggcatcgccaaccaacgtgtcaaggaatgcaatcgtatcgccgccatgcgggtgcaattagctaagttcggggtcgaatgcgaagagctagacgatggcatcatcgtctctggacagaagactttgtccgagccttcgggggccatttactgctacgatgatcaccgcgtggccatgagtttcagcgtattggccgtcgcatcacctcaccccgtggtggtcatggaacgtgagtgcaccgccaagacttggcccggttggtgggatatactggcacaatcgttccaggtctcgctatctggagataccactgccgtcgatgatactcatacgtctcaaaaagacgatgccggaccttcggttttcatcattggcatgcgcggcgcaggcaagacgactactggtggttggatgggcaatattttgggccgaccgttcatcgacttggatcatgagcttgagcggcgcgccggtatgacaatccccgaaatgatccgcgatagctctcagggctgggaaggcttccgccgcgacgagcttgcgcttttgcgagatgtcttgaagaaccaaggccgtggccacgtcttctcttgcggtggcggcatcgtcgagacccccgaggcacgagagctactcatctcgcaccatcgcaatggcggtgttgtgctcctcgtgcatcgcgatactgagcaaaatgtagaatatctcatgcgcgacaagacccgcccggcgtactcggaggagattcggggcgtgtacgaaagacgcaagcctttgttccaagagtgcagtaattacgagtatcatagtccgtacctcgatccatccggtggtcttcgtgatcctccgccggacttcatacggtttgcttcgatgatcagcggcaggaatcctcactttgaggagatcaagaagaagaagccctctttcttcgtagctttaaccctacccaatgtctcttcggcattggaggtgatcccgcgggtgtgcgtagggtccgatgccgtcgagctgcgcgtcgatcttctcgatgatttgtcgcctgagaatgtgggcaatcaaatctcattactgcggtcggctaccaagctccccatcatattcacgttacgctccaagtcgcaagggggtcgatttgactattcatccgaagacgaactgttgccattattcaaaacagctatgcgcataggtgtcgagtacgttgacctggaaatgtcactctctaatgccactctagatgccattctgaagatgcgcgctggctctacacgcgtgatcgcctcccaccacgacccggcgggtaagctttcctggaagaatggcggatggcagtcgtggtacaatcgagcattggagtacggcgatgtcatcaagctggtgggcgtggcaggtaagcttgaagataactttgctctcgccgaattcagggataggatgttcgctgcgcatggcagacccatcatcgctctcaatatgggcaccaccggaaagttatcgcgagttctcaatcgtttccttactcccgtctctcatcccgatcttcccttcaaagctgctcctgggcagctttcggcggctgagattcgccaaggtcttacgctgattggagaacttgagcggaaaagcttctaccttttcggaagtcctattcaaaagtcgaggtcccccgcactacataacactctcttcaggcagaccggccttccgcatgagtacagcatattcgagacggagaatgtagctgatttcaaggacttgattcgggccccagagtttgggggtgcctcggtcacgataccactgaagctagacatcatgccactgcttgacgacgtgtcagatgccgccaaagtcatcggagccgtcaacaccatcatccctacactctcaccagatggtaccgcacgtcttctcggcgataacacggactggcagggcatggtatattctctacatgccacaggcttcgaatcacccagcgccgaccatgccaccagtggtatggtcatcggatccggcggcacgacgcgagctgcggtctacgcactgcactcccttggcctcagccccatctaccttgtagcacggaataagcagactgtcgaagctctctgctcctcgttcccaagtgactacaagcttgtgcatgtcgaggacgcgagccatgtgcgacaactgccgagcgtgatcatcagcacggtacctgctgatcgggctgtcgaatcatcaatgcgcgaaattctcgtctcggtactgagacaacctagacaagcgggcaggctgcggatctttttggaaatggcgtaccagccgaggcacaccgccctgatgggacttgctgaggactcgggttggatttcggttccaggcctggaggtgcttacgagtcagggcttctatcagttccaacgatggaccggtatcacgcccgtcttctcggatgctcgagcagcggtcctcggcgaataattcaaggctgcccttcggtctctctaccgggatcaccctcaacatgtagaataacagctccgggcggctgatgcttaacatattcacatatcatcatcatactggttggcgtttaaaacggagcaagagacgaattataattgaggctcaagaataactgattttgcatatacaattcactcatattcatcaacccgatgcccagcatttcgcgtacttgttctgcttcatctcacgtgaaactcacaaatagcaagtttgaacaacctggtttcaacaaacttagcaaccgagcaactattaaatgttaccaggatctggagcgtgctatagccagtgcagactgtatcaacttgtctcatgctatctatatcgcacgtatcaggcatatgcgcgcaagggttttggatgtataaagcattggacacatgtccagggaacaagacaagataatgaatgttcgaagccacgaaatacaatgtcacatccgctcatcctcactacaactccaagacccaatacgtggctcatctgccaggtcagtgcgtgaatagagacctatacgacctaagccagcatacactaagtatgcccaactcaccgtcgttcgcctaattcgagaaagac

SEQ ID NO: 509 - DNA, 2166 bp, Muscodor strobelii
  misc_feature: SGI cDNA ID NO. 559741
  misc_feature: Reduced expression when VOC is produced
  misc_feature: Encodes the peptide sequence at SEQ ID NO 510
atgctcgcacatcctacatatccctcgaggaatcaccagcccaaccctttcttcttcggacagcaatcacgatcacagcagcgcttcccacagcagcagcagcagcagcaacaacagcaacacttctcgtcgttctcacaacaggcgcatcccgccgacttctcgacgacgttagagaacatccccgccgccgccgccgccatcgccgccacccagcgataccgctcgacgcccgccaccctggccacgatacagtcgctcgaccactcacacgcggcctccgacctgatgtcctcggactcgtggatggtgcagggccaaccacagcagcagcagcagcagccgtcaacgccgcggcacacgcagcgtttcggccaccagagggactcgtcgctgtcgtcggtgggctccaacacgcccgcgtcgccgtacaccgccaacactgcgaacccccagatcgccgtcaccgactcgctgggcgatgggctgcccgacatcacgggcgtcgacagcaactacacctacgccatcacgaagccgctgcccatgggcggcaacttctacaccagcgctctcggcccttttgctgctagcggcggcgtcagcacccagaatgtcgtccccgacgtcgcaatggctgacggcctgcccgcgctgacgggagcacagcagcacccgcagacccagaggcagaggggcttggcaccagcctcagatctgtccgtcagtggctccagcaggtcacgccccgtgtccgtggcgagttctgtcggtggcgactcgccagcaaccccttcgttccacgagcccgaggacgagggcagaagatccaagaatggtgaggatccctccgctgctcccgactttctcctattcgacccgacatatgatgatgatgatgaccgcttacatttccgcctcgacgctacagcctacaccaacggcgtgaatccgcccaagctcgaccgcaccatgacggacatttacaacgacgagctctacaaccccaacttcaccatcacatccgcctctccgtcgccgcagacgcagatcgccctgtcgcccagcaacgagttgttcgcgcagaggctgcaggccgccaacagccagcacctgagcgccgcccagtctcccgtgtcgagcatatcacgggacaggtcgcccttccgccagggctcgccgtatgccgccgccgtcaacgagtttcccaagggctcggcgcaggtgcgcatggagtcggcacagcagcagcgcgagaggcgcaaggccgagcaggacgccaaagctttgcagcagcaactagcccggcatcaccaggagtcgcagtcgcagccacagcagcagggaacacctagcacgatctcgcccaaggacgcagtgctggagttcaacgacctggacgcggactcgaacttccccctgttcccacctcaagagacgggcagcttcggcatgagcaacaacaacgtgtctggaaacatgggcatgatgaagacggcatcgcagcagccgacatcttcgcttcagtcgatgtcggcggcgcccctgcagagcgcctttaacttctccatgccatcgaacatccagatcccccaacaatatccatttgtggggagacaagcgacacagcagcagcagtcaacgccgtcggcgtcgtcattctcgcgcatgagctctgcggaagcgagtacagcgagtatgggcaccaacgatgggcccgtccagcgtccggcgagaacttcagctgacggtggcggtacatacacatgtacttaccatggctgcacactgagattcgagacccctgcgttattacagaagcacaagcgagaaggtcacaggcaagcaaatgctctgaatcatctacggaaccccaccaacatcagtctctcacctgcgaacccggccaacagtcaggccggaccgcaccgctgtgagaggattaacccgagcacgggcaagccgtgtaacaccgttttctcgcggccctacgatcttacgaggcatgaggataccatacacaacgcccgcaagcaaaaggtacgatgtgacctctgcacagaggagaagacatttagccgtgcggacgcattgacaagacactaccgcgtatgtcaccccgacgtggagctccctggcaagcatcgcagacgagtcatcggatga

SEQ ID NO: 510 - protein, 721 aa, Muscodor strobelii
  misc_feature: SGI Peptide ID NO. 559741
  misc_feature (588)..(613): Pfam Id: PF00096 Pfam Desc: Zinc finger, C2H2 type
  misc_feature (95)..(718): NCBI GI: 171690196 Blast Desc: protein product [Podospora anserina] gi|170945046|emb|CAP71157.1| protein product [Podospora anserina]
  misc_feature (94)..(718): NCBI GI: 256729402 Blast Desc: NECHADRAFT_71246 [Nectria haematococca mpVI 77-13-4]
  misc_feature (94)..(720): NCBI GI: 39973453 Blast Desc: conserved [Magnaporthe grisea 70-15] gi|145017902|gb|EDK02181.1| conserved [Magnaporthe grisea 70-15]
  misc_feature (94)..(720): NCBI GI: 58257413 Blast Desc: 26S proteasome regulatory subunit-like protein [Magnaporthe grisea]
  misc_feature (94)..(719): NCBI GI: 85077320 Blast Desc: NCU01640 [Neurospora crassa OR74A] gi|18307454|emb|CAD21514.1| related to 26S proteasome subunit RPN4 [Neurospora crassa] gi|28917048|gb|EAA26772.1| [Neurospora
  misc_feature (95)..(718): NCBI GI: 116204843 Blast Desc: CHGG_10305 [Chaetomium globosum CBS 148.51] gi|88176433|gb|EAQ83901.1| CHGG_10305 [Chaetomium globosum CBS 148.51]
  misc_feature (94)..(707): NCBI GI: 46116892 Blast Desc: FG04288.1 [Gibberella zeae PH-1]
  misc_feature (214)..(721): NCBI GI: 156034492 Blast Desc: SS1G_13549 [Sclerotinia sclerotiorum 1980] gi|154698952|gb|EDN98690.1| SS1G_13549 [Sclerotinia sclerotiorum 1980]
  misc_feature (254)..(718): NCBI GI: 115492081 Blast Desc: conserved [Aspergillus terreus NIH2624] gi|114197528|gb|EAU39228.1| conserved [Aspergillus terreus NIH2624]
  misc_feature (316)..(718): NCBI GI: 145240307 Blast Desc: An08g06850 [Aspergillus niger] gi|134077316|emb|CAK45655.1| protein product [Aspergillus niger]
  misc_feature: Useful for introducing or modulating the production of volatile compounds
MLAHPTYPSRNHQPNPFFFGQQSRSQQRFPQQQQQQQQQQHFSSFSQQAHPADFSTTLENIPAAAAAIAATQRYRSTPATLATIQSLDHSHAASDLMSSDSWMVQGQPQQQQQQPSTPRHTQRFGHQRDSSLSSVGSNTPASPYTANTANPQIAVTDSLGDGLPDITGVDSNYTYAITKPLPMGGNFYTSALGPFAASGGVSTQNVVPDVAMADGLPALTGAQQHPQTQRQRGLAPASDLSVSGSSRSRPVSVASSVGGDSPATPSFHEPEDEGRRSKNGEDPSAAPDFLLFDPTYDDDDDRLHFRLDATAYTNGVNPPKLDRTMTDIYNDELYNPNFTITSASPSPQTQIALSPSNELFAQRLQAANSQHLSAAQSPVSSISRDRSPFRQGSPYAAAVNEFPKGSAQVRMESAQQQRERRKAEQDAKALQQQLARHHQESQSQPQQQGTPSTISPKDAVLEFNDLDADSNFPLFPPQETGSFGMSNNNVSGNMGMMKTASQQPTSSLQSMSAAPLQSAFNFSMPSNIQIPQQYPFVGRQATQQQQSTPSASSFSRMSSAEASTASMGTNDGPVQRPARTSADGGGTYTCTYHGCTLRFETPALLQKHKREGHRQANALNHLRNPTNISLSPANPANSQAGPHRCERINPSTGKPCNTVFSRPYDLTRHEDTIHNARKQKVRCDLCTEEKTFSRADALTRHYRVCHPDVELPGKHRRRVIG

SEQ ID NO: 511 - DNA, 3858 bp, Muscodor strobelii
  misc_feature: SGI EST ID NO. CUFF.1798.0
  misc_feature: Variant of the nucleotide sequence at SEQ ID NO 509
catataatgagcccaagcccagcgaagagggctcggaaaagagtccgcagatggacaagcgaggtgtgactaagatacctcttacactattagtgagctcgggcttgggcgcttgttcctcgcggccgctcgtacagacgctcgcacaagtctccatagccacaccctccccttgtctgtttttgtggagacgtgacgatcagggtgtgggagacccttgtacgggcagtatagtcgtcgacttccacagccaggccgttgggagagagggactgcgggctgccatttagactttgttgtatatatgaacgtctttgccaccttctcacaattgtcttcttcccaccccacacaatcaacttaatcctgacaaatctcggcctgtcatcgatcgccttcgacagcctaccaacacgaccaacaacaccgcacagtctcacaagtacactcacaacagctttagtcagaaactctaccaccatgctcgcacatcctacatatccctcgaggaatcaccagcccaaccctttcttcttcggacagcaatcacgatcacagcagcgcttcccacagcagcagcagcagcagcaacaacagcaacacttctcgtcgttctcacaacaggcgcatcccgccgacttctcgacgacgttagagaacatccccgccgccgccgccgccatcgccgccacccagcgataccgctcgacgcccgccaccctggccacgatacagtcgctcgaccactcacacgcggcctccgacctgatgtcctcggactcgtggatggtgcagggccaaccacagcagcagcagcagcagccgtcaacgccgcggcacacgcagcgtttcggccaccagagggactcgtcgctgtcgtcggtgggctccaacacgcccgcgtcgccgtacaccgccaacactgcgaacccccagatcgccgtcaccgactcgctgggcgatgggctgcccgacatcacgggcgtcgacagcaactacacctacgccatcacgaagccgctgcccatgggcggcaacttctacaccagcgctctcggcccttttgctgctagcggcggcgtcagcacccagaatgtcgtccccgacgtcgcaatggctgacggcctgcccgcgctgacgggagcacagcagcacccgcagacccagaggcagaggggcttggcaccagcctcagatctgtccgtcagtggctccagcaggtcacgccccgtgtccgtggcgagttctgtcggtggcgactcgccagcaaccccttcgttccacgagcccgaggacgagggcagaagatccaagaatggtgaggatccctccgctgctcccgactttctcctattcgacccgacatatgatgatgatgatgaccgcttacatttccgcctcgacgctacagcctacaccaacggcgtgaatccgcccaagctcgaccgcaccatgacggacatttacaacgacgagctctacaaccccaacttcaccatcacatccgcctctccgtcgccgcagacgcagatcgccctgtcgcccagcaacgagttgttcgcgcagaggctgcaggccgccaacagccagcacctgagcgccgcccagtctcccgtgtcgagcatatcacgggacaggtcgcccttccgccagggctcgccgtatgccgccgccgtcaacgagtttcccaagggctcggcgcaggtgcgcatggagtcggcacagcagcagcgcgagaggcgcaaggccgagcaggacgccaaagctttgcagcagcaactagcccggcatcaccaggagtcgcagtcgcagccacagcagcagggaacacctagcacgatctcgcccaaggacgcagtgctggagttcaacgacctggacgcggactcgaacttccccctgttcccacctcaagagacgggcagcttcggcatgagcaacaacaacgtgtctggaaacatgggcatgatgaagacggcatcgcagcagccgacatcttcgcttcagtcgatgtcggcggcgcccctgcagagcgcctttaacttctccatgccatcgaacatccagatcccccaacaatatccatttgtggggagacaagcgacacagcagcagcagtcaacgccgtcggcgtcgtcattctcgcgcatgagctctgcggaagcgagtacagcgagtatgggcaccaacgatgggcccgtccagcgtccggcgagaacttcagctgacggtggcggtacatacacatgtacttaccatggctgcacactgagattcgagacccctgcgttattacagaagcacaagcgagaaggtcacaggcaagcaaatgctctgaatcatctacggaaccccaccaacatcagtctctcacctgcgaacccggccaacagtcaggccggaccgcaccgctgtgagaggattaacccgagcacgggcaagccgtgtaacaccgttttctcgcggccctacgatcttacgaggcatgaggataccatacacaacgcccgcaagcaaaaggtacgatgtgacctctgcacagaggagaagacatttagccgtgcggacgcattgacaagacactaccgcgtatgtcaccccgacgtggagctccctggcaagcatcgcagacgagtcatcggatgatgaggcgcgacaagctgaggccgcccacctgtctccgattgccacgttgcacacggtcggcaaccgaacagagtggcttgcatcggcccatgggtggtggtgatggacgaccacacggcgatggctactggtagaagcttcggagagcttcgctggcggccggaccatgtggttgcactgttgcaaagctcgcgacgatcaacggtcgaaaatcagggtccagcgttactagtctcatgcagggtcttgcggggttccagcagaaccctgcagaatactgcagaaccctagcagcccacttcgacgaggcccaatcaatgcgccgatctctcgcgcatcattggctgcgcacaccacttttatgacgcccgcccacgctcctctgcatcatccgagtaaccacctacgtcatgctccacagcaggtctatcccctcagaggtccaactccccgatcttgacgacaccatgctcacccattttccggcaaaatgtgcttcaacacatacccatatcacccaccgtcacgaatcatgcattatgatgtcttctgttgtatggaattcgcttccctactcgtcttatctatgctttctacataccagcccatgctatataccaccagtgggagggtgtctcattagcattcatgagacctccgcggaccgacgagtcaaaacaaatcgttttctttttactacgtcatgtaatggtgcaatgtaccagagtgtcagtcctgggtaaaggtgacatacctacctactggtacatttctggcgcaaacactgctataatacttttcctatcacccttttcttggcttcttgtatatttatttattcactatcttctttgaacttttcattgggctaaaatttgggaacaaaatacttggataattgtattgctactcacagtttggcgttattttgggtcgagcagtgtgtatgttcacgcacgcaatacattatagactgtatctacgacgcaacgacgagatgtacgagcgcaatctagacgggcgggcccaatgacgaaacaaatggtacctgagatatgggacacggaaaaatcggggatgggagtcctgtacgatggagagcattcaatagactgacactcgggatcagatgatcccacgagtgtagaatcattttcatagtcaaaaagataccttaattatttcttctcattgatacatcgtcaaaatcca

SEQ ID NO: 512 - DNA, 879 bp, Muscodor strobelii
  misc_feature: SGI cDNA ID NO. 559742
  misc_feature: Encodes the peptide sequence at SEQ ID NO 513
atgagcggaggaccaggcggcggcacaccacagtgcctcgaagaagactacagcggccaattctttgtgcctgcgggcgccgacacgtaccatgccggtgataaagtcatggtcgggtggtacggtgggaagacgcctatcactgggtacacaacactgtccgtcaatctcatacttgaagaaaggtcaccggatcttaatagtgtcgacatcgtgaatggtgcaacatatagcttcaacgacaccgctagcccgacctgggtatctatagatgtatgtggaaacacggagctttattacagctggaccgttccctcgaatctcgatgtctcggctggcgcgaagtacaagatgtacgcacagaacgcatcgggcgaaggtaccgtcaacatggcggtgagcgagctcttcctgatcgcagccttgaagtcctcctcaactacctcatcgatgatatcgaccaccagcacatccggtacctcgagtacattgagcacagctacatcttcgcaagcgcagtcccccaccgacacctcagcaccaccgtcttctccactcggactatcaacaggcgccaaagcagggattggtgtcggtgtatccgttggcgtgatcttggtgctattggtaacattcttgttctggagacgcaggaagcagacccctgccccagtagaagcggaacgctttgaaaaggctgaactggacggcaaagcagagatgccgcgtaacgaggccgggggcgaggctatcatggagatggatggagatgcatatcagcgggaaccggcagagctctacgccggcggtattccacatcaccaagctggcaatgatggacctgtctcccatgcgagcgctggagaaagagaaaggtga

SEQ ID NO: 513 - protein, 292 aa, Muscodor strobelii
  misc_feature: SGI Peptide ID NO. 559742
  misc_feature (124)..(240): NCBI GI: 238843368 Blast Desc: conserved [Microsporum canis CBS 113480]
  misc_feature (169)..(223): NCBI GI: 116197397 Blast Desc: CHGG_06854 [Chaetomium globosum CBS 148.51] gi|88178133|gb|EAQ85601.1| CHGG_06854 [Chaetomium globosum CBS 148.51]
  misc_feature (187)..(266): NCBI GI: 67901614 Blast Desc: AN7794.2 [Aspergillus nidulans FGSC A4] gi|40742392|gb|EAA61582.1| AN7794.2 [Aspergillus nidulans FGSC A4] gi|259484148|tpe|CBF80121.1| TPA: conserved [Aspergillus FGSC
  misc_feature (187)..(229): NCBI GI: 256729031 Blast Desc: NECHADRAFT_40333 [Nectria haematococca mpVI 77-13-4]
  misc_feature (122)..(266): NCBI GI: 242806800 Blast Desc: conserved [Talaromyces stipitatus ATCC 10500] gi|218715445|gb|EED14867.1| conserved [Talaromyces stipitatus ATCC 10500]
  misc_feature (187)..(219): NCBI GI: 256725647 Blast Desc: NECHADRAFT_81588 [Nectria haematococca mpVI 77-13-4]
  misc_feature (144)..(220): NCBI GI: 261194054 Blast Desc: conserved [Ajellomyces dermatitidis SLH14081] gi|239588446|gb|EEQ71089.1| conserved [Ajellomyces dermatitidis SLH14081]
  misc_feature (144)..(220): NCBI GI: 239606988 Blast Desc: conserved [Ajellomyces dermatitidis ER-3]
  misc_feature (1)..(60): NCBI GI: 116197565 Blast Desc: [Chaetomium globosum CBS 148.51] gi|88178217|gb|EAQ85685.1| [Chaetomium globosum CBS 148.51]
  misc_feature (191)..(282): NCBI GI: 156060363 Blast Desc: [Sclerotinia sclerotiorum 1980] gi|154699728|gb|EDN99466.1| [Sclerotinia sclerotiorum 1980]
MSGGPGGGTPQCLEEDYSGQFFVPAGADTYHAGDKVMVGWYGGKTPITGYTTLSVNLILEERSPDLNSVDIVNGATYSFNDTASPTWVSIDVCGNTELYYSWTVPSNLDVSAGAKYKMYAQNASGEGTVNMAVSELFLIAALKSSSTTSSMISTTSTSGTSSTLSTATSSQAQSPTDTSAPPSSPLGLSTGAKAGIGVGVSVGVILVLLVTFLFWRRRKQTPAPVEAERFEKAELDGKAEMPRNEAGGEAIMEMDGDAYQREPAELYAGGIPHHQAGNDGPVSHASAGERER

SEQ ID NO: 514 - DNA, 312 bp, Muscodor strobelii
  misc_feature: SGI cDNA ID NO. 559743
  misc_feature: Encodes the peptide sequence at SEQ ID NO 515
atgactggacgcggcaagggcggcaagggcctcggaaagggtggtgccaagcgccatcgcaagattcttcgtgacaacatccagggtatcaccaagcccgccatccgacgtctcgcccgtcgtggtggtgtcaagcgtatctcggccatgatctacgaggagacccgcggtgtcctcaagtccttcctcgagggtgtcatccgtgacgccgtcacctacacagagcacgccaagcgcaagaccgtcacatctctcgacgtcgtctatgctctgaagcgacagggccgcaccctctacggtttcggtggctaa

SEQ ID NO: 515 - protein, 103 aa, Muscodor strobelii
  misc_feature: SGI Peptide ID NO. 559743
  misc_feature (25)..(94): Pfam Id: PF00125 Pfam Desc: Core histone H2A/H2B/H3/H4
  misc_feature (66)..(92): Pfam Id: PF02969 Pfam Desc: TATA box binding protein associated factor (TAF)
  misc_feature (1)..(103): NCBI GI: 39973387 Blast Desc: histone H4 [Magnaporthe grisea 70-15] gi|39976781|ref|XP_369778.1| histone H4.2 [Magnaporthe grisea 70-15] gi|154296461|ref|XP_001548661.1| histone H4 [Botryotinia
  misc_feature (5)..(103): NCBI GI: 171690210 Blast Desc: protein product [Podospora anserina] gi|170945053|emb|CAP71164.1| protein product [Podospora anserina]
  misc_feature (1)..(103): NCBI GI: 46122227 Blast Desc: H4_NEUCR Histone H4 [Gibberella zeae PH-1] gi|70995986|ref|XP_752748.1| histone H4.1 [Aspergillus fumigatus Af293] gi|85080745|ref|XP_956597.1| histone H4.1 [Neurospora H4
  misc_feature (1)..(103): NCBI GI: 115384376 Blast Desc: histone H4.2 [Aspergillus terreus NIH2624] gi|119481631|ref|XP_001260844.1| histone h4 [Neosartorya fischeri NRRL 181] gi|121716320|ref|XP_001275769.1| histone h4 clavatus 1]
  misc_feature (1)..(103): NCBI GI: 116204829 Blast Desc: histone H4.2 [Chaetomium globosum CBS 148.51] gi|88176426|gb|EAQ83894.1| histone H4.2 [Chaetomium globosum CBS 148.51]
  misc_feature (1)..(103): NCBI GI: 169763210 Blast Desc: [Aspergillus oryzae RIB40] gi|212531987|ref|XP_002146150.1| histone H4.1 [Penicillium marneffei ATCC 18224] gi|238489089|ref|XP_002375782.1| histone H4
  misc_feature (1)..(103): NCBI GI: 67523941 Blast Desc: H42_EMENI Histone H4.2 [Aspergillus nidulans FGSC A4] gi|169774419|ref|XP_001821677.1| [Aspergillus oryzae RIB40] gi|212537025|ref|XP_002148668.1| histone H4.2 [Penicillium ATCC
  misc_feature (1)..(103): NCBI GI: 169623333 Blast Desc: SNOG_14904 [Phaeosphaeria nodorum SN15] gi|189192066|ref|XP_001932372.1| histone H4 [Pyrenophora tritici-repentis Pt-1C-BFP] gi|111056636|gb|EAT77756.1| nodorum
  misc_feature (1)..(103): NCBI GI: 119186679 Blast Desc: histone H4 [Coccidioides immitis RS] gi|240108478|gb|EER26652.1| Histone H4, [Coccidioides posadasii C735 delta SOWgp]
  misc_feature (1)..(103): NCBI GI: 58257417 Blast Desc: histone H4-like protein [Magnaporthe grisea]
MTGRGKGGKGLGKGGAKRHRKILRDNIQGITKPAIRRLARRGGVKRISAMIYEETRGVLKSFLEGVIRDAVTYTEHAKRKTVTSLDVVYALKRQGRTLYGFGG

SEQ ID NO: 516 - DNA, 1200 bp, Muscodor strobelii
  misc_feature: SGI EST ID NO. CUFF.1473.0
  misc_feature: Variant of the nucleotide sequence at SEQ ID NO 514
cgctcccttcctatttaacaccctcttcctcttccccacgtccccaacacctctctgataccactcccatccaccatcacaaccaccgccatcgaccttcagtcttcagcctttgtgcacccagcaatcccacaccctctcttcacacactcaacccctcattcaatatgactggacgcggcaagggcggcaagggcctcggaaagggtggtgccaagcgccatcgcaagattcttcgtgacaacatccagggtatcaccaagcccgccatccgacgtctcgcccgtcgtggtggtgtcaagcgtatctcggccatgatctacgaggagacccgcggtgtcctcaagtccttcctcgagggtgtcatccgtgacgccgtcacctacacagagcacgccaagcgcaagaccgtcacatctctcgacgtcgtctatgctctgaagcgacagggccgcaccctctacggtttcggtggctaagccactcgtctccgtcctctcacgtctgttacgaaatcatcatcacaacaacttcttccgcctcctcacacaactaccaccacatacttctcgccacacatactacacacgtcattttgccacaagagcttgcgccgccttgtggttcaggtcatgatggtcatgggattgggttttgctgtctttgtttctgcgttccggggtgttcaatgtaccatagggaaatgggggtctactactgcacccgggacgaaggtcctgtgcttgtctgagccataatgaattgagaaatccgagaggatcagttctgaacacaatctgcttgtcttgtttcgttgctgggctctgtgattttgtccttgttcctttgtagttggtaacgcgttgtcccgtgtcttgtatccaccgtcgcgtcgcgtcttgttgttcagtcttcacacgcgttgcgtatagtgtattccgttatggccggggtaggcttaggctcacataacatctaatctagtggcaccgatcgcaacgatggactcccttggactgtcttttatacatggcaatgacgaatgtgcgccctcgtgtagcattagcgtagcagtagacctagacaattgtgaatccaaatattcattacgtagcgggtatatgtgttcccaaccgatacatgatcatagatgctccagcctttatgtcacctttctctttctccagcgctcgcatggga

SEQ ID NO: 517 - DNA, 411 bp, Muscodor strobelii
  misc_feature: SGI cDNA ID NO. 559744
  misc_feature: Reduced expression when VOC is produced
  misc_feature: Encodes the peptide sequence at SEQ ID NO 518
atggcccgcaccaagcagaccgcccgtaagtccactggtggcaaggctccccgcaagcagctcgcctccaaggccgctcgcaagtcggccccctccaccggaggtgtcaagaagcctcaccgctacaagcccggtaccgtcgctctccgtgagattcgtcgctaccagaagtcgaccgagcttctcatccgcaagctccccttccagcgtctcgtccgtgagattgctcaggatttcaagtccgatctccgcttccagtcttctgctatcggcgctctccaggagtccgtcgagtcctacctcgtctctctgtttgaggacaccaacttgtgcgccatccacgccaagcgtgtcaccatccagtcgaaggacatccagctcgctcgtcgcctccgcggtgagcgcaattag

SEQ ID NO: 518 - protein, 136 aa, Muscodor strobelii
  misc_feature: SGI Peptide ID NO. 559744
  misc_feature (58)..(132): Pfam Id: PF00125 Pfam Desc: Core histone H2A/H2B/H3/H4
  misc_feature (1)..(136): NCBI GI: 85077297 Blast Desc: histone H3 [Neurospora crassa OR74A] gi|116204825|ref|XP_001228223.1| histone H3 [Chaetomium globosum CBS 148.51] gi|145610501|ref|XP_368085.2| histone H3 [Magnaporthe
  misc_feature (1)..(136): NCBI GI: 60543104 Blast Desc: histone 3 [Conocephalum conicum]
  misc_feature (1)..(136): NCBI GI: 60543042 Blast Desc: histone 3 [Conocephalum supradecompositum]
  misc_feature (1)..(136): NCBI GI: 60543024 Blast Desc: histone 3 [Conocephalum conicum]
  misc_feature (1)..(136): NCBI GI: 60543082 Blast Desc: histone 3 [Marchantia polymorpha]
  misc_feature (1)..(136): NCBI GI: 60543046 Blast Desc: histone 3 [Conocephalum supradecompositum]
  misc_feature (1)..(136): NCBI GI: 60543020 Blast Desc: histone 3 [Conocephalum conicum]
  misc_feature (1)..(136): NCBI GI: 60543040 Blast Desc: histone 3 [Conocephalum supradecompositum]
  misc_feature (1)..(136): NCBI GI: 3016 Blast Desc: histone H3 [Neurospora crassa]
  misc_feature (1)..(136): NCBI GI: 60543012 Blast Desc: histone 3 [Conocephalum conicum]
  misc_feature: Useful for introducing or modulating the production of volatile compounds
MARTKQTARKSTGGKAPRKQLASKAARKSAPSTGGVKKPHRYKPGTVALREIRRYQKSTELLIRKLPFQRLVREIAQDFKSDLRFQSSAIGALQESVESYLVSLFEDTNLCAIHAKRVTIQSKDIQLARRLRGERN

SEQ ID NO: 519 - DNA, 876 bp, Muscodor strobelii
  misc_feature: SGI EST ID NO. CUFF.2078.0
  misc_feature: Variant of the nucleotide sequence at SEQ ID NO 517
atttaagtccttcccccacccctccccaactcttccacttaccttctctcatcatccactcacacacccacttccatcgacagcctcttgacctcagcgtcatccatcatcaacaccatcatcatcatcaatcaacactacatcttcacatccatcaacactcatcacaatggcccgcaccaagcagaccgcccgtaagtccactggtggcaaggctccccgcaagcagctcgcctccaaggccgctcgcaagtcggccccctccaccggaggtgtcaagaagcctcaccgctacaagcccggtaccgtcgctctccgtgagattcgtcgctaccagaagtcgaccgagcttctcatccgcaagctccccttccagcgtctcgtccgtgagattgctcaggatttcaagtccgatctccgcttccagtcttctgctatcggcgctctccaggagtccgtcgagtcctacctcgtctctctgtttgaggacaccaacttgtgcgccatccacgccaagcgtgtcaccatccagtcgaaggacatccagctcgctcgtcgcctccgcggtgagcgcaattagagtatcttcactctatgacttcggggatgattaggagcagagcaacggcgacttgatgattcacaacagggaaaggcatgatgaatttcgggtttacaggaacgggtaatcatggcgttaaatgaatgcgttgtctttcggaatggttgtgtacatcagtgaccaggcagttggtcgtcgaggaccgctggccatactgaacaaatgaatctgaacatgaaatgaacaaaccaacacaagctgtcttatctcattcctacatgtgacatgcaaccatcgcgatttaatattatcta

SEQ ID NO: 520 - DNA, 876 bp, Muscodor strobelii
  misc_feature: SGI cDNA ID NO. 559745
  misc_feature: Encodes the peptide sequence at SEQ ID NO 521
atggcgccgaacaagatcacgttgtatgtagacgtcgtcagtcccttcgcgtacgaggcattctatattcttcagaatgacccggtcttcgaagatgtgcagatcacatatgtccctatatttctaggcgggctgatgaaactcgtgagtccccgtccagctgatgcctcgtctgcctttcacgttggaattcagatgatgagtccagcatggcctcgcaagagactggtcctgtctcaaattctccatctgaatgaccaaggcgcttcgagacgaagaaagactccgatggaaactcagattaacaccagcatacccatgcagtgcggcaacgtggcccccatctccatcaagaacaaagataaatggatattccacgagcgtctccgctgggcgacacacttcgacatccccatgacgcacgatgcaccgcccaacttcccgcctgtgaccctgcacaccatgcgtgctttatcatgtgtagaggaccaggagaagttgatcaagctgctagcaaggttctgggatgagttcttcgtgcatcataagccgatcgccgacaaggacgtattcgagagtgtatttagagatgttctgggtggggaggagggtggaagagtcatcgcggaagcggccaccaagggaaaagcgacactcctctccaacacggacagagcgttcgcggcgggcgccttcggcattccctggttcgaatgtacgaatagaaagggcgagacggattcgtactggggtgtcgatcatctgggacaagtcatccggttcttggggttgaacgtgccggagagttggcatacttccgcatcttcggctggaagtcagcccagtacgtcggcaggatggaaggctgtgctttga

SEQ ID NO: 521 - protein, 291 aa, Muscodor strobelii
  misc_feature: SGI Peptide ID NO. 559745
  misc_feature (1)..(265): NCBI GI: 70994518 Blast Desc: 2-hydroxychromene-2-carboxylate isomerase [Aspergillus fumigatus Af293] gi|66849672|gb|EAL90000.1| 2-hydroxychromene-2-carboxylate isomerase, [Aspergillus fumigatus
  misc_feature (1)..(265): NCBI GI: 159125049 Blast Desc: 2-hydroxychromene-2-carboxylate isomerase, [Aspergillus fumigatus A1163]
  misc_feature (70)..(268): NCBI GI: 145257075 Blast Desc: An04g02380 [Aspergillus niger] gi|134058516|emb|CAL00725.1| protein product [Aspergillus niger]
  misc_feature (108)..(291): NCBI GI: 164428075 Blast Desc: NCU01636 [Neurospora crassa OR74A] gi|18307451|emb|CAD21511.1| related to glutahione s-transferase subunit 13.01 [Neurospora crassa] gi|157072000|gb|EAA26768.2|
  misc_feature (1)..(265): NCBI GI: 121706936 Blast Desc: 2-hydroxychromene-2-carboxylate isomerase, [Aspergillus clavatus NRRL 1] gi|119399828|gb|EAW10254.1| 2-hydroxychromene-2-carboxylate isomerase, [Aspergillus clavatus
  misc_feature (72)..(265): NCBI GI: 238491632 Blast Desc: 2-hydroxychromene-2-carboxylate isomerase, [Aspergillus flavus NRRL3357] gi|220697466|gb|EED53807.1| 2-hydroxychromene-2-carboxylate isomerase, [Aspergillus flavus
  misc_feature (109)..(265): NCBI GI: 115397989 Blast Desc: conserved [Aspergillus terreus NIH2624] gi|114192777|gb|EAU34477.1| conserved [Aspergillus terreus NIH2624]
  misc_feature (109)..(291): NCBI GI: 169601770 Blast Desc: SNOG_03759 [Phaeosphaeria nodorum SN15] gi|160706005|gb|EAT88964.2| SNOG_03759 [Phaeosphaeria nodorum SN15]
  misc_feature (1)..(265): NCBI GI: 119500954 Blast Desc: 2-hydroxychromene-2-carboxylate isomerase, [Neosartorya fischeri NRRL 181] gi|119415399|gb|EAW25337.1| 2-hydroxychromene-2-carboxylate isomerase, [Neosartorya fischeri
  misc_feature (110)..(265): NCBI GI: 67526783 Blast Desc: AN3849.2 [Aspergillus nidulans FGSC A4] gi|40739924|gb|EAA59114.1| AN3849.2 [Aspergillus nidulans FGSC A4] gi|259481587|tpe|CBF75246.1| TPA: isomerase, (AFU_orthologue;
  misc_feature (77)..(263): SWISSPROT Homolog: EC 2.5.1.18 Glutathione transferase
MAPNKITLYVDVVSPFAYEAFYILQNDPVFEDVQITYVPIFLGGLMKLVSPRPADASSAFHVGIQMMSPAWPRKRLVLSQILHLNDQGASRRRKTPMETQINTSIPMQCGNVAPISIKNKDKWIFHERLRWATHFDIPMTHDAPPNFPPVTLHTMRALSCVEDQEKLIKLLARFWDEFFVHHKPIADKDVFESVFRDVLGGEEGGRVIAEAATKGKATLLSNTDRAFAAGAFGIPWFECTNRKGETDSYWGVDHLGQVIRFLGLNVPESWHTSASSAGSQPSTSAGWKAVL

SEQ ID NO: 522 - DNA, 1969 bp, Muscodor strobelii
  misc_feature: SGI EST ID NO. CUFF.2079.2
  misc_feature: Variant of the nucleotide sequence at SEQ ID NO 520
ggatattccacgagcgtctccgctgggcgacacacttcgacatccccatgacgcacgatgcaccgcccaacttcccgcctgtgaccctgcacaccatgcgtgctttatcatgtgtagaggaccaggagaagttgatcaagctgctagcaaggttctgggatgagttcttcgtgcatcataagccgatcgccgacaaggacgtattcgagagtgtatttagagatgttctgggtggggaggagggtggaagagtcatcgcggaagcggccaccaagggaaaagcgacactcctctccaacacggacagagcgttcgcggcgggcgccttcggcattccctggttcgaatgtacgaatagaaagggcgagacggattcgtactggggtgtcgatcatctgggacaagtcatccggttcttggggttgaacgtgccggagagttggcatacttccgcatcttcggctggaagtcagcccagtacgtcggcaggatggaaggctgtgctttgacacactaggggaggagatactgtacgggggagatatctagtggcaatgtgggaggagagcgtgggtatcgtatgagtcgtgggatgcatgagggcaagatgatgacagagattagtattgcaattctcttctgactatctagaacgaccttgatatgagcgtcatcgaggttggcgacatcgaacagcaggatggaacagcgccagtcaacaccagaaacttgtacacgggtggcagagtacagccgttccgtcggcttcaagcagccatagctctgtcacattctacacgagtctctttcctgtacaatgttatggttccgaggacaaaaatgatgatcatgattaagaatccttacaatcgcgtcgcgtgtttgcgtagacgcgtaaacacatggcacatcttgaaactgtcgagaactgttagataatattaaatcgcgatggttgcatgtcacatgtaggaatgagataagacagcttgtgttggtttgttcatttcatgttcagattcatttgttcagtatggccagcggtcctcgacgaccaactgcctggtcactgatgtacacaaccattccgaaagacaacgcattcatttaacgccatgattacccgttcctgtaaacccgaaattcatcatgcctttccctgttgtgaatcatcaagtcgccgttgctctgctcctaatcatccccgaagtcatagagtgaagatactctaattgcgctcaccgcggaggcgacgagcgagctggatgtccttctgtagaagtcgttagtagtctgctaaatatacgatagatgggaaaagaagatactgaccgactggatggtgacacgcttggcgtggatggcgcacaagttggtgtcctcaaacagagagacgaggtaggactcgacggactcctggagagcgccgatagcagaagactggaagcggagatcggacttgaaatcctgagcaatctcacggacctgtgggaggggaaacgcgttagcgaaatgtgcgtgatgattgattgtcgcgttgcgtcgcgctgttacgattgcgacggtgaaagtggatcaaggacttacgagacgctggaaggggagcttgcggatgagaagctcggtcgacttctggtagcgacgaatctcacggagagcgacggtaccgggcttgtagcggtgaggcttcttgacacctccggtggagggggccgacttgcgagcggccttggaggcgagctgcttgcggggagccttgccaccagtggacttacgggcggtctgcttggtgcgggccattgtgatgagtgttgatggatgtgaagatgtagtgttgattgatgatgatgatggtgttgatgatggatgacgctgaggtcaagaggctgtcgatggaagtgggtgtgtgagtggatgatgagagaaggtaagtggaagagttggggaggggtgggggaaggacttaaat

SEQ ID NO: 523 - DNA, 5238 bp, Muscodor strobelii
  misc_feature: SGI cDNA ID NO. 559746
  misc_feature: Reduced expression when VOC is produced
  misc_feature: Encodes the peptide sequence at SEQ ID NO 524
atgaacatctcgcagccgatcgcgtcggccatcggcagcgtcgacttcgacttcctcacgcccgccgagatcaaggccatctcggtcaagaagatcgacaatcccaccaccctcgaccccaactcgctgcggcccctgcccggcggcctgtacgaccctgcgctgggcgcctgggccgaccacatatgcacgacatgcaacctcgcccagccccactgccccggccacgtcggccacatcgacctgcccatgcccgtctaccacccggtcttcatggaccaggtcctgcgcctgctgcgcgcccagtgccagtactgcttccgcttcaagatgcgcagggccgacctcaacctcgtcgcctgcaagctccgcctgctgcagtacggcctgatcgacgccgccagctacgtcgacgacatcaacaacgagtccaccgacatcgagctcgacggtgacggtgatggtgacggcggcgacgacgacaagaacgccaccgtcgagcgcatcatccgcctgcgcgacacctacaccgagcgcgagctgcgccgcaacagggtcgcctcctccgacatccgcaacggcaagcacgagggcgcctccgaggcccgccgcctcgtcctcaaggacttcctgcgcgacatgaccaagggccgcatctgcaactcctgccaggccatctccccgagcttccgcaaggaccgcttcgtcaagatcttcgagaagcccctcagcgccaaggacagcatcaagatggcccagaccgccctcaagcgcaaggacgccatcctcgccctccgccagcagaaggacgccgccgccaagcgcaaggccgactacgacgccgacgagggcatcgccgatgtcgacctgcgctccagcgacggcgaagacgctatggaccacgacgagatagacgacgaccacgacgagaccaacgaggaggaggacgaagacgaggaaggcgatgcggatgagctcgatgagaatggcgacgtcgtcatgcacgatccctccgtccagaagtccagccagaccaagaagaagaagaagaagaagcagagcgacaaggacaaccagcggtatgtcacctccaccgaggtgcacgcccgcctgcagatgctgttcgaaaaggagcaggacctcatgactctggtctacaacgccaggccctatggaaagaaactgcccgccgacaacttctttctccagacgatcctcgtcccgccgaacaagttccgccccgccgcggtcaagggcgacggcgccatggccgaagccgagcagaactctctctacgtgcagatcctcaactcgtgcctccgcatcgcacagctccacagagagatccagcaggggcccggggccacctcgtacaggccaagaggcatcaccgacatgttcgaggcctcgacccagctgcaggactgcgtcaattccttgatcgacagggatcgaaaccccatccgtggtgccgccggcaagaggaacgaggagggcatcaaacagaagctcgagaagaaggagggcctcttccgcaagaacatgatgggcaagcgtgtcaactacgctgcccgcagtgtcatctctcccgatccaaacatcgagacgagcgagatcggcgtgccgcccgtcttcgccaagaaactcacctatcccgagcctgtcacgagtcacaacttccgggagatgcagcaggccgtcatcaacggcgtcgacaagtggcccggcgctgccgccatcgagaacgagaatggccagatcgtcaacctggagaggaagtccgtcgaggagcgtgtcgcgttggccaaccagctcctagcccccagcagtcacaactacagcggcatgaaaggcaagaaggtccatcgccatctgggcaacggagacgtcgtcctcatgaaccgtcaacccacccttcacaagccctccatcatgggtcacagagccagagtgcttcccggagagaagaccattcgcatgcactatgccaactgtaacacgtacaatgccgatttcgacggtgacgagatgaatatgcacttccctcagaacgagctggcacgagcggaagccctcaagatcgccgacacggatcaccaatacctctccgccacagcagggaaacctctccgtggtctcattcaagaccatctgtccgtatccgtggccttgtgtaacaaagacaccttctttgacaagggttcctaccaccaactcgtatataacgccctccggcctgagagtggtcacatcacagccgagagactcgaacttgtcccacccgccgtgctcaagcctgtaaagcgttggaccggcaagcaagtaatcactacgattctgaagaacatccgaccggtgggctgcggtgacctctggctcactagtaatacatccatcaagaaagacccatggggcaacttcccagaagaggggcaggtattgttcaacgacggtgaattcatcagcggcatcttggacaaatctcagctcggccccagcgcgggcggtttcatccactccatacatgagatctggggtcctgagaccgccgctcgcttgctcagttgtatgggccgtctactcacaagatatctcaatatgcgtgctttcacttgtggtatggatgatctgcggctcactccggacggcgagaggatgcgaaaagacgtgctcaagggtgccgatggtattggtctcaaggtcgctgccaaccatgtaagcctcggcgaccagcccgatattcacgacaccactcctattcttcttgagcgcctcgagggagtcttccgcgacggcaaacagcaagaagatctggaacgcatagtcaactccagctgtagcgaactatccactgctattaccaaaacttgcctgcctgccggactcaccaaacagttccccaaaaaccagatgcagtctatgacgatatctggagccaagggcagtccggtcaacgccaatctcatttcctgcaatctcggccaacaaaccctcgaaggcagacgtgtgcccattatggtcagcggaaagacgctgccttgtttccagcccttcgagacccacatacgtgctggtggttatatcgtccagcgtttcttgacgggtatcagaccccaggagtattatttccatcacatggctggtcgtgaaggtcttatcgatacagccgtcaaaacatcgcgatctggttacctacagcgatgtctcatcaaaggcatggaaggtctgaaagtggcatacgacacgtcggtccgtgactcggatggttcaatggtgcagtttctctatggtgaggacggtttggacatcaccaaacagaaattcctcaatgactttggttttgttcttcacaaccagacatcgcaagtccaccagctcggcatttccgaccgtggatgggatcagcaggtctatgagtctaaagactatgcccagaagtatcaaaagagagcagtcagacaagccaaagccgccgatcccaagggtctcgatcccatccaggccgagctcaaccccaatcgccacgctttcgctacatcggagaagttctatcaaaaggtgtcggactacatcaagaccaacaaagaaggcctcatcaaggagaagggtgacaagagcgataagatcacagcccccaagtcactggtgcctcgcaaatacgccgagaagatcttccactctaaatacctcagctctctcgtcgaacctggtgaggccgtcggtatcgttgccgggcagtctgtgggtgagccgtccacgcagatgaccttgaacactttccatttggctggtcactcggccaagaacgtgacgctgggtattcctcgtctacgagagcttctgatgacagccagcgaccatatatcaacaccatcgatgacattgctcttgcaccccgagctatcccaagaaaagggcgagactttcgccaaggccatcagcatgctaccgctcggtcatgtcatgaatgaggtgacggtcaaggagcgagcgggcagaggtgtcgggcaccggttagccaagatgttcgatgtacgaatgcagttcttccccgccaaggaatacgagtccacgtatgccatcaagaaagcagatgtaatgaatgccgtcgaggtgaaattcttgcctcttctcgctagattggtgaagaaggagatcaaggccaaggaggacaaggaaaatcgcgcagctgttccggaaataggcacgaaatctggcaccgtggaagtggctccgaccggcgcagatagggcacgagatgaggacgaagacgaggatgacgacatcgacgacgatgccaccaacgataagcagcgtgccaaccgtgcgcaagccgtctcctacggcgacaatgacgacgaggatgatgcaatacaacggcggctcgcgcgtgaggcatcgcccgaagatgtagaggaggaagagcctgaagatgaaggtttcggtggtagccctcacccatccgatgaagacgacgacagcgatgacgatgcagccgataaagctaaacgcaaggatctcaatcgtggtcgggaggcacgtgtcaaggagagaacagacgtagtctctcgatttgcctgtgatgagaccaatggcgagtggtgtgaattcactcttgagtacgaggctgagatgccgaaagtcctcatgttgaacatggtccaagacgctgtcaaaaaggcactgattcagcagattcccggcatccgcacgtgtgtgtatgtcgcagatgaagagattgtggacatagctacaggacagaaaactaagcggaacgtcatccacacggatggcgtcaatctcgaggccatgcagcagtacggcgacttcatcaatcccaataacatcaagacgaacgatgtcgcagcggtgctgaggatgtatggcgtggaagccgcgaggcagagcgttatcctcgaactattcggtgtcttcgacgggcacggaatcagtgtcgacaaccgccatctaaacctgattggtgactacatgacgaggaacggtggcttcacgccgttcaaccgcaacggcttgaagggcaatgtctcaccattgacgaagatgagtttcgagacgaccctaagtttcttgaaggacgccgtcctcgacggggattgggatgatttgaatacgcccagtggccggatcgtcatgggacgtctaggtaagataggaacaggtgcattcgatgtgctcaccaaggtgcatccgaagaatggcaagaatctactcggttga

SEQ ID NO: 524 - protein, 1745 aa, Muscodor strobelii
  misc_feature: SGI Peptide ID NO. 559746
  misc_feature (8)..(515): Pfam Id: PF04997 Pfam Desc: RNA polymerase Rpb1, domain 1
  misc_feature (517)..(697): Pfam Id: PF00623 Pfam Desc: RNA polymerase Rpb1, domain 2
  misc_feature (700)..(877): Pfam Id: PF04983 Pfam Desc: RNA polymerase Rpb1, domain 3
  misc_feature (929)..(1028): Pfam Id: PF05000 Pfam Desc: RNA polymerase Rpb1, domain 4
  misc_feature (1035)..(1688): Pfam Id: PF04998 Pfam Desc: RNA polymerase Rpb1, domain 5
  misc_feature (8)..(119): Pfam Id: PF04997 Pfam Desc: RNA polymerase Rpb1, domain 1
  misc_feature (953)..(1028): Pfam Id: PF05000 Pfam Desc: RNA polymerase Rpb1, domain 4
  misc_feature (1)..(1734): NCBI GI: 39973391 Blast Desc: MGG_01158 [Magnaporthe grisea 70-15] gi|145017870|gb|EDK02149.1| MGG_01158 [Magnaporthe grisea 70-15]
  misc_feature (1)..(1744): NCBI GI: 164428077 Blast Desc: NCU01638 [Neurospora crassa OR74A] gi|18307453|emb|CAD21513.1| DNA-directed RNA polymerase I [Neurospora crassa] gi|157072001|gb|EAA26770.2| NCU01638 crassa
  misc_feature (1)..(1735): NCBI GI: 156047829 Blast Desc: SS1G_09604 [Sclerotinia sclerotiorum 1980] gi|154693999|gb|EDN93737.1| SS1G_09604 [Sclerotinia sclerotiorum 1980]
  misc_feature (1)..(1735): NCBI GI: 261354887 Blast Desc: DNA-directed RNA polymerase I subunit RPA1 [Verticillium albo-atrum VaMs.102]
  misc_feature (1)..(1735): NCBI GI: 256729404 Blast Desc: [Nectria haematococca mpVI 77-13-4]
  misc_feature (1)..(1735): NCBI GI: 46116898 Blast Desc: FG04291.1 [Gibberella zeae PH-1]
  misc_feature (1)..(1740): NCBI GI: 171690214 Blast Desc: protein product [Podospora anserina] gi|170945055|emb|CAP71166.1| protein product [Podospora anserina]
  misc_feature (1)..(1673): NCBI GI: 154296469 Blast Desc: BC1G_12809 [Botryotinia fuckeliana B05.10] gi|150843332|gb|EDN18525.1| BC1G_12809 [Botryotinia fuckeliana B05.10]
  misc_feature (1)..(1735): NCBI GI: 189191780 Blast Desc: DNA-directed RNA polymerase I subunit RPA1 [Pyrenophora tritici-repentis Pt-1C-BFP] gi|187973835|gb|EDU41334.1| DNA-directed RNA polymerase I subunit
  misc_feature (388)..(1690): NCBI GI: 116204821 Blast Desc: CHGG_10294 [Chaetomium globosum CBS 148.51] gi|88176422|gb|EAQ83890.1| CHGG_10294 [Chaetomium globosum CBS 148.51]
  misc_feature (361)..(1735): SWISSPROT Homolog: EC 2.7.7.6 DNA-directed RNA polymerase
  misc_feature: Useful for introducing or modulating the production of volatile compounds
MNISQPIASAIGSVDFDFLTPAEIKAISVKKIDNPTTLDPNSLRPLPGGLYDPALGAWADHICTTCNLAQPHCPGHVGHIDLPMPVYHPVFMDQVLRLLRAQCQYCFRFKMRRADLNLVACKLRLLQYGLIDAASYVDDINNESTDIELDGDGDGDGGDDDKNATVERIIRLRDTYTERELRRNRVASSDIRNGKHEGASEARRLVLKDFLRDMTKGRICNSCQAISPSFRKDRFVKIFEKPLSAKDSIKMAQTALKRKDAILALRQQKDAAAKRKADYDADEGIADVDLRSSDGEDAMDHDEIDDDHDETNEEEDEDEEGDADELDENGDVVMHDPSVQKSSQTKKKKKKKQSDKDNQRYVTSTEVHARLQMLFEKEQDLMTLVYNARPYGKKLPADNFFLQTILVPPNKFRPAAVKGDGAMAEAEQNSLYVQILNSCLRIAQLHREIQQGPGATSYRPRGITDMFEASTQLQDCVNSLIDRDRNPIRGAAGKRNEEGIKQKLEKKEGLFRKNMMGKRVNYAARSVISPDPNIETSEIGVPPVFAKKLTYPEPVTSHNFREMQQAVINGVDKWPGAAAIENENGQIVNLERKSVEERVALANQLLAPSSHNYSGMKGKKVHRHLGNGDVVLMNRQPTLHKPSIMGHRARVLPGEKTIRMHYANCNTYNADFDGDEMNMHFPQNELARAEALKIADTDHQYLSATAGKPLRGLIQDHLSVSVALCNKDTFFDKGSYHQLVYNALRPESGHITAERLELVPPAVLKPVKRWTGKQVITTILKNIRPVGCGDLWLTSNTSIKKDPWGNFPEEGQVLFNDGEFISGILDKSQLGPSAGGFIHSIHEIWGPETAARLLSCMGRLLTRYLNMRAFTCGMDDLRLTPDGERMRKDVLKGADGIGLKVAANHVSLGDQPDIHDTTPILLERLEGVFRDGKQQEDLERIVNSSCSELSTAITKTCLPAGLTKQFPKNQMQSMTISGAKGSPVNANLISCNLGQQTLEGRRVPIMVSGKTLPCFQPFETHIRAGGYIVQRFLTGIRPQEYYFHHMAGREGLIDTAVKTSRSGYLQRCLIKGMEGLKVAYDTSVRDSDGSMVQFLYGEDGLDITKQKFLNDFGFVLHNQTSQVHQLGISDRGWDQQVYESKDYAQKYQKRAVRQAKAADPKGLDPIQAELNPNRHAFATSEKFYQKVSDYIKTNKEGLIKEKGDKSDKITAPKSLVPRKYAEKIFHSKYLSSLVEPGEAVGIVAGQSVGEPSTQMTLNTFHLAGHSAKNVTLGIPRLRELLMTASDHISTPSMTLLLHPELSQEKGETFAKAISMLPLGHVMNEVTVKERAGRGVGHRLAKMFDVRMQFFPAKEYESTYAIKKADVMNAVEVKFLPLLARLVKKEIKAKEDKENRAAVPEIGTKSGTVEVAPTGADRARDEDEDEDDDIDDDATNDKQRANRAQAVSYGDNDDEDDAIQRRLAREASPEDVEEEEPEDEGFGGSPHPSDEDDDSDDDAADKAKRKDLNRGREARVKERTDVVSRFACDETNGEWCEFTLEYEAEMPKVLMLNMVQDAVKKALIQQIPGIRTCVYVADEEIVDIATGQKTKRNVIHTDGVNLEAMQQYGDFINPNNIKTNDVAAVLRMYGVEAARQSVILELFGVFDGHGISVDNRHLNLIGDYMTRNGGFTPFNRNGLKGNVSPLTKMSFETTLSFLKDAVLDGDWDDLNTPSGRIVMGRLGKIGTGAFDVLTKVHPKNGKNLLG

SEQ ID NO: 525 - DNA, 5681 bp, Muscodor strobelii
  misc_feature: SGI EST ID NO. CUFF.1476.0
  misc_feature: Variant of the nucleotide sequence at SEQ ID NO 523
tttttttctctgcccatcgtccccgccaaaaagtcgagcttcactcatcgtgaacaccgccatggcgcctcggccttcctcaccctcgctgccgtctccatgctcgcccccgcgccgctgaacccctgagccccggaaactgagagtggccattcccatttccattcccatccgaccgcagtcctcgcccgagggttgcctgcagaggcacgatgaacatctcgcagccgatcgcgtcggccatcggcagcgtcgacttcgacttcctcacgcccgccgagatcaaggccatctcggtcaagaagatcgacaatcccaccaccctcgaccccaactcgctgcggcccctgcccggcggcctgtacgaccctgcgctgggcgcctgggccgaccacatatgcacgacatgcaacctcgcccagccccactgccccggccacgtcggccacatcgacctgcccatgcccgtctaccacccggtcttcatggaccaggtcctgcgcctgctgcgcgcccagtgccagtactgcttccgcttcaagatgcgcagggccgacctcaacctcgtcgcctgcaagctccgcctgctgcagtacggcctgatcgacgccgccagctacgtcgacgacatcaacaacgagtccaccgacatcgagctcgacggtgacggtgatggtgacggcggcgacgacgacaagaacgccaccgtcgagcgcatcatccgcctgcgcgacacctacaccgagcgcgagctgcgccgcaacagggtcgcctcctccgacatccgcaacggcaagcacgagggcgcctccgaggcccgccgcctcgtcctcaaggacttcctgcgcgacatgaccaagggccgcatctgcaactcctgccaggccatctccccgagcttccgcaaggaccgcttcgtcaagatcttcgagaagcccctcagcgccaaggacagcatcaagatggcccagaccgccctcaagcgcaaggacgccatcctcgccctccgccagcagaaggacgccgccgccaagcgcaaggccgactacgacgccgacgagggcatcgccgatgtcgacctgcgctccagcgacggcgaagacgctatggaccacgacgagatagacgacgaccacgacgagaccaacgaggaggaggacgaagacgaggaaggcgatgcggatgagctcgatgagaatggcgacgtcgtcatgcacgatccctccgtccagaagtccagccagaccaagaagaagaagaagaagaagcagagcgacaaggacaaccagcggtatgtcacctccaccgaggtgcacgcccgcctgcagatgctgttcgaaaaggagcaggacctcatgactctggtctacaacgccaggccctatggaaagaaactgcccgccgacaacttctttctccagacgatcctcgtcccgccgaacaagttccgccccgccgcggtcaagggcgacggcgccatggccgaagccgagcagaactctctctacgtgcagatcctcaactcgtgcctccgcatcgcacagctccacagagagatccagcaggggcccggggccacctcgtacaggccaagaggcatcaccgacatgttcgaggcctcgacccagctgcaggactgcgtcaattccttgatcgacagggatcgaaaccccatccgtggtgccgccggcaagaggaacgaggagggcatcaaacagaagctcgagaagaaggagggcctcttccgcaagaacatgatgggcaagcgtgtcaactacgctgcccgcagtgtcatctctcccgatccaaacatcgagacgagcgagatcggcgtgccgcccgtcttcgccaagaaactcacctatcccgagcctgtcacgagtcacaacttccgggagatgcagcaggccgtcatcaacggcgtcgacaagtggcccggcgctgccgccatcgagaacgagaatggccagatcgtcaacctggagaggaagtccgtcgaggagcgtgtcgcgttggccaaccagctcctagcccccagcagtcacaactacagcggcatgaaaggcaagaaggtccatcgccatctgggcaacggagacgtcgtcctcatgaaccgtcaacccacccttcacaagccctccatcatgggtcacagagccagagtgcttcccggagagaagaccattcgcatgcactatgccaactgtaacacgtacaatgccgatttcgacggtgacgagatgaatatgcacttccctcagaacgagctggcacgagcggaagccctcaagatcgccgacacggatcaccaatacctctccgccacagcagggaaacctctccgtggtctcattcaagaccatctgtccgtatccgtggccttgtgtaacaaagacaccttctttgacaagggttcctaccaccaactcgtatataacgccctccggcctgagagtggtcacatcacagccgagagactcgaacttgtcccacccgccgtgctcaagcctgtaaagcgttggaccggcaagcaagtaatcactacgattctgaagaacatccgaccggtgggctgcggtgacctctggctcactagtaatacatccatcaagaaagacccatggggcaacttcccagaagaggggcaggtattgttcaacgacggtgaattcatcagcggcatcttggacaaatctcagctcggccccagcgcgggcggtttcatccactccatacatgagatctggggtcctgagaccgccgctcgcttgctcagttgtatgggccgtctactcacaagatatctcaatatgcgtgctttcacttgtggtatggatgatctgcggctcactccggacggcgagaggatgcgaaaagacgtgctcaagggtgccgatggtattggtctcaaggtcgctgccaaccatgtaagcctcggcgaccagcccgatattcacgacaccactcctattcttcttgagcgcctcgagggagtcttccgcgacggcaaacagcaagaagatctggaacgcatagtcaactccagctgtagcgaactatccactgctattaccaaaacttgcctgcctgccggactcaccaaacagttccccaaaaaccagatgcagtctatgacgatatctggagccaagggcagtccggtcaacgccaatctcatttcctgcaatctcggccaacaaaccctcgaaggcagacgtgtgcccattatggtcagcggaaagacgctgccttgtttccagcccttcgagacccacatacgtgctggtggttatatcgtccagcgtttcttgacgggtatcagaccccaggagtattatttccatcacatggctggtcgtgaaggtcttatcgatacagccgtcaaaacatcgcgatctggttacctacagcgatgtctcatcaaaggcatggaaggtctgaaagtggcatacgacacgtcggtccgtgactcggatggttcaatggtgcagtttctctatggtgaggacggtttggacatcaccaaacagaaattcctcaatgactttggttttgttcttcacaaccagacatcgcaagtccaccagctcggcatttccgaccgtggatgggatcagcaggtctatgagtctaaagactatgcccagaagtatcaaaagagagcagtcagacaagccaaagccgccgatcccaagggtctcgatcccatccaggccgagctcaaccccaatcgccacgctttcgctacatcggagaagttctatcaaaaggtgtcggactacatcaagaccaacaaagaaggcctcatcaaggagaagggtgacaagagcgataagatcacagcccccaagtcactggtgcctcgcaaatacgccgagaagatcttccactctaaatacctcagctctctcgtcgaacctggtgaggccgtcggtatcgttgccgggcagtctgtgggtgagccgtccacgcagatgaccttgaacactttccatttggctggtcactcggccaagaacgtgacgctgggtattcctcgtctacgagagcttctgatgacagccagcgaccatatatcaacaccatcgatgacattgctcttgcaccccgagctatcccaagaaaagggcgagactttcgccaaggccatcagcatgctaccgctcggtcatgtcatgaatgaggtgacggtcaaggagcgagcgggcagaggtgtcgggcaccggttagccaagatgttcgatgtacgaatgcagttcttccccgccaaggaatacgagtccacgtatgccatcaagaaagcagatgtaatgaatgccgtcgaggtgaaattcttgcctcttctcgctagattggtgaagaaggagatcaaggccaaggaggacaaggaaaatcgcgcagctgttccggaaataggcacgaaatctggcaccgtggaagtggctccgaccggcgcagatagggcacgagatgaggacgaagacgaggatgacgacatcgacgacgatgccaccaacgataagcagcgtgccaaccgtgcgcaagccgtctcctacggcgacaatgacgacgaggatgatgcaatacaacggcggctcgcgcgtgaggcatcgcccgaagatgtagaggaggaagagcctgaagatgaaggtttcggtggtagccctcacccatccgatgaagacgacgacagcgatgacgatgcagccgataaagctaaacgcaaggatctcaatcgtggtcgggaggcacgtgtcaaggagagaacagacgtagtctctcgatttgcctgtgatgagaccaatggcgagtggtgtgaattcactcttgagtacgaggctgagatgccgaaagtcctcatgttgaacatggtccaagacgctgtcaaaaaggcactgattcagcagattcccggcatccgcacgtgtgtgtatgtcgcagatgaagagattgtggacatagctacaggacagaaaactaagcggaacgtcatccacacggatggcgtcaatctcgaggccatgcagcagtacggcgacttcatcaatcccaataacatcaagacgaacgatgtcgcagcggtgctgaggatgtatggcgtggaagccgcgaggcagagcgttatcctcgaactattcggtgtcttcgacgggcacggaatcagtgtcgacaaccgccatctaaacctgattggtgactacatgacgaggaacggtggcttcacgccgttcaaccgcaacggcttgaagggcaatgtctcaccattgacgaagatgagtttcgagacgaccctaagtttcttgaaggacgccgtcctcgacggggattgggatgatttgaatacgcccagtggccggatcgtcatgggacgtctaggtaagataggaacaggtgcattcgatgtgctcaccaaggtgcatccgaagaatggcaagaatctactcggttgagtatagttattatgtggatccaagagagagaaagtgttggaatgatatatgggatgggcgtctggcgcatggtggcagtgtgatcagaccgctgttggctcacagcatcacagcatcttgctgatttttggtggtggaaatacctccttgcattattgtctgcgtatagataaaatcgaagtccagttcaccatatccacattactgtctcgcttcgcttgtgtatgcaaa

SEQ ID NO: 526 - DNA, 366 bp, Muscodor strobelii
  misc_feature: SGI cDNA ID NO. 559747
  misc_feature: Elevated expression when VOC is produced
  misc_feature: Encodes the peptide sequence at SEQ ID NO 527
atgtatactggcgactactcggaaaacgccgtgcaagagctcgcatgtcaagatgacgacgagctagtcaaagatgtccgcgtatatgtagcagcggactatttcctgatggaggatctgaaggagcatgccctgaggagattaaagtcaaaactacagcagctctggattagcgagcttgtggtcgactatatccgagaaatctacgcgactacttcgggaattggatgcaagcttcgaaatgtcgtagttgacgttgcgaaagaccattggtccgagctctggaagaggaatgcgtttcgggatcttacgcacgagggtggtgatttcactttggggctgatggggaaattgtgctctgactag

SEQ ID NO: 527 - protein, 121 aa, Muscodor strobelii
  misc_feature: SGI Peptide ID NO. 559747
  misc_feature (1)..(117): NCBI GI: 261194366 Blast Desc: BDBG_06436 [Ajellomyces dermatitidis SLH14081] gi|239588602|gb|EEQ71245.1| BDBG_06436 [Ajellomyces dermatitidis SLH14081]
  misc_feature (27)..(110): NCBI GI: 240273973 Blast Desc: BTB/POZ domain-containing protein [Ajellomyces capsulatus H143]
  misc_feature (27)..(121): NCBI GI: 225557917 Blast Desc: BTB/POZ domain-containing protein [Ajellomyces capsulatus G186AR]
  misc_feature (21)..(120): NCBI GI: 240107931 Blast Desc: CPC735_002740 [Coccidioides posadasii C735 delta SOWgp]
  misc_feature (1)..(119): NCBI GI: 46139111 Blast Desc: FG11070.1 [Gibberella zeae PH-1]
  misc_feature (12)..(115): NCBI GI: 154317824 Blast Desc: [Botryotinia fuckeliana B05.10] gi|150843553|gb|EDN18746.1| [Botryotinia fuckeliana B05.10]
  misc_feature: Useful for introducing or modulating the production of volatile compounds
MYTGDYSENAVQELACQDDDELVKDVRVYVAADYFLMEDLKEHALRRLKSKLQQLWISELVVDYIREIYATTSGIGCKLRNVVVDVAKDHWSELWKRNAFRDLTHEGGDFTLGLMGKLCSD

SEQ ID NO: 528 - DNA, 2387 bp, Muscodor strobelii
  misc_feature: SGI EST ID NO. CUFF.1516.1
  misc_feature: Variant of the nucleotide sequence at SEQ ID NO 526
gccagctgcagcgcttagcttggttcgatttgtagcagcattttaacgcatacacttacttttttttccgccccggatgccattttatacgcgagttctcaaagtagggcgacttgaggcgaagtaatgaatagacacctcgttggtttgtatataaccgcccgccgttgacccctgccttatgctacattcttctaagcacggcaagctataaaaaagcagcgagatatggtctgagagataaaatctaccaatgaaccgtcagttatcacagcagaccaaaatgggcgccggaactggctttggctcatcgacaaggagggaagaagcagaaaaggtcgacccgaaggaatcccttgtcaaggggatcgccaagtaatttaagacggtcgacaaatttccagcggttggagatttacttgaagtgcaatcaaggtatttaacaatcccaaacatgccgacgtgaaagtttacatcggcgagtacgacttacctgcccacgccatcgtccttgcgagccgaagtctatatttcgagaaagctctaggcgaaaactttcgcgaagggcagacgaaacaatttcgtttcgaagaaagaatactgtatatgcccactggagagtgttcgagtaaatgtatactggcgactactcggaaaacgccgtgcaagagctcgcatgtcaagatgacgacgagctagtcaaagatgtccgcgtatatgtagcagcggactatttcctgatggaggatctgaaggagcatgccctgaggagattaaagtcaaaactacagcagctctggattagcgagcttgtggtcgactatatccgagaaatctacgcgactacttcgggaattggatgcaagcttcgaaatgtcgtagttgacgttgcgaaagaccattggtccgagctctggaagaggaatgcgtttcgggatcttacgcacgagggtggtgatttcactttggggctgatggggaaattgtgctctgactagtatttgtagaggtagcggtactcgatggtagtttactttattcatgcgagctcctgttctctccgtccaaggcttctacacacggctgccatgacgatatgtcatgtattcatggtcaaatcccttggcatccactacaatttttgcctgttcaaagcccttccatgcctgattactagctcaaatctctccatcctcgaggtcggaggggtagcgggaggtggaacggccgtaggtctcggtggtgactcgcatcgaggtagcgtcattgccgcgagaggtctgatgcgtgttggacgtatcgctggggcggtcgcgagggaagaggagtggttcgtagtgggccttggccttggcagcgtcttggaaaccggctcgggcggcgagcttgtcccagttgacctgaatacattgtatgagtgggatgccgatggaggggagatggaggggtcaacatacaattggcttcgtctcaaagcactcctagactttgacgagagccttcatgtcgctggccgtgatttgacccgaggtcgcaggattggatgccatcttggtcatgccacaaaaaagttcgtaactcgcgtcagagctaaagaagagagataactttgcctaggggcagcagctagtctggattgtcttagtttaggggtctgggagaaaggaatgcggagcgggggcggggccagcctagtgtagtcagttctcagccccagctctttgatcaccagctgtcagcaataaaaccacctaccttgctttcccgagcaagtcgaaagctgtccgacacaagtgatagggttggaggaatactcgatccctcacgtacagggtcatcagaccagtgggttccgactacgtgacgagtggcacgcatcgatcattgctctcatgcgcagcagagagccgatagcttttggcttcagtgaggctctaccgaaggccatgtttgtccacgccaagagccccgaggatgtgctggaatatcatctagatgggcgtaaagccgtgattctcgttgactcggtagtgaacagcggcaagaccatagttcagtttgttcgaagcattcgcaggactcagcccgacatccgtattgtcgtcgtcgctggcgtaactcaaaagcaatccgtctcggagggtaatcttgcgcacatgcttgcctgtgatgacaatctgagtattattacactgcgcttatctgacaacaagttcaccggcaagggcactacggatactggtaatcggttgttcaataccacctgtctacaataattcgacaaggcttttcaattactgtctctagcgtttcatctatccggtatcatgtacaataaagaatcaaacatctatctaatgatgctaaatttatggtaatgctctcct

SEQ ID NO: 529 - DNA, 1752 bp, Muscodor strobelii
  misc_feature: SGI cDNA ID NO. 559748
  misc_feature: Elevated expression when VOC is produced
  misc_feature: Encodes the peptide sequence at SEQ ID NO 530
atgattttccgaaagctggacacgaaagtgattttaccattcctggggaagcacgaggtcggcaagggttccatgggtactgcctgcgagatcaagctgcattcacaatgccaccggcttcccttgccaagccaaaaggtagtgagaaagcaattcacgagcgcaagggataatgacatcgcctttgaaaaggaggtgaaaaatttagctctcctttcgcatttgaagcacccgaacatagttcaattgtactgctcttatatctatcggcaggaatataaccttatattcgctgttgccgatggcggtacgcttgaagcccttctcgacagcccgcacgacgccaatagactagaaaccccacagttcctgcttgctcttgccgatttggcgtcggccatcgatgctatgcacaacttcacatccacggcccttgacctcaacgcttccggttgccatcatgacctcgcgccacgaaacgttctaattcaggacgataatacactcttattggctgatttcggtctatcaactttccacgaggcagcggaggattccttaaccacattcaaggaagtacgcggctcgtacgtcgctcccgaatgtcaagcgctccacggaaatgatgtgacaacagagcggattggcagagccagcgacatatggtctttcggctgcattctcgcagaggtgctgacatatatattgagaggtgctgagggggttgcgcaattccgtgaacaaaggaaagtggacgtcactccagagattacatggttccggttccatcaaggcaccaacacaccaagttccggtgttcttcgctggctgtctctgttgcaggaagatcgggagatattcagcttgcgaatggttggattgattcgtcgaatgctttcgatgatcccaactcaacgccctcgctcgtcggacgtcttggcggttctacagggcatttctatcctttcactcgcggcgtgtgttcttcaagacttagacaaggtctgtaacactcaaagtgttgattggttgctcggcagaatgcgcttccaaagctggatgtttgctgtcactcaactgcttgacaaaataagtcaggaagggcacgaaaatcaaaatttcgattttgccgcaatagtcacggccttgaaacagacccaacggatcctggacatcgttaatgaagccccaaagggtgacgttcaccggcaactgccgctcatgagattccaatacgagaggttgatggaaggactaccgcgacagtatcgattagccgccaaggaacaactgaaaatcatggttcttagtcatgacagcgatatggctgaaagcttatcgggagctgttcgtgatgaaggagacgaagacatcggggtcctactcgctgtgaaacatcttactattctgaacgagacaggccagcttacagatcagagccatcttatgcttgatgagaagcagatcactatcaaagaagaaatggatattcataacctagcaacccttgaccatatatcagagactgtcctggtagagtggctgcgatatagagaagaatgggccgttgagaggagaagacaagaactgttctgcagactcacttctgtagcgggcttactccactcgaagagcaccacacagatcccaggcagtttacaatgccaagggatctttcatgatccctcccatcgggcttttggatttgtttaccgaatagtcgccctcctctcgagcatcgattccgtctag

SEQ ID NO: 530 - protein, 583 aa, Muscodor strobelii
  misc_feature: SGI Peptide ID NO. 559748
  misc_feature (14)..(233): Pfam Id: PF00069 Pfam Desc: Protein kinase domain
  misc_feature (153)..(234): Pfam Id: PF07714 Pfam Desc: Protein tyrosine kinase
  misc_feature (6)..(571): NCBI GI: 169618894 Blast Desc: SNOG_12639 [Phaeosphaeria nodorum SN15] gi|111058817|gb|EAT79937.1| SNOG_12639 [Phaeosphaeria nodorum SN15]
  misc_feature (46)..(319): NCBI GI: 145243184 Blast Desc: An11g01250 [Aspergillus niger] gi|134078803|emb|CAK45862.1| protein product [Aspergillus niger]
  misc_feature (12)..(322): NCBI GI: 119474137 Blast Desc: Ankyrin repeat protein [Neosartorya fischeri NRRL 181] gi|119407097|gb|EAW17047.1| Ankyrin repeat protein [Neosartorya fischeri NRRL 181]
  misc_feature (62)..(251): NCBI GI: 171685536 Blast Desc: protein product [Podospora anserina] gi|170942729|emb|CAP68382.1| protein product [Podospora anserina]
  misc_feature (5)..(316): NCBI GI: 67540594 Blast Desc: AN6467.2 [Aspergillus nidulans FGSC A4] gi|40739299|gb|EAA58489.1| AN6467.2 [Aspergillus nidulans FGSC A4]
  misc_feature (1)..(319): NCBI GI: 259480361 Blast Desc: TPA: conserved [Aspergillus nidulans FGSC A4]
  misc_feature (5)..(316): NCBI GI: 259479300 Blast Desc: TPA: conserved [Aspergillus nidulans FGSC A4]
  misc_feature (6)..(319): NCBI GI: 46126729 Blast Desc: FG07742.1 [Gibberella zeae PH-1]
  misc_feature (47)..(284): NCBI GI: 154300072 Blast Desc: BC1G_11225 [Botryotinia fuckeliana B05.10] gi|150856838|gb|EDN32030.1| BC1G_11225 [Botryotinia fuckeliana B05.10]
  misc_feature (12)..(320): NCBI GI: 115386978 Blast Desc: [Aspergillus terreus NIH2624] gi|114191028|gb|EAU32728.1| [Aspergillus terreus NIH2624]
  misc_feature: Useful for introducing or modulating the production of volatile compounds
MIFRKLDTKVILPFLGKHEVGKGSMGTACEIKLHSQCHRLPLPSQKVVRKQFTSARDNDIAFEKEVKNLALLSHLKHPNIVQLYCSYIYRQEYNLIFAVADGGTLEALLDSPHDANRLETPQFLLALADLASAIDAMHNFTSTALDLNASGCHHDLAPRNVLIQDDNTLLLADFGLSTFHEAAEDSLTTFKEVRGSYVAPECQALHGNDVTTERIGRASDIWSFGCILAEVLTYILRGAEGVAQFREQRKVDVTPEITWFRFHQGTNTPSSGVLRWLSLLQEDREIFSLRMVGLIRRMLSMIPTQRPRSSDVLAVLQGISILSLAACVLQDLDKVCNTQSVDWLLGRMRFQSWMFAVTQLLDKISQEGHENQNFDFAAIVTALKQTQRILDIVNEAPKGDVHRQLPLMRFQYERLMEGLPRQYRLAAKEQLKIMVLSHDSDMAESLSGAVRDEGDEDIGVLLAVKHLTILNETGQLTDQSHLMLDEKQITIKEEMDIHNLATLDHISETVLVEWLRYREEWAVERRRQELFCRLTSVAGLLHSKSTTQIPGSLQCQGIFHDPSHRAFGFVYRIVALLSSIDSV

SEQ ID NO: 531 - DNA, 3745 bp, Muscodor strobelii
  misc_feature: SGI EST ID NO. CUFF.1549.0
  misc_feature: Variant of the nucleotide sequence at SEQ ID NO 529
gtacctacctgcaacaaatacatacagtcatataatggagcgccagtcggtgtcgaatcgctacatcaaactagaggctcttcgtacgctgcttacaacaaaatttggggcaggaaactttaagatagtggaaagagacgaaagttacgagatcaacgttccagcgttactaacaacagttagtactaacataacatgcccgatccgaaagtaatactcatataaatcagagcgagatcgaatcaattcaagcgaaataagaaccagaatccactggattacgttgcaccaagcgtctcttcagtcttctgctctttgtgggaagcagttacctgatcaaatcctttcattcattttcttgtggtcggcgtcagaacaggagagatggatgatctacggcaaaatatcaagagagttcggttgaacaacactaactttgagggtcggcacttcatccccgagaagtccctgttcgagacaatgacgaaatcaacaattggggcgtctctcgaaagcctcggcgtccctcgccatgaacgcccagaactaacccgcaatatcttcgcaggtgctagaaaatgttttgcggtcttgatcttaatagattgcgctgagacgataccggactttttcaggcatgacctactccaacagtcttggcccgacgatcgtctcccatatttgtcggaagctctacagctgatttttggagaaaataagacaagtctaagcgttgcagattttctcgaaaaacaatgggaagttaccattccaattattcaagagaaaatgattttccgaaagctggacacgaaagtgattttaccattcctggggaagcacgaggtcggcaagggttccatgggtactgcctgcgagatcaagctgcattcacaatgccaccggcttcccttgccaagccaaaaggtagtgagaaagcaattcacgagcgcaagggataatgacatcgcctttgaaaaggaggtgaaaaatttagctctcctttcgcatttgaagcacccgaacatagttcaattgtactgctcttatatctatcggcaggaatataaccttatattcgctgttgccgatggcggtacgcttgaagcccttctcgacagcccgcacgacgccaatagactagaaaccccacagttcctgcttgctcttgccgatttggcgtcggccatcgatgctatgcacaacttcacatccacggcccttgacctcaacgcttccggttgccatcatgacctcgcgccacgaaacgttctaattcaggacgataatacactcttattggctgatttcggtctatcaactttccacgaggcagcggaggattccttaaccacattcaaggaagtacgcggctcgtacgtcgctcccgaatgtcaagcgctccacggaaatgatgtgacaacagagcggattggcagagccagcgacatatggtctttcggctgcattctcgcagaggtgctgacatatatattgagaggtgctgagggggttgcgcaattccgtgaacaaaggaaagtggacgtcactccagagattacatggttccggttccatcaaggcaccaacacaccaagttccggtgttcttcgctggctgtctctgttgcaggaagatcgggagatattcagcttgcgaatggttggattgattcgtcgaatgctttcgatgatcccaactcaacgccctcgctcgtcggacgtcttggcggttctacagggcatttctatcctttcactcgcggcgtgtgttcttcaagacttagacaaggtctgtaacactcaaagtgttgattggttgctcggcagaatgcgcttccaaagctggatgtttgctgtcactcaactgcttgacaaaataagtcaggaagggcacgaaaatcaaaatttcgattttgccgcaatagtcacggccttgaaacagacccaacggatcctggacatcgttaatgaagccccaaagggtgacgttcaccggcaactgccgctcatgagattccaatacgagaggttgatggaaggactaccgcgacagtatcgattagccgccaaggaacaactgaaaatcatggttcttagtcatgacagcgatatggctgaaagcttatcgggagctgttcgtgatgaaggagacgaagacatcggggtcctactcgctgtgaaacatcttactattctgaacgagacaggccagcttacagatcagagccatcttatgcttgatgagaagcagatcactatcaaagaagaaatggatattcataacctagcaacccttgaccatatatcagagactgtcctggtagagtggctgcgatatagagaagaatgggccgttgagaggagaagacaagaactgttctgcagactcacttctgtagcgggcttactccactcgaagagcaccacacagatcccaggcagtttacaatgccaagggatctttcatgatccctcccatcgggcttttggatttgtatacagatttccattgccacatacaaaaccagttacattacatactctcctaggtttaccgaatagtcgccctcctctcgagcatcgattccgtctagcgttcgacatataccgttgtgtctacacatttcatcaggttggatggctgcatcgcaatctccattcagggaatattgtatttttcgtgcaaaacgaaaaaatatcgtcgaatcgataaatgacccgcgcttattgggtttcgctggcagccgtgagaaccaactagcttcctttaccaatggaccagataggaacagtcagtttcggaactaccaacatccagcataccttgcacatcaggaccgctttcagaaagaatttgactactattcggtcggcatgattctattggagattgggctatggagcacgctgtctaagataactgactcagaaaggttccgaggaataacagatcaccagtacacaagggaagttctcaatcacagggtttcgaagcttgacatcgcaatgggcacaagatatatggaagctactcgtgcatgcctgttaggagatgaagctggagatttgaataatgggaatgatgcagggcatagatggttcaaaggaatggctttagagaatattccgctctttgactgaagaaaacggttcttccgcgataagatgatttattgtcgcctctctccatagcttttctctgctagtatttggcgattgggcttgagtttgttgattttatgctgtcattgagataattatcacccagcaagtctgaaaacccatattgtgttagcacccgattcgtccaaggtcaacaaatgaggagccacccttggggagaaatgaataatgaccagttgcagtattgttacggtcggagttaccggagtagcatttatatacagaaatggagtgtcaatgaccagttggtcattggtagaatcttttgattctatggtacagtggttactccatacgcattgtaacaagtattcgtgaatcggaagtcgccgttagaaattaacattcaggtataaaagaaaggctataacgcccgattccacccatggagtttaggatagaaccgaaatgttcgaatgtagcggaactatgtggaagtaagagtgttctttctaaaagtggaaacaatattatagccccagcatacagaacgcatactgctgagaaaaacataacaagcaatcgtaggttcaaaacttcactgtgccttcaacctctct

SEQ ID NO: 532 - DNA, 1020 bp, Muscodor strobelii
  misc_feature: SGI cDNA ID NO. 559750
  misc_feature: Encodes the peptide sequence at SEQ ID NO 533
atggcctacgtgtacggccttgcggccttcgtatcgctcggcagattcctgtttggttgggatcaggaagtcatggccatgattactgctaatgagcggtggtcgaggttgatggaagctgctaatgaatggtcaatcggcttcgtaataggcatatacaacatcggctgcgtaatcggggctttaaccgtgggacacttcgccgacgtatgcggacgagagcgtaccatctcactcgctagtacggtcttcatcgctggtgctttgctccaagctgtttcttacaccattccgcaaatcagcacaggccgactaatcctcggcctaggcggaggcgcctactccgccgcagttccgctctacatctccgagatctcacccgcagcactgcggggccggatagtaggcatcatcatgatgaccctctgtttcgccgaaatgatcgtcttcttcgttgactacgcgctcttcttcctagactcagactactggtggcgctggccgctcgctatccaagtcatacccgcgctcgtgctcgccgtcggctgctggtcttgggttcccccgtcccctagatggctggtgtctgagggacggtatgattgtgcgcttgaagtcttgtcgagacttcatgggtctgaggcggcgaagaaggaaattagagagattcgcgagacggttgatgaggagtctaatgcagcacagggagtgtcgtgggttgatatgttccgtggtccggtcctgagggttacgcttcttgggactggagttcagatgtttcagcagactacgggtacgaatgggatattctactatgcgccgaaactcttcaagaaaggcgggatcacggatccggtgttcgttaatcttgcgactggtggcgttggcgtcattcggtttctaagtggctggataccgatcctgtatttcgaccgctttggccgcaagacttggttccagattggacttgtcggtatgatcgttgctgccgcccaaatgaataaaacccaaggtagttaa

SEQ ID NO: 533 - protein, 339 aa, Muscodor strobelii
  misc_feature: SGI Peptide ID NO. 559750
  misc_feature (7)..(338): Pfam Id: PF00083 Pfam Desc: Sugar (and other) transporter
  misc_feature (46)..(329): Pfam Id: PF07690 Pfam Desc: Major Facilitator Superfamily
  misc_feature (7)..(331): Pfam Id: PF00083 Pfam Desc: Sugar (and other) transporter
  misc_feature (3)..(329): NCBI GI: 238503642 Blast Desc: sugar transporter, [Aspergillus flavus NRRL3357] gi|220690524|gb|EED46873.1| sugar transporter, [Aspergillus flavus NRRL3357]
  misc_feature (3)..(329): NCBI GI: 169765077 Blast Desc: [Aspergillus oryzae RIB40] gi|83764864|dbj|BAE55008.1| protein product [Aspergillus oryzae]
  misc_feature (3)..(329): NCBI GI: 196012373 Blast Desc: expressed [Trichoplax adhaerens] gi|190581372|gb|EDV21449.1| expressed [Trichoplax adhaerens]
  misc_feature (4)..(316): NCBI GI: 145616558 Blast Desc: MGG_09680 [Magnaporthe grisea 70-15] gi|145009622|gb|EDJ94278.1| MGG_09680 [Magnaporthe grisea 70-15]
  misc_feature (4)..(316): NCBI GI: 169859472 Blast Desc: CC1G_12416 [Coprinopsis cinerea okayama7#130] gi|116502548|gb|EAU85443.1| CC1G_12416 [Coprinopsis cinerea okayama7#130]
  misc_feature (6)..(329): NCBI GI: 119488376 Blast Desc: sugar transporter [Neosartorya fischeri NRRL 181] gi|119410849|gb|EAW20794.1| sugar transporter [Neosartorya fischeri NRRL 181]
  misc_feature (7)..(322): NCBI GI: 58267650 Blast Desc: hexose transport-related protein [Cryptococcus neoformans var. neoformans JEC21] gi|57227215|gb|AAW43674.1| hexose transport-related protein, [Cryptococcus neoformans var.
  misc_feature (47)..(331): NCBI GI: 284166917 Blast Desc: sugar transporter [Haloterrigena turkmenica DSM 5511] gi|284016572|gb|ADB62523.1| sugar transporter [Haloterrigena turkmenica DSM 5511]
  misc_feature (4)..(326): NCBI GI: 169849361 Blast Desc: CC1G_00931 [Coprinopsis cinerea okayama7#130] gi|116507652|gb|EAU90547.1| CC1G_00931 [Coprinopsis cinerea okayama7#130]
  misc_feature (14)..(316): NCBI GI: 256723183 Blast Desc: [Nectria haematococca mpVI 77-13-4]
MAYVYGLAAFVSLGRFLFGWDQEVMAMITANERWSRLMEAANEWSIGFVIGIYNIGCVIGALTVGHFADVCGRERTISLASTVFIAGALLQAVSYTIPQISTGRLILGLGGGAYSAAVPLYISEISPAALRGRIVGIIMMTLCFAEMIVFFVDYALFFLDSDYWWRWPLAIQVIPALVLAVGCWSWVPPSPRWLVSEGRYDCALEVLSRLHGSEAAKKEIREIRETVDEESNAAQGVSWVDMFRGPVLRVTLLGTGVQMFQQTTGTNGIFYYAPKLFKKGGITDPVFVNLATGGVGVIRFLSGWIPILYFDRFGRKTWFQIGLVGMIVAAAQMNKTQGS

SEQ ID NO: 534 - DNA, 2401 bp, Muscodor strobelii
  misc_feature: SGI EST ID NO. CUFF.1665.0
  misc_feature: Variant of the nucleotide sequence at SEQ ID NO 532
ctgaagtgtacgaaacctcgagactggcattttttcattcttttcattaatatctgtcattcttacatctatcaacccttgcggcctctttaatctgtcattcgctcatgaatacaccaaagcgatgaccgcgtagccaaagcaccaacccatcggagattagtccgatgaagaacttcatcaagcaaacggagcctatccggccacccgcatcttcaacgacccgttaccagagtgtacgaacggaagatgaagacgatgattaaaatgggtacttagatgatatccgacagctaaacatggcctacgtgtacggccttgcggccttcgtatcgctcggcagattcctgtttggttgggatcaggaagtcatggccatgattactgctaatgagcggtggtcgaggttgatggaagctgctaatgaatggtcaatcggcttcgtaataggcatatacaacatcggctgcgtaatcggggctttaaccgtgggacacttcgccgacgtatgcggacgagagcgtaccatctcactcgctagtacggtcttcatcgctggtgctttgctccaagctgtttcttacaccattccgcaaatcgtatgccagtcttcaaccccaacccttccccttcgccccctcaaatctatactgacagacaatccaacagagcacaggccgactaatcctcggcctaggcggaggcgcctactccgccgcagttccgctctacatctccgagatctcacccgcagcactgcggggccggatagtaggcatcatcatgatgaccctctgtttcgccgaaatgatcgtcttcttcgttgactacgcgctcttcttcctagactcagactactggtggcgctggccgctcgctatccaagtcatacccgcgctcgtgctcgccgtcggctgctggtcttgggttcccccgtcccctagatggctggtgtctgagggacggtatgattgtgcgcttgaagtcttgtcgagacttcatgggtctgaggcggcgaagaaggaaattagagagattcgcgagacggttgatgaggagtctaatgcagcacagggagtgtcgtgggttgatatgttccgtggtccggtcctgagggttacgcttcttgggactggagttcagatgtttcagcagactacgggtacgaatgggatattctactatgcgccgaaactcttcaagaaaggcgggatcacggatccggtgttcgttaatcttgcgactggtggcgttggcgtcattcggtttctaagtggctggataccgatcctgtatttcgaccgctttggccgcaagacttggttccagattggacttgtcggtatgatcgttgctgccgcccaaatgaataaaacccaaggtagttaataggcgtaattgattgacggttatgaaaactgggtcagcgagcacattgtcgactgtatccgagagatatacacaacgactccgggaactacatgcaagattaggaatgtcgcagtgggcattgcgagagaccaccggtccgagctctggaagaagaaggcgtttcgggaccttgtgcacgagggtggtgatttcactttggagctgaagggggaattatgccctgattaatactagtgaaggcagcggtactcgatagtaacctggaacactgggaagacagctttgtttacgcgacctttgtcctttgtcctctgtccggggctactacgtcgagacatcatgatatgcccggtctccctgatttgatcttctgtatgtacacgaggcctcactgctctaagtccttctacgcgtaactcccagcttaggtctctccatcgtcaaggacagagaggtaacgagtcatgcaagggtcgtaggtctcggtcttgactcgcatcgaggtagcatcattgtcgcgagagctctgtcgcgtgtagggcgtgtcggacgtctcgccggcgcggtcgcgagggaagagaagtggtccgtagcgggccttggccgtggcaccgtctttgaaaccgactcgggcggcaagcttgtcccaattgacctaggcgtggcatcagtatatgctataatgatggagagagaaagacgagagagggagggagagacgcacgactggcttcgtctcaaagcattcctagactttgacgagaaccatcatgtcgctggcggtgatgtggtccgaggttgtggagttgggtgccatggtgattgtgccgtgaggaaggagatgatggatgatgattagaaatatgaaagagttgcttcggtgggaatgaataggttgtacaacgcttcgttgacagttggcaattgccgtcaggggtaggtacagccagcctagttggcccccatcccgccctccttcccccactattccatcttccccaccttcagc

SEQ ID NO: 535 - DNA, 294 bp, Muscodor strobelii
  misc_feature: SGI cDNA ID NO. 559751
  misc_feature: Encodes the peptide sequence at SEQ ID NO 536
atggcacccaactccacaacctcggaccacatcaccgccagcgacatgatggttctcgtcaaagtcaattgggacaagcttgccgcccgagtcggtttcaaagacggtgccacggccaaggcccgctacggaccacttctcttccctcgcgaccgcgccggcgagacgtccgacacgccctacacgcgacagagctctcgcgacaatgatgctacctcgatgcgagtcaagaccgagacctacgacccttgcatgactcgttacctctctgtccttgacgatggagagacctaa

SEQ ID NO: 536 - protein, 97 aa, Muscodor strobelii
  misc_feature: SGI Peptide ID NO. 559751
MAPNSTTSDHITASDMMVLVKVNWDKLAARVGFKDGATAKARYGPLLFPRDRAGETSDTPYTRQSSRDNDATSMRVKTETYDPCMTRYLSVLDDGET

SEQ ID NO: 537 - DNA, 2443 bp, Muscodor strobelii
  misc_feature: SGI EST ID NO. CUFF.1666.1
  misc_feature: Variant of the nucleotide sequence at SEQ ID NO 535
gctgaaggtggggaagatggaatagtgggggaaggagggcgggatgggggccaactaggctggctgtacctacccctgacggcaattgccaactgtcaacgaagcgttgtacaacctattcattcccaccgaagcaactctttcatatttctaatcatcatccatcatctccttcctcacggcacaatcaccatggcacccaactccacaacctcggaccacatcaccgccagcgacatgatggttctcgtcaaagtctaggaatgctttgagacgaagccagtcgtcaattgggacaagcttgccgcccgagtcggtttcaaagacggtgccacggccaaggcccgctacggaccacttctcttccctcgcgaccgcgccggcgagacgtccgacacgccctacacgcgacagagctctcgcgacaatgatgctacctcgatgcgagtcaagaccgagacctacgacccttgcatgactcgttacctctctgtccttgacgatggagagacctaagctgggagttacgcgtagaaggacttagagcagtgaggcctcgtgtacatacagaagatcaaatcagggagaccgggcatatcatgatgtctcgacgtagtagccccggacagaggacaaaggacaaaggtcgcgtaaacaaagctgtcttcccagtgttccaggttactatcgagtaccgctgccttcactagtattaatcagggcataattcccccttcagctccaaagtgaaatcaccaccctcgtgcacaaggtcccgaaacgccttcttcttccagagctcggaccggtggtctctcgcaatgcccactgcgacattcctaatcttgcatgtagttcccggagtcgttgtgtatatctctcggatacagtcgacaatgtgctcgctgacccagttttcataaccgtcaatcaattacgcctattaactaccttgggttttattcatttgggcggcagcaacgatcataccgacaagtccaatctggaaccaagtcttgcggccaaagcggtcgaaatacaggatcggtatccagccacttagaaaccgaatgacgccaacgccaccagtcgcaagattaacgaacaccggatccgtgatcccgcctttcttgaagagtttcggcgcatagtagaatatcccattcgtacccgtagtctgctgaaacatctgaactccagtcccaagaagcgtaaccctcaggaccggaccacggaacatatcaacccacgacactccctgtgctgcattagactcctcatcaaccgtctcgcgaatctctctaatttccttcttcgccgcctcagacccatgaagtctcgacaagacttcaagcgcacaatcataccgtccctcagacaccagccatctaggggacgggggaacccaagaccagcagccgacggcgagcacgagcgcgggtatgacttggatagcgagcggccagcgccaccagtagtctgagtctaggaagaagagcgcgtagtcaacgaagaagacgatcatttcggcgaaacagagggtcatcatgatgatgcctactatccggccccgcagtgctgcgggtgagatctcggagatgtagagcggaactgcggcggagtaggcgcctccgcctaggccgaggattagtcggcctgtgctctgttggattgtctgtcagtatagatttgagggggcgaaggggaagggttggggttgaagactggcatacgatttgcggaatggtgtaagaaacagcttggagcaaagcaccagcgatgaagaccgtactagcgagtgagatggtacgctctcgtccgcatacgtcggcgaagtgtcccacggttaaagccccgattacgcagccgatgttgtatatgcctattacgaagccgattgaccctataattttcatcttcattagcaaacatctcaataatataatcccaatattcctgttctaatcaaacaccttccacatcttccaggacgtaaatatgatgagaaactcacattcattagcagcttccatcaacctcgaccaccgctcattagcagtaatcatggccatgacttcctgatcccaaccaaacaggaatctgccgagcgatacgaaggccgcaaggccgtacacgtaggccatgtttagctgtcggatatcatctaagtacccattttaatcatcgtcttcatcttccgttcgtacactctggtaacgggtcgttgaagatgcgggtggccggataggctccgtttgcttgatgaagttcttcatcggactaatctccgatgggttggtgctttggctacgcggtcatcgctttggtgtattcatgagcgaatgacagattaaagaggccgcaagggttgatagatgtaagaatgacagatattaatgaaaagaatgaaaaaatgccagtctcgaggtttcgtacacttcag

SEQ ID NO: 538 - DNA, 1458 bp, Muscodor strobelii
  misc_feature: SGI cDNA ID NO. 559752
  misc_feature: Encodes the peptide sequence at SEQ ID NO 539
atgccctctttgtgctctatcacgattgctcaagcacaaaggtattccattcaaaacaagacagagctaacgaagcacgtcgctgctgcgggcggtgccatagaccatctccaaggcgacgaagagcattattttcgttggtattctactcgtgaaacccataaattccccgaagcgcaacataatctggtcgaacaccagttgcttcccgagaaaaaggtatggaccattgtcagcaacgtgatccagtggtttcattcacgtttccaacccttttcgtgggtcgttgggcctatggaccagccgcaccttgaacttgctctgtataagcaaggtctcgtgttggctgaagcccagttggcgttggcttatgacctccaacaagatgggagcccgggatgtcgcaaagggtcatcagtttggatctgcacaaaagacgcaatgacgatggccacagcgaaatacgcacctatcacgaccagaaagctacagtcaccgcgagcacaatcagtgccttgtagtaccatggacgtatatttgacgcagacgaagatccgggcagcaggtcataacaaattaacaaggcatcaacaagcgtcggccaatctccatgatccgagctgcagtcacatggttattatggattcgaactctaattcgctagagtggcagctagctggatcagagaagctaacttgcgagaggcttctgcaagagcgaccttctgcttgtcgcaagcccaatggatgcgccttcgagatgaacagatccaatgccaatctacgtctactatttcacgccgtaaaggatggaaacagcaaagccgttagctcgattcctacattgcgatgtcgagacacttacactgtggagccagtcgttgaaccggaggtgttcgagatgatcgtcgccaagacgaatgatcttaacccagaggataagaatggtattgttggcacggcttacatacactactacaacggcatcgcatcagttcactgtgttactgtgaagccggctcacagacgaaagggagtcggtcctggcttactgcacatcgcggcgaaactggccaagagcaagggatacaacatcatgacggcgaccagtactgaccaaggccgaggcatgcttttcaaagccgggtttcgcgagatcggtgtcgtgaagcaatacttgttcaatccaagtactgtatacggggcaaacagaatgcaaaatgataaacaggaacatgcgaaaaatctagccaagccacacacgaagcctgttacccaggtcaaccctcccgaaaagctacgaaaagcgtctatcaccacacaggccacacccgcctacttagagatagctctaaaaaacgcgtcatcgaaattgagagagacgtctgaaaaggaagagtttatcaaggcagactcagtagagccagaagactgggatatgatcgtggtggatgagtaa

SEQ ID NO: 539 - protein, 485 aa, Muscodor strobelii
  misc_feature: SGI Peptide ID NO. 559752
  misc_feature (309)..(384): Pfam Id: PF00583 Pfam Desc: Acetyltransferase (GNAT) family
  misc_feature (312)..(384): Pfam Id: PF00583 Pfam Desc: Acetyltransferase (GNAT) family
  misc_feature (294)..(392): NCBI GI: 88713689 Blast Desc: Protein containing acetyltransferase (GNAT family) domain [Flavobacteriales bacterium HTCC2170] gi|88707816|gb|EAR00055.1| Protein containing acetyltransferase
MPSLCSITIAQAQRYSIQNKTELTKHVAAAGGAIDHLQGDEEHYFRWYSTRETHKFPEAQHNLVEHQLLPEKKVWTIVSNVIQWFHSRFQPFSWVVGPMDQPHLELALYKQGLVLAEAQLALAYDLQQDGSPGCRKGSSVWICTKDAMTMATAKYAPITTRKLQSPRAQSVPCSTMDVYLTQTKIRAAGHNKLTRHQQASANLHDPSCSHMVIMDSNSNSLEWQLAGSEKLTCERLLQERPSACRKPNGCAFEMNRSNANLRLLFHAVKDGNSKAVSSIPTLRCRDTYTVEPVVEPEVFEMIVAKTNDLNPEDKNGIVGTAYIHYYNGIASVHCVTVKPAHRRKGVGPGLLHIAAKLAKSKGYNIMTATSTDQGRGMLFKAGFREIGVVKQYLFNPSTVYGANRMQNDKQEHAKNLAKPHTKPVTQVNPPEKLRKASITTQATPAYLEIALKNASSKLRETSEKEEFIKADSVEPEDWDMIVVDE

SEQ ID NO: 540 - DNA, 601 bp, Muscodor strobelii
  misc_feature: SGI cDNA ID NO. 559753
  misc_feature: Encodes the peptide sequence at SEQ ID NO 541
atggatgcctcagctcgtaatcgcgagatgttcactcgtggcttattctcggatatcacgatatactgtggccacaaggaatggaagcttcacaaggtcattctctcctctggcgccgactggtttcacacgaccatctctgagggatcgaccgacgaggtgcgcatacaagaccaagatcccgaagccgtcggttgggtgctcgagtggatttacacgggagttgtacttgcaccggctttcgaagaagcgtcgacacgatacggagccctcatccgcctcttccagtgcgcacaatacttcaatctgaatgacctgtgcgatgactgcgtgaatcgtatcgagcagctcttgttggagacatcggggcgggtgcagtacgctgttcaatgtggttttgatgggaatcgaatcctggagctggacgatcttgaaggcttcattgacggagtcaaaagagcatacgagctggacgacggaactcgacttcgatcggctttcacgaaatttctcacggactgccatttttggatcgtactcgacctggactttcgccgcaagggacagaagatacccgcattctggcaatgcgtactcgagg

SEQ ID NO: 541 - protein, 200 aa, Muscodor strobelii
  misc_feature: SGI Peptide ID NO. 559753
  misc_feature (7)..(118): Pfam Id: PF00651 Pfam Desc: BTB/POZ domain
  misc_feature (9)..(194): NCBI GI: 116179034 Blast Desc: CHGG_00145 [Chaetomium globosum CBS 148.51] gi|88184442|gb|EAQ91910.1| CHGG_00145 [Chaetomium globosum CBS 148.51]
  misc_feature (5)..(106): NCBI GI: 171680598 Blast Desc: protein product [Podospora anserina] gi|170939926|emb|CAP65152.1| protein product [Podospora anserina]
  misc_feature (5)..(194): NCBI GI: 85079439 Blast Desc: NCU05044 [Neurospora crassa OR74A] gi|28917412|gb|EAA27116.1| [Neurospora crassa OR74A]
  misc_feature (10)..(110): NCBI GI: 118101053 Blast Desc: [Gallus gallus]
  misc_feature (10)..(110): NCBI GI: 47228796 Blast Desc: protein product [Tetraodon nigroviridis]
  misc_feature (10)..(110): NCBI GI: 189535997 Blast Desc: : similar to actinfilin [Danio rerio]
  misc_feature (2)..(110): NCBI GI: 119576707 Blast Desc: kelch-like 17 (Drosophila), isoform CRA_d [Homo sapiens]
  misc_feature (2)..(110): NCBI GI: 119576704 Blast Desc: kelch-like 17 (Drosophila), isoform CRA_a [Homo sapiens]
  misc_feature (2)..(110): NCBI GI: 148683144 Blast Desc: kelch-like 17 (Drosophila), isoform CRA_b [Mus musculus]
  misc_feature (2)..(110): NCBI GI: 149024875 Blast Desc: kelch-like 17 (Drosophila), isoform CRA_b [Rattus norvegicus]
MDASARNREMFTRGLFSDITIYCGHKEWKLHKVILSSGADWFHTTISEGSTDEVRIQDQDPEAVGWVLEWIYTGVVLAPAFEEASTRYGALIRLFQCAQYFNLNDLCDDCVNRIEQLLLETSGRVQYAVQCGFDGNRILELDDLEGFIDGVKRAYELDDGTRLRSAFTKFLTDCHFWIVLDLDFRRKGQKIPAFWQCVLE

SEQ ID NO: 542 - DNA, 225 bp, Muscodor strobelii
  misc_feature: SGI EST ID NO. CUFF.1509.0
  misc_feature: Variant of the nucleotide sequence at SEQ ID NO 540
cgccgactggtttcacacgaccatctctgagggatcgaccgacgaggtgcgcatacaagaccaagatcccgaagccgtcggttgggtgctcgagtggatttacacgggaggtacgtccctcgtctccagcgtcatgatcgatgtgacgaaatcctgacctttagctagttgtacttgcaccggctttcgaagaagcgtcgacacgatacggagccctcatccgcc

SEQ ID NO: 543 - DNA, 231 bp, Muscodor strobelii
  misc_feature: SGI cDNA ID NO. 559754
  misc_feature: Elevated expression when VOC is produced
  misc_feature: Encodes the peptide sequence at SEQ ID NO 544
cttggccctgaagcttcttcgttcctctctggtgagcgcagactcgaactagctacaacaagcaagggcgcgagcgaccaaaatactccaccgacagtagagaagcttcgtagcaggataacggctcagccgacggaacggaaagttaggttcgctgctgaaagtgagctaaacgatgatcaggatgacaaaggggaagtctccaaatatttccggaagagcacatcataa

SEQ ID NO: 544 - protein, 76 aa, Muscodor strobelii
  misc_feature: SGI Peptide ID NO. 559754
  misc_feature: Useful for introducing or modulating the production of volatile compounds
LGPEASSFLSGERRLELATTSKGASDQNTPPTVEKLRSRITAQPTERKVRFAAESELNDDQDDKGEVSKYFRKSTS

SEQ ID NO: 545 - DNA, 913 bp, Muscodor strobelii
  misc_feature: SGI EST ID NO. CUFF.1564.1
  misc_feature: Variant of the nucleotide sequence at SEQ ID NO 543
tggtagactaactgccgatgatgtattgaaagaagaaaatattatctatcgtagcagcgggatagctacacagtatcttcggcttggccctgaagcttcttcgttcctctctggtgagcgcagactcgaactagctacaacaagcaagggcgcgagcgaccaaaatactccaccgacagtagagaagcttcgtagcaggataacggctcagccgacggaacggaaagttaggttcgctgctgaaagtgagctaaacgatgatcaggatgacaaaggggaagtctccaaatatttccggaagagcacatcataaacgaggtctacggaacacggcagcaaagcctccttcacgaggactgtttgaggtgtacaagtcccattcacaaacctggaggaccccacggatgactttcttgtacctggcaatcccaaccgatatcaacgcgacatgttaccgtcatctagtagataagatagatataggtatagatatgcccctggcgaagcgtgcccgaggggttagtaggtaataatctactggcacgatgcaaagagtaccaataaccatctatcgaaggtaaactcgtcgtcggcgaagtcgggaatgtccagatgcttgatgtgatgtttgagttgaccggtcgtgtgggactgtgtaatgagatgtcctaaatatgaccatgtctgcaacctagaactatcgccaaaggggaaccacatgtactgggacattctagaagccgtttctcttgaatgtatgacaagctgttcttcgaaagtgacggtggaaggtacagcaaggggatggccacaggcatcaagcacgacccgagagagaggcttcggaaaagacttcatagctgaccgtacttgtatgtgcctatcttcgttctgtatatgacaatgatctttc

SEQ ID NO: 546 - DNA, 975 bp, Muscodor strobelii
  misc_feature: SGI cDNA ID NO. 559755
  misc_feature: Elevated expression when VOC is produced
  misc_feature: Encodes the peptide sequence at SEQ ID NO 547
atgttccctcaagcttctactacctccaccgacgagaacagagtcacgatctgcacttgcatcgatggcttcatgtgcatacgcgtaacatcggagcatgagaagagcccgtacgctcgcgaggagggacccatagagcagatcaaactcaaacacagcggcagggacatcgactacatctcattgaaagatatgacggtcgagatggctttgttatttgcagacggcatgggcgcggaagtttttgagatgattcgagacagctcgcacccgagcgaaacgcaatggtcttaccctcaacttgttggaatccaagcggcggagctgctttaccacctgaatatccggcacgaaaagcacgaccctggcaacacaagaagtctagaagacgatcgacttggagtgatacatgaactcatccgcatcgttgagaatgatgctgtgtatcctaatgagagtgtaggaaccttggtcctaacgacgatcagtctccaagtacctgatccgaggcgtgtcccaaacctgagcaccttttctgcaccccggaggcctcttgctgctgctgagtctttcactcatgctcgggaatacgacaaggaagggctgtttgctggatttcgagctacaaggcgcttcggacagtcagtcaggcttgccgatgtcgtcgtcggcatcccgacgggtcaatatcccggagtggtgcagtgggatctgggcaaagaacagaaggggagcgaattcactcggacgggctcgctaaataaccctcctcgatcacttttgggtgccatatcggagctccgggccgaatatgacttgcaagattcgaagataccgtcctacctaagcgacatggcgttgaaatatcccaagtcggcatcaaaatatctacgatctgactcgcttcaagatgtgctcttcaaggccgcctacgaccataacgaagccaaacatgcggcgtgcctccttcattaa

SEQ ID NO: 547 - protein, 324 aa, Muscodor strobelii
  misc_feature: SGI Peptide ID NO. 559755
  misc_feature (216)..(321): NCBI GI: 46139821 Blast Desc: FG11425.1 [Gibberella zeae PH-1]
  misc_feature (216)..(321): NCBI GI: 116197170 Blast Desc: CHGG_05183 [Chaetomium globosum CBS 148.51] gi|88181096|gb|EAQ88564.1| CHGG_05183 [Chaetomium globosum CBS 148.51]
  misc_feature (215)..(313): NCBI GI: 212541358 Blast Desc: serine/threonine-protein kinase ripk4, [Penicillium marneffei ATCC 18224] gi|210068133|gb|EEA22225.1| serine/threonine-protein kinase ripk4, [Penicillium marneffei
  misc_feature (188)..(304): NCBI GI: 171693393 Blast Desc: protein product [Podospora anserina] gi|170946645|emb|CAP73448.1| protein product [Podospora anserina]
  misc_feature (216)..(322): NCBI GI: 169773129 Blast Desc: [Aspergillus oryzae RIB40] gi|83768894|dbj|BAE59031.1| protein product [Aspergillus oryzae]
  misc_feature (216)..(322): NCBI GI: 238491078 Blast Desc: ankyrin repeat-containing protein, [Aspergillus flavus NRRL3357] gi|220697189|gb|EED53530.1| ankyrin repeat-containing protein, [Aspergillus flavus NRRL3357]
  misc_feature (216)..(307): NCBI GI: 115390338 Blast Desc: conserved [Aspergillus terreus NIH2624] gi|114195070|gb|EAU36770.1| conserved [Aspergillus terreus NIH2624]
  misc_feature (199)..(315): NCBI GI: 225557065 Blast Desc: ankyrin repeat protein [Ajellomyces capsulatus G186AR]
  misc_feature (199)..(307): NCBI GI: 46127555 Blast Desc: FG08155.1 [Gibberella zeae PH-1]
  misc_feature (199)..(315): NCBI GI: 154285314 Blast Desc: conserved [Ajellomyces capsulatus NAm1] gi|150407093|gb|EDN02634.1| conserved [Ajellomyces capsulatus NAm1]
  misc_feature: Useful for introducing or modulating the production of volatile compounds
MFPQASTTSTDENRVTICTCIDGFMCIRVTSEHEKSPYAREEGPIEQIKLKHSGRDIDYISLKDMTVEMALLFADGMGAEVFEMIRDSSHPSETQWSYPQLVGIQAAELLYHLNIRHEKHDPGNTRSLEDDRLGVIHELIRIVENDAVYPNESVGTLVLTTISLQVPDPRRVPNLSTFSAPRRPLAAAESFTHAREYDKEGLFAGFRATRRFGQSVRLADVVVGIPTGQYPGVVQWDLGKEQKGSEFTRTGSLNNPPRSLLGAISELRAEYDLQDSKIPSYLSDMALKYPKSASKYLRSDSLQDVLFKAAYDHNEAKHAACLLH

SEQ ID NO: 548 - DNA, 804 bp, Muscodor strobelii
  misc_feature: SGI cDNA ID NO. 559756
  misc_feature: Elevated expression when VOC is produced
  misc_feature: Encodes the peptide sequence at SEQ ID NO 549
atgcctaaaatacctactttccccttcaaagctatgcttcgaagattgtacctatcggaccttcctgctgagatcctcatcatgatttatctatttgtggcagaagatacggaggcaccagttcaattacgacagcgcagatccgtgctcaccttccaaccgtccccgtgcggcgctactagtctcttatacacctcacgattattttaccgcgactttctatcattatatctcaagctggttccccatcaaatctacttgcaagacttgggccgatatctacgaagcgctctgttccacgacaatcaagcgaaaaccctattcattgtggcaaatccatgggctgggcgtcccggggctgcgcagcataccgtggatatattgccgctcttacgtatccgctggtcctgcccaagctaccgtatctccattgtacccgccgagtcaagatttaccccgtatctccgaatatcatcgcctgttatgttcaaacaactcaatagcctggtcaacgaaagcgaagccctgagttaccatgccgctgaatggagctctattcaactatcatggtgtggatcttatctgaatcttacattcgtccctgcgaagtatgcaggtgctgttcagttgatcgataacgtctttttccggtcttggcgcctggacggaagccgagagctatatgatcaggatctcaccttcagcgagcgcgaaacactcggcatttcacgtctagacaacttgggtttcggaaaactgcctacggagtatagtccgacaacgtcttggctctccttgaggtaa

SEQ ID NO: 549 - protein, 267 aa, Muscodor strobelii
  misc_feature: SGI Peptide ID NO. 559756
  misc_feature: Useful for introducing or modulating the production of volatile compounds
MPKIPTFPFKAMLRRLYLSDLPAEILIMIYLFVAEDTEAPVQLRQRRSVLTFQPSPCGATSLLYTSRLFYRDFLSLYLKLVPHQIYLQDLGRYLRSALFHDNQAKTLFIVANPWAGRPGAAQHTVDILPLLRIRWSCPSYRISIVPAESRFTPYLRISSPVMFKQLNSLVNESEALSYHAAEWSSIQLSWCGSYLNLTFVPAKYAGAVQLIDNVFFRSWRLDGSRELYDQDLTFSERETLGISRLDNLGFGKLPTEYSPTTSWLSLR

SEQ ID NO: 550 - DNA, 1038 bp, Muscodor strobelii
  misc_feature: SGI EST ID NO. CUFF.1529.0
  misc_feature: Variant of the nucleotide sequence at SEQ ID NO 548
ctttcttatgcctaaaatacctactttccccttcaaagctatgcttcgaagattgtacctatcggaccttcctgctgagatcctcatcatgatttatctatttgtggcagaagatacggaggcaccagttcaattacgacagcgcagatccgtgctcaccttccaaccgtccccgtgcggcgctactagtctcttatacacctcacgattattttaccgcgactttctatcattatatctcaagctggttccccatcaaatctacttgcaagacttgggccgatatctacgaagcgctctgttccacgacaatcaagcgaaaaccctattcattgtggcaaatccatgggctgggcgtcccggggctgcgcagcataccgtggatatattgccgctcttacgtatccgctggtcctgcccaagctaccgtatctccattgtacccgccgagtcaagatttaccccgtatctccgaatatcatcgcctgttatgttcaaacaactcaatagcctggtcaacgaaagcgaagccctgagttaccatgccgctgaatggagctctattcaactatcatggtgtggatcttatctgaatcttacattcgtccctgcgaagtatgcaggtgctgttcagttgatcgataacgtctttttccggtcttggcgcctggacggaagccgagagctatatgatcaggatctcaccttcagcgagcgcgaaacactcggcatttcacgtctagacaacttgggtttcggaaaactgcctacggagtatagtccgacaacgtcttggctctccttgaggtaatcaataatgatttccacatgctcgtatgctgcacttggatgtttgcgtggtcagatcgcgaatttttgttcgtcgtccagatatccttgaagcgggcttcagtagacaagatatcacaaacttagcgtctattcgactaacgtctttaatgtgacaatggcttatacttaagggcttggtagtgtttttgattcaagtaataattctcaatgactcttaaaggtcat

SEQ ID NO: 551 - DNA, 1161 bp, Muscodor strobelii
  misc_feature: SGI cDNA ID NO. 559757
  misc_feature: Encodes the peptide sequence at SEQ ID NO 552
atgggcgctgatgagatcttcgatttcatcgtcgtcggtggtggatgtattggcacgtcgacggtccacgctttgataacggaaagacccggggcgaaaatagcttggttcacagggaagcataaacgcaccgcgtcgaacgacttcatcaagatcattcgtgatgtgtacccggatgacgtggtctcggaattcgcgaaccgcgctttgcagaagtggatgagcacatcgccttatcgcgagtattttcacaagacggcgtggatccgcgcgattcgtagtgatgatgaaaacggaatgacgaggcgatcgagcgatgacgttctgaccgcatctgagatgatggaaacggtcggatctgatgccgcaccactgctagacgaaagcgaggagctcttcctgaatccgaatgtgggatatgctgattccgctcgggctgtcgagtcaatcgccgatgacgcagtaaagttgggagtgggacgacacaagatcaatgtcacgcggctgatcgttgaagatggtaagtgcctgggtgtccaagttgagggatctatcatcaaaagagccaaccaaatcatcgtgtcggccggagcttggactccatccctcctcgcgcagtcgggaattgctttcccacccgatttcttcactgccacggctattgcagtcgcaacagtcgctctttcagaccaagagttcacgaatctgaaatcaatgccaatattggctacagaaaagggcgaaatcatgctctcacatcgagaaagggtcttgaagatcaattacgcgacaagtttccgaatcagcgaccctgatcaactatccgacgcggttgatgtcactggcaatcgcgagcttctggaaaagatgttgccccaattcaaaggaagagacctggagagttttatctgccctgatctgctgaccccttatcaatatcccatcatcgaccgcatgccggctgttcgacatctcatcatagcgacagggggttcttaccattcctataaactcttaccagtcatcggcgagatagttgccttgcgtattcgcagtcatcaaggccgtgactctgtagagtcggcacttttaaaccgttgccgctgggaacgtatggagggcaccaagtccattcatgcgcgattagtaccccagagctag

SEQ ID NO: 552 - protein, 386 aa, Muscodor strobelii
  misc_feature: SGI Peptide ID NO. 559757
  misc_feature (8)..(349): Pfam Id: PF01266 Pfam Desc: FAD dependent oxidoreductase
  misc_feature (133)..(349): Pfam Id: PF01266 Pfam Desc: FAD dependent oxidoreductase
  misc_feature (8)..(384): NCBI GI: 115386498 Blast Desc: conserved [Aspergillus terreus NIH2624] gi|114190788|gb|EAU32488.1| conserved [Aspergillus terreus NIH2624]
  misc_feature (8)..(385): NCBI GI: 145250443 Blast Desc: An15g01960 [Aspergillus niger] gi|134082255|emb|CAK42299.1| protein product [Aspergillus niger]
  misc_feature (9)..(346): NCBI GI: 170940234 Blast Desc: protein product [Podospora anserina]
  misc_feature (10)..(384): NCBI GI: 169765099 Blast Desc: [Aspergillus oryzae RIB40] gi|83764875|dbj|BAE55019.1| protein product [Aspergillus oryzae]
  misc_feature (10)..(374): NCBI GI: 169612646 Blast Desc: SNOG_09447 [Phaeosphaeria nodorum SN15] gi|111061592|gb|EAT82712.1| SNOG_09447 [Phaeosphaeria nodorum SN15]
  misc_feature (9)..(371): NCBI GI: 46115148 Blast Desc: FG03416.1 [Gibberella zeae PH-1]
  misc_feature (9)..(374): NCBI GI: 256733960 Blast Desc: [Nectria haematococca mpVI 77-13-4]
  misc_feature (10)..(384): NCBI GI: 238503610 Blast Desc: sarcosine oxidase, [Aspergillus flavus NRRL3357] gi|220690509|gb|EED46858.1| sarcosine oxidase, [Aspergillus flavus NRRL3357]
  misc_feature (10)..(374): NCBI GI: 46128169 Blast Desc: FG08462.1 [Gibberella zeae PH-1]
  misc_feature (9)..(371): NCBI GI: 7959289 Blast Desc: sarcosine oxidase [Cylindrocarpon didymum]
  misc_feature (7)..(366): SWISSPROT Homolog: EC 1.5.3.1 Sarcosine oxidase
MGADEIFDFIVVGGGCIGTSTVHALITERPGAKIAWFTGKHKRTASNDFIKIIRDVYPDDVVSEFANRALQKWMSTSPYREYFHKTAWIRAIRSDDENGMTRRSSDDVLTASEMMETVGSDAAPLLDESEELFLNPNVGYADSARAVESIADDAVKLGVGRHKINVTRLIVEDGKCLGVQVEGSIIKRANQIIVSAGAWTPSLLAQSGIAFPPDFFTATAIAVATVALSDQEFTNLKSMPILATEKGEIMLSHRERVLKINYATSFRISDPDQLSDAVDVTGNRELLEKMLPQFKGRDLESFICPDLLTPYQYPIIDRMPAVRHLIIATGGSYHSYKLLPVIGEIVALRIRSHQGRDSVESALLNRCRWERMEGTKSIHARLVPQS

SEQ ID NO: 553 - DNA, 993 bp, Muscodor strobelii
  misc_feature: SGI EST ID NO. CUFF.1541.0
  misc_feature: Variant of the nucleotide sequence at SEQ ID NO 551
ccaatattggctacagaaaagggcgaaatcatgctctcacatcgagaaagggtcttgaagatcaattacgcgacaagtttccgaatcagcgaccctgatcaactatccgacgcggttgatgtcactggcaatcgcgagcttctggaaaagatgttgccccaattcaaaggaagagacctggagagttttatctgccctgatctgctgaccccttatcaatatcccatcatcgaccgcatgccggctgttcgacatctcatcatagcgacagggggttcttaccattcctataaactcttaccagtcatcggcgagatagttgccttgcgtattcgcagtcatcaaggccgtgactctgtagagtcggcacttttaaaccgttgccgctgggaacgtatggagggcaccaagtccattcatgcgcgattagtaccccagagctagtcatatttcacaaagacgactttctgcctacacttagacggagaatatcagtgttcatacttggtgatcaacttgagaactgcgaggttttgatgcataagctgccgttcattgatgtggcagaactactcggtcttaactctttcatgaaagcggggagtctggtttatttcttctgtacaacgccgtcaagactctagccgagtataagcacgagggctttggtttcattaccagttgcgtcttggaatcaaacctgctgaagaaagccgggaacccaggagcacaggcgcagctcttcgctaacctaggtctcaaagtcaatttgaaaatgggcggtgtgaatcacaagctccaaagccagatgagtatcatgcgcgggggtacaagacgatggtcgcaggatatgatgtcctgcacccaacgaatctcgtaggtaatgcagagggagagcctagcctagtggctttaatggcatcgatagatgatgatttggcacaatagcccgcgattctctggcgtcaagacgggaatatcaaactgttagac

SEQ ID NO: 554 - DNA, 724 bp, Muscodor strobelii
  misc_feature: SGI cDNA ID NO. 559758
  misc_feature: Encodes the peptide sequence at SEQ ID NO 555
atgggtatcaagaatctgttctccatcatcaaagatgaggcccctgctgccgtcaaggagggcgacatcaagaatcacttcggtcgcaaggttgctatagatgcctccatgagcatctacagcttcctcatcgcggtgcgatccgacggccagcagctgaccaacgaggccggcgacaccacctcccacctcatgggcatgttctaccgcaccctgcgcatgatcgacaacggcatcaagccgctgtatgtcttcgacggcgccccgcccaagctcaagtcgggcgagctcgccaagcgcttccagcgcaaggccgaggccaaccaggacctcgaggaggccaaggagaccggcaccgccgaagacgtcgagaagttctcccgccgcaccgtccgtgtcacccgcgagcacaatgccgagtgccagcagctgctgaagctcatgggcgtcccctacatcgtcgcccccaccgaggccgaggcccaatgcgccgtcctagcccgggccggcaaggtctacgccgccgccagtgaagacatggacacgctgtgctttgacagccccatcctgctgcgtcatctgactttcagcgagcagaggaaggagcccatccaggagattgctgtcgacaaggtcctcgagggcctgcagatggatcgcaaacaatttgttgacctctgtatactgcttggctgcgattacctcgatcccattcccaaggtcg

SEQ ID NO: 555 - protein, 241 aa, Muscodor strobelii
  misc_feature: SGI Peptide ID NO. 559758
  misc_feature (146)..(237): Pfam Id: PF00867 Pfam Desc: XPG I-region
  misc_feature (1)..(107): Pfam Id: PF00752 Pfam Desc: XPG N-terminal domain
  misc_feature (1)..(241): NCBI GI: 46138549 Blast Desc: FG10789.1 [Gibberella zeae PH-1]
  misc_feature (1)..(241): NCBI GI: 256729138 Blast Desc: [Nectria haematococca mpVI 77-13-4]
  misc_feature (1)..(241): NCBI GI: 164426998 Blast Desc: DNA-repair protein rad2 [Neurospora crassa OR74A] gi|157071561|gb|EDO65264.1| DNA-repair protein rad2 [Neurospora crassa OR74A]
  misc_feature (1)..(241): NCBI GI: 261354982 Blast Desc: DNA-repair protein rad2 [Verticillium albo-atrum VaMs.102]
  misc_feature (1)..(241): NCBI GI: 145245469 Blast Desc: An11g10450 [Aspergillus niger] gi|134079702|emb|CAK97128.1| protein product [Aspergillus niger]
  misc_feature (1)..(241): NCBI GI: 67524613 Blast Desc: AN2764.2 [Aspergillus nidulans FGSC A4] gi|40744016|gb|EAA63198.1| AN2764.2 [Aspergillus nidulans FGSC A4] gi|259486319|tpe|CBF84062.1| TPA: 5' to 3' exonuclease, 5'
  misc_feature (1)..(241): NCBI GI: 240273940 Blast Desc: DNA repair protein RAD2 [Ajellomyces capsulatus H143]
  misc_feature (1)..(241): NCBI GI: 154292277 Blast Desc: BC1G_14593 [Botryotinia fuckeliana B05.10] gi|150846169|gb|EDN21362.1| BC1G_14593 [Botryotinia fuckeliana B05.10]
  misc_feature (1)..(241): NCBI GI: 154286840 Blast Desc: flap endonuclease [Ajellomyces capsulatus NAm1] gi|150407856|gb|EDN03397.1| flap endonuclease [Ajellomyces capsulatus NAm1]
  misc_feature (1)..(241): NCBI GI: 242813984 Blast Desc: Flap endonuclease Rad27, [Talaromyces stipitatus ATCC 10500] gi|218714618|gb|EED14041.1| Flap endonuclease Rad27, [Talaromyces stipitatus ATCC 10500]
MGIKNLFSIIKDEAPAAVKEGDIKNHFGRKVAIDASMSIYSFLIAVRSDGQQLTNEAGDTTSHLMGMFYRTLRMIDNGIKPLYVFDGAPPKLKSGELAKRFQRKAEANQDLEEAKETGTAEDVEKFSRRTVRVTREHNAECQQLLKLMGVPYIVAPTEAEAQCAVLARAGKVYAAASEDMDTLCFDSPILLRHLTFSEQRKEPIQEIAVDKVLEGLQMDRKQFVDLCILLGCDYLDPIPKV

SEQ ID NO: 556 - DNA, 965 bp, Muscodor strobelii
  misc_feature: SGI EST ID NO. CUFF.1620.0
  misc_feature: Variant of the nucleotide sequence at SEQ ID NO 554
tgaaaaccctcatttctgacagctctaacgcgtgggtgcctgggtttcagttaattgctctccctcatatcgtgacatcaccgcctcgccagcatcccatcttctcggttcgcgccgcccgcagcaatccccttccctcgaccattgcgccgcacatgacacagtcagcacgatgggtatcaagaatctgttctccatcatcaaagatgaggcccctgctgccgtcaaggagggcgacatcaagaatcacttcggtcgcaaggttgctatagtacgtctgacaacggcctccaacacggaggactcacccgagactgagacgctgacctcgtgaacccggcaggatgcctccatgagcatctacagcttcctcatcgcggtgcgatccgacggccagcagctgaccaacgaggccggcgacaccacctcccacctcatgggcatgttctaccgcaccctgcgcatgatcgacaacggcatcaagccgctgtatgtcttcgacggcgccccgcccaagctcaagtcgggcgagctcgccaagcgcttccagcgcaaggccgaggccaaccaggacctcgaggaggccaaggagaccggcaccgccgaagacgtcgagaagttctcccgccgcaccgtccgtgtcacccgcgagcacaatgccgagtgccagcagctgctgaagctcatgggcgtcccctacatcgtcgcccccaccgaggccgaggcccaatgcgccgtcctagcccgggccggcaaggtctacgccgccgccagtgaagacatggacacgctgtgctttgacagccccatcctgctgcgtcatctgactttcagcgagcagaggaaggagcccatccaggagattgctgtcgacaaggtcctcgagggcctgcagatggatcgcaaacaatttgttgacctctgtatactgcttggctgcgattacctcgatcccattcccaagg

SEQ ID NO: 557 - DNA, 1620 bp, Muscodor strobelii
  misc_feature: SGI cDNA ID NO. 559759
  misc_feature: Encodes the peptide sequence at SEQ ID NO 558
atgcccacggacggggtcttggcgcgcatcaacacggcgcaccgagtcgaggactggctcaagtcaattgacgcgacgacgacagaggcatcgacagcggatcagccggtagccaagcgtcgccggtgctgcggtccgcgaacggacgccggcgtcttcacgaatccgtacaacttgcccagctcccctcctctgacggagatgtcaaccgcttcctcgaagcgcaaaagaggtcccaaagcggcgagcgacgcgctggagtcgccgatcaaactccagaccaacgtaccactgggccgacctcgttctcccagacgaccgcgttcgaccagcccgaccaagcccaagtcgaaagatgcccttgagctcctagagaggccggtctttgtcaaagagcttgatggcaacgctgatgagctgcccgaggacgtccaaggcctatacaagcaattgcagaatgcccgccataaagaaaacgtcatcccctgcgaggtgcgtggtcaagtggtagacatggtgggagaggccgaagcccgtccgtactgcttccgcagcgagccgacggctggggcagaggcgttgctctccgctctgtgcagcatcaagatggaggccagggccgcacaacaagacgaatgccacgagacgggctggaaccaccttgtccactcaccgatcctcaagctagtatacccgtcgacaaggctacaaccttcaccgcgatcgacgtcacaaccggcttcgactccgtcaacgtcccctccgcagagacaggtggatgcgcgagtggtgcccgccatgtcatctacgatctggtccgaatacgtcccaacaacggcctcgagggcccccacggcattcgaccctacacagttgcagcagcaacgggtccccgtggcgcttgcgacaggcagtgatacgggcacagcctctcagcagtcaggctctttggcgtacgcagcctcggaagcgaccgagactgagcaaggctctaatcaagtatccagcaaccggggcgacagtaagaaggtcgactatgttcttgtaatggatccaaaagatgagacgccgctacagaaggtcattgcttacttcatccacaatgaagctgtctcgcgagacttgcttccacacgtcaaccataccatgtaccgccctctgaagcagagcccgattgcctgctctattgagacgaaggtcgagttccagccccgtgatcctctattgcagctgggcacatgggttgcttcctggtataagcggatgcgatccttgcgacagtacgtcttcacggagagtcgaccgtggcatccagacctgtggcatccacagcgagatctcgacaggctaccttctactttattgattgaagtggcgaatcacgactggcgcctctttttcacctgtgatcggcgtacttcgatcgacatctacgggcccctaaccatcggctcgactcggtaccttaccgaagcgtttgctctggttgcctctctcgaggcgatcaaggaatggaccgagaccactttctccaacgggatgagcagttggttcatgtgtgacgagttgatgagcacaaaggcacagcaggttgttgcagagtcagaagctatggagtaa

SEQ ID NO: 558 - protein, 539 aa, Muscodor strobelii
  misc_feature: SGI Peptide ID NO. 559759
  misc_feature (105)..(510): NCBI GI: 256719922 Blast Desc: NECHADRAFT_4538 [Nectria haematococca mpVI 77-13-4]
  misc_feature (108)..(515): NCBI GI: 145605890 Blast Desc: [Magnaporthe grisea 70-15] gi|145013650|gb|EDJ98291.1| [Magnaporthe grisea 70-15]
  misc_feature (108)..(516): NCBI GI: 256721214 Blast Desc: NECHADRAFT_82331 [Nectria haematococca mpVI 77-13-4]
  misc_feature (332)..(518): NCBI GI: 149209015 Blast Desc: MGCH7_ch7g3 [Magnaporthe grisea 70-15] gi|86195958|gb|EAQ70596.1| MGCH7_ch7g3 [Magnaporthe grisea 70-15]
  misc_feature (334)..(522): NCBI GI: 116194203 Blast Desc: CHGG_06819 [Chaetomium globosum CBS 148.51] gi|88182732|gb|EAQ90200.1| CHGG_06819 [Chaetomium globosum CBS 148.51]
  misc_feature (379)..(519): NCBI GI: 256722137 Blast Desc: NECHADRAFT_55546 [Nectria haematococca mpVI 77-13-4]
  misc_feature (334)..(510): NCBI GI: 116194328 Blast Desc: CHGG_03762 [Chaetomium globosum CBS 148.51] gi|88179675|gb|EAQ87143.1| CHGG_03762 [Chaetomium globosum CBS 148.51]
  misc_feature (384)..(515): NCBI GI: 39963832 Blast Desc: [Magnaporthe grisea 70-15] gi|145015428|gb|EDJ99964.1| [Magnaporthe grisea 70-15]
  misc_feature (334)..(496): NCBI GI: 116197324 Blast Desc: CHGG_05260 [Chaetomium globosum CBS 148.51] gi|88181173|gb|EAQ88641.1| CHGG_05260 [Chaetomium globosum CBS 148.51]
  misc_feature (332)..(475): NCBI GI: 145604607 Blast Desc: MGG_07826 [Magnaporthe grisea 70-15] gi|145012600|gb|EDJ97254.1| MGG_07826 [Magnaporthe grisea 70-15]
MPTDGVLARINTAHRVEDWLKSIDATTTEASTADQPVAKRRRCCGPRTDAGVFTNPYNLPSSPPLTEMSTASSKRKRGPKAASDALESPIKLQTNVPLGRPRSPRRPRSTSPTKPKSKDALELLERPVFVKELDGNADELPEDVQGLYKQLQNARHKENVIPCEVRGQVVDMVGEAEARPYCFRSEPTAGAEALLSALCSIKMEARAAQQDECHETGWNHLVHSPILKLVYPSTRLQPSPRSTSQPASTPSTSPPQRQVDARVVPAMSSTIWSEYVPTTASRAPTAFDPTQLQQQRVPVALATGSDTGTASQQSGSLAYAASEATETEQGSNQVSSNRGDSKKVDYVLVMDPKDETPLQKVIAYFIHNEAVSRDLLPHVNHTMYRPLKQSPIACSIETKVEFQPRDPLLQLGTWVASWYKRMRSLRQYVFTESRPWHPDLWHPQRDLDRLPSTLLIEVANHDWRLFFTCDRRTSIDIYGPLTIGSTRYLTEAFALVASLEAIKEWTETTFSNGMSSWFMCDELMSTKAQQVVAESEAME

SEQ ID NO: 559 - DNA, 2010 bp, Muscodor strobelii
  misc_feature: SGI EST ID NO. CUFF.1584.0
  misc_feature: Variant of the nucleotide sequence at SEQ ID NO 557
caacaacccccctccaccctatcgcgaccgtagaacatgcccacggacggggtcttggcgcgcatcaacacggcgcaccgagtcgaggactggctcaagtcaattgacgcgacgacgacagaggcatcgacagcggatcagccggtagccaagcgtcgccggtgctgcggtccgcgaacggacgccggcgtcttcacgaatccgtacaacttgcccagctcccctcctctgacggagatgtcaaccgcttcctcgaagcgcaaaagaggtcccaaagcggcgagcgacgcgctggagtcgccgatcaaactccagaccaacgtaccactgggccgacctcgttctcccagacgaccgcgttcgaccagcccgaccaagcccaagtcgaaagatgcccttgagctcctagagaggccggtctttgtcaaagagcttgatggcaacgctgatgagctgcccgaggacgtccaaggcctatacaagcaattgcagaatgcccgccataaagaaaacgtcatcccctgcgaggtgcgtggtcaagtggtagacatggtgggagaggccgaagcccgtccgtactgcttccgcagcgagccgacggctggggcagaggcgttgctctccgctctgtgcagcatcaagatggaggccagggccgcacaacaagacgaatgccacgagacgggctggaaccaccttgtccactcaccgatcctcaagctagtatacccgtcgacaaggctacaaccttcaccgcgatcgacgtcacaaccggcttcgactccgtcaacgtcccctccgcagagacaggtggatgcgcgagtggtgcccgccatgtcatctacgatctggtccgaatacgtcccaacaacggcctcgagggcccccacggcattcgaccctacacagttgcagcagcaacgggtccccgtggcgcttgcgacaggcagtgatacgggcacagcctctcagcagtcaggctctttggcgtacgcagcctcggaagcgaccgagactgagcaaggctctaatcaagtatccagcaaccggggcgacagtaagaaggtcgactatgttcttgtaatggatccaaaagatgagacgccgctacagaaggtcattgcttacttcatccacaatgaagctgtctcgcgagacttgcttccacacgtcaaccataccatgtaccgccctctgaagcagagcccgattgcctgctctattgagacgaaggtcgagttccagccccgtgatcctctattgcagctgggcacatgggttgcttcctggtataagcggatgcgatccttgcgacagtacgtcttcacggagagtcgaccgtggcatccagacctgtggcatccacagcgagatctcgacaggctaccttctactttattgattgaagtggcgaatcacgactggcgcctctttttcacctgtgatcggcgtacttcgatcgacatctacgggcccctaaccatcggctcgactcggtaccttaccgaagcgtttgctctggttgcctctctcgaggcgatcaaggaatggaccgagaccactttctccaacgggatgagcagttggttcatgtgtgacgagttgatgagcacaaaggcacagcaggttgttgcagagtcagaagctatggagtaagtatatagtatctcactgtggcacgacgggcagtatagcatccagtggtagtcatcacttatggacgtctgtcgataggcggcgcttacgcaaacgcaagggggaaggatatacgaatgacgaggtggcattgacgatacggcggaatgcccgcgccattgcccagcaatggaagaaaccgcgcatgtagtgagttactattgcagacggcagtaatcaatacatgtgcagtgtctgtatcttttaacttttgagaagaggctttggaatgatagagtttgtactcatgctcgacgtgaaagtgcttagattgaattgaagtcgcaagatatcgtttatgtaccttcgataatg

SEQ ID NO: 560 - DNA, 675 bp, Muscodor strobelii
  misc_feature: SGI cDNA ID NO. 559760
  misc_feature: Encodes the peptide sequence at SEQ ID NO 561
atgtctgaactcggattttttcacactacattcccaggccagccactgaaggacgattcgaatcgttcgctcgtgctatcacaacataggcatcttgatatggtgcgaggatggttccacgtcatcgcatcccaggcccaagagtgggatccatatcttggttacctcaaacaactcagccaccacatagtcagctgcgacttgcatggcgttcgagaacagaagcaccacgatgtaaacaacattgactataacagtttccatcttcacgacgatttccctggtcaacctctatctggtaaaacccgaagacaactcagccttcagcagttggactacatcaagaacaatgctctaccaaagttgaaacaagacaagtggtccggcgatcctggacgccacgctgttttttgcatagaacagatgttacaccattgtcgaatcatatcgaaagaggttctgggacgactggaacgtgacaccgctagcacgtctggaatcgacgagcggctacacggcgaacccgtccaagattgcaatgactgcgagcagaccgagcggtgctcaacccagtgtcctaagcatcggagcaataggatctacaagaagagaaaggccgagcaattggtagtcccgtcaggagcaggaacaaagagggttcggaaagaagtctag

SEQ ID NO: 561 - protein, 224 aa, Muscodor strobelii
  misc_feature: SGI Peptide ID NO. 559760
MSELGFFHTTFPGQPLKDDSNRSLVLSQHRHLDMVRGWFHVIASQAQEWDPYLGYLKQLSHHIVSCDLHGVREQKHHDVNNIDYNSFHLHDDFPGQPLSGKTRRQLSLQQLDYIKNNALPKLKQDKWSGDPGRHAVFCIEQMLHHCRIISKEVLGRLERDTASTSGIDERLHGEPVQDCNDCEQTERCSTQCPKHRSNRIYKKRKAEQLVVPSGAGTKRVRKEV

SEQ ID NO: 562 - DNA, 226 bp, Muscodor strobelii
  misc_feature: SGI EST ID NO. CUFF.1592.0
  misc_feature: Variant of the nucleotide sequence at SEQ ID NO 560
cactgaaggacgattcgaatcgttcgctcgtgctatcacaacataggcatcttgatatggtgcgaggatggttccacgtcatcgcatcccaggcccaagagtgggatccatatcttggttacctcaaacaactcagccaccacatagtcagctgcgacttgcatggcgttcgagaacagaagcaccacgatgtaaacaacattgactataacagtttccatcttca

SEQ ID NO: 563 - DNA, 519 bp, Muscodor strobelii
  misc_feature: SGI cDNA ID NO. 559761
  misc_feature: Encodes the peptide sequence at SEQ ID NO 564
atgtatttacatcctgaagtgtccatgatcttaagacgcctacttctcctatgcctagccatcattgggttggctattgccggtcttaattcggctgatgcacgattcgcgatcattctgcgtgaccgagcaagatccgaactcgtcgattcgcctaatacaatattagacaagacctttgctttgctcatgcagaaactccttgtcgataatgtggtcgcagcccttgcttccgctgccttcgccattttcgagaccgtaatagcagttcacccaagatggttaagagagaacgacggaaactggaaggcattcgtggttcaagctgtcctggcattagccgtactcgttacaggaggataccttgccgatcatattcatggcttccgctcctcgtttgacaagtttggccgtgacgacaaccttccatattttacgatcatgtactatggaagtgtagggcaggcagcttacggagccctgacaatcattttatcactatctatattcgtgatgtga

SEQ ID NO: 564 - protein, 172 aa, Muscodor strobelii
  misc_feature: SGI Peptide ID NO. 559761
MYLHPEVSMILRRLLLLCLAIIGLAIAGLNSADARFAIILRDRARSELVDSPNTILDKTFALLMQKLLVDNVVAALASAAFAIFETVIAVHPRWLRENDGNWKAFVVQAVLALAVLVTGGYLADHIHGFRSSFDKFGRDDNLPYFTIMYYGSVGQAAYGALTIILSLSIFVM

SEQ ID NO: 565 - DNA, 831 bp, Muscodor strobelii
  misc_feature: SGI cDNA ID NO. 559762
  misc_feature: Encodes the peptide sequence at SEQ ID NO 566
atgtccggagcgtcgaaacctttgcggacgcttaacaaagctcgatggacaccactccaggactatgccattgtccatatcggcaatcagatcaaatgcgaaaaagacataacacaagaaagaatggattggttcatccactctttatggctaggaggcttttctccagcatcgacgaacccttatgatttgccatctgcctcaactatcggtaatgctctcaaacctcagactagccccgagattcgcaaggctttcgttcagcgagtcctaggagtcactaaaataaacgactcggtcttggactggctacacgtggctatattcggcaccggaaaaatagcatccccttcattcaacaacggaggttcatttggtgcatttagtagtgacgaggatgactccgatacgggggacgatgaaacgcttgaaaataagactactggcgatgagagcccttctccatatggcgaatattgcccgacgccacgcatttgcggtccagcagacagcgaaccagccgaccccgagaaggaaaatgaaggatcataccaaccagctgcgagctttgacacatggaattcacgaagtacaacgccgagtaacaagacatcggatattgctgcagcttcaacaacaggaaatacgagccgagatctggaggtagctcactctctttcacaagttttgcaaggcgaagcgccggccgcggccgaacctgcctctgagatagagagtgatatgtctgaggacagcatgcctagcaaactccttacatcagtcgcaaagagaagctggtcgcatagcgacagcagcgacgacgacgagtaa

SEQ ID NO: 566 - protein, 276 aa, Muscodor strobelii
  misc_feature: SGI Peptide ID NO. 559762
MSGASKPLRTLNKARWTPLQDYAIVHIGNQIKCEKDITQERMDWFIHSLWLGGFSPASTNPYDLPSASTIGNALKPQTSPEIRKAFVQRVLGVTKINDSVLDWLHVAIFGTGKIASPSFNNGGSFGAFSSDEDDSDTGDDETLENKTTGDESPSPYGEYCPTPRICGPADSEPADPEKENEGSYQPAASFDTWNSRSTTPSNKTSDIAAASTTGNTSRDLEVAHSLSQVLQGEAPAAAEPASEIESDMSEDSMPSKLLTSVAKRSWSHSDSSDDDE

SEQ ID NO: 567 - DNA, 1005 bp, Muscodor strobelii
  misc_feature: SGI EST ID NO. CUFF.1598.0
  misc_feature: Variant of the nucleotide sequence at SEQ ID NO 565
gaaaagtgtataaatatccgccgccatcaccctgttcctcagtttacttacactttgcttgcctcactctctctcctttttattagatctcaacttttcgaataaatcataattttacgtttcatcaaagctccagtcgtcactatcatctttcctaacatgtccggagcgtcgaaacctttgcggacgcttaacaaagctcgatggacaccactccaggactatgccattgtccatatcggcaatcagatcaaatgcgaaaaagacataacacaagaaagaatggattggttcatccactctttatggctaggaggcttttctccagcatcgacgaacccttatgatttgccatctgcctcaactatcggtaatgctctcaaacctcagactagccccgagattcgcaaggctttcgttcagcgagtcctaggagtcactaaaataaacgactcggtcttggactggctacacgtggctatattcggcaccggaaaaatagcatccccttcattcaacaacggaggttcatttggtgcatttagtagtgacgaggatgactccgatacgggggacgatgaaacgcttgaaaataagactactggcgatgagagcccttctccatatggcgaatattgcccgacgccacgcatttgcggtccagcagacagcgaaccagccgaccccgagaaggaaaatgaaggatcataccaaccagctgcgagctttgacacatggaattcacgaagtacaacgccgagtaacaagacatcggatattgctgcagcttcaacaacaggaaatacgagccgagatctggaggtagctcactctctttcacaagttttgcaaggcgaagcgccggccgcggccgaacctgcctctgagatagagagtgatatgtctgaggacagcatgcctagcaaactccttacatcagtcgcaaagagaagctggtcgcatagcgacagcagcgacgacgacgagtaagtttacgataatgtg

SEQ ID NO: 568 - DNA, 453 bp, Muscodor strobelii
  misc_feature: SGI cDNA ID NO. 559763
  misc_feature: Elevated expression when VOC is produced
  misc_feature: Encodes the peptide sequence at SEQ ID NO 569
aagagtacgggttccaaacaggcgcaggcggcagtcaaacacatgatgatttcggaggatctcgttcctttcagagaatcagaagaagatactaaggaattcatcgagaaaatgcaagctgggattccacttaccgttcctgccgagggcatgctgcggctaccttatgtctctctcagatttatagatcaagacggtgttcctgataagaatatgcctgaacgggttattcaaagattcctggtgcataaccagcgagatcttttaaatatatggcgcctatacgagcacgatatactgtccgacaatccaccaataggctttgttctattcagtacgggtgtgggcgtctctaaggaagtattgtatacttatcaccagcttcttgatgagttcgcgacggtacgacagcagctcaaggacgtgaaatcggcattgcttaaagaaacgtag

SEQ ID NO: 569 - protein, 150 aa, Muscodor strobelii
  misc_feature: SGI Peptide ID NO. 559763
  misc_feature: Useful for introducing or modulating the production of volatile compounds
KSTGSKQAQAAVKHMMISEDLVPFRESEEDTKEFIEKMQAGIPLTVPAEGMLRLPYVSLRFIDQDGVPDKNMPERVIQRFLVHNQRDLLNIWRLYEHDILSDNPPIGFVLFSTGVGVSKEVLYTYHQLLDEFATVRQQLKDVKSALLKET

SEQ ID NO: 570 - DNA, 747 bp, Muscodor strobelii
  misc_feature: SGI EST ID NO. CUFF.1604.0
  misc_feature: Variant of the nucleotide sequence at SEQ ID NO 568
taatcattattttgatcaagtttggatttagtctcgtgctcattagaaagagtacgggttccaaacaggcgcaggcggcagtcaaacacatgatgatttcggaggatctcgttcctttcagagaatcagaagaagatactaaggaattcatcgagaaaatgcaagctgggattccacttaccgttcctgccgagggcatgctgcggctaccttatgtctctctcagatttatagatcaagacggtgttcctgataagaatatgcctgaacgggttattcaaagattcctggtgcataaccagcgagatcttttaaatatatggcgcctatacgagcacgatatactgtccgacaatccaccaataggctttgttctattcagtacgggtgtgggcgtctctaaggaagtattgtatacttatcaccagcttcttgatgagttcgcgacggtacgacagcagctcaaggacgtgaaatcggcattgcttaaagaaacgtagtgatgtccgtggagtttataccgtagttgttggtacagccatgggctgtggctgaatgaggcaacaatgggggatgaggtggttgctgtgtcatttgcgtacaggcattgaatggccatcggctagagtacatgtgccctacccacagatgggtgtacgcctagtgttttccatgtacctcagccatccttgattctagacttgtacacatccatcatcaatatacagaatacacccataaccccgt

SEQ ID NO: 571 - DNA, 2442 bp, Muscodor strobelii
  misc_feature: SGI cDNA ID NO. 559764
  misc_feature: Elevated expression when VOC is produced
  misc_feature: Encodes the peptide sequence at SEQ ID NO 572
atgaacggtcggtggattctcatactagacaatgctgacaatgccgagactttcttccccaagccaaaatcggaggcgtcaacaccactcggaagttttctgccacagagccagaatggttcgatcctcgttacttcacgaagcaaatatgccgcattacgaattgtaggcgatctcaggaatgtaatggaagtgcatgcgatgagcgaaagccaagcacaccagctgctccgaaataaactgcacactgctccgggcgaagatggaatgatcgagctagtaaacgctcttgatcacataccgctggctatcacgcaggccgctgcctatatcaaccggcgatcccgtatgacagttcccggctacctcgatgagttccgtagaagtacgtcccggaagacaagtctcctggaccgggacatgggagaccttcgtcgagatgggagtatctccaactctataaagactacgtggcgcttatcattcagaggcatatacgatcagcgatcatctgctgccgatctattatctctcatgagcttcttccatccccaaggaattccgaagtgggtgcttcgacaatacagcaaagcacaaagaccgacagaggacgatagtgccgatgacgagttagaggatgatctcgaatcgttagacggattctcctttgtcacaagaaccatcgacggtgatacatacgaagtgcacgctcttgtacagttttgcacaagagcgtggctatccgcgcttggccaagagaagaaatggaaacaacgctatctctatttgatgtccatggctttccccccaggagattttcgcaatcgtactacatgccagcagttaatgcctcatcttgagcatatacacaatcaggaacgcgacgacgaggaagacgcaaaacaatgggctaatctgataaccaatgtagcgtggtacatgtggcacgaaggcaactacaataccgcggaggctgcggctgcaaaagcattcgccgcaagaaaaagaatcttgggagacgacgacatgtctacgttgagcacaatggtagtattagcgtcggtcctccgaggcggcgggaaatacgtagaggcggaaaagatccatcgacaggcactcggtggctatgaaaaggccttgggccaacgacatcccgatacgctaacgagcatgagcaattttgcgttggttctacgagatcaagggaaatacgacgaggcagagaagatgcaccggcaagttctcaagggaagagaaacagagctgggcacacaacatcccgatactttggcaagcatgggcaacttggcattggtataccgggaccaggggaagtatccccaggcggaaacattgaatcgtcgcgcactacaaggcagagagaagctgctagggaagaagcatctgagtacactaacaagcgcgagcaatctggcattggtgctttacgagcgaggtaaatacgacgaatcagaggaattaaatcgacaaacattaaaagaacgggaggaagtgctggggaaacaacatcaccatacactggttagtctaggcaatctagcgatggtgctccaagaccgtggaaaatatgatgaatcagagacgatgaacaggcatctactaggcatttatgagcaggagctagggatgcagcaccctaatgttcttacgagcgcaagcaacctggcgtcagtgcttcaggaccaagggaaacttgaagaggcagaagtgctgaatcgtcgatcgctggagggtagaaaaagagtgttaggaaggaagcaccctgattcactcacgagcttgagcaaccttgcatatacattacgatgccaagagaaattcagcgagtcagaggcacttaatcgacaagctctggagggaagagaggagcaactgggatcacaccatctagatacactgactagcatgaataatctcgcactggtgctgcgggatcaacagaaatataaagaagcggaaagactgacccgtcgggcggtacaggagtatcgtaccagactaggcgcgcaacatccttacacattgacaagccttaataatctagcttccatattgcaagaccaggagaagtacaacgaggcagagatggtcaatcggagagtgctcgaagggtatgaaagggagtttggaacgcaacatcccgatacactcaaaagcttgagcagtctcgctacaatagtacatcgtcgagagaggtacgaagcggccgagaggctatatcgtcgcactttggagggaagagagcaacagctagggctacatcatgttgatacagtgaaaagcgtgagcgatttggcttctgtacttcgtgaccaaggtaagtatgacgaagcggagagattgaaccaccatatacagaccgcgagagaggaaaatgagaagcaagacggttgtgaaccgcaaacatgtcctagcggttag

SEQ ID NO: 572 - protein, 813 aa, Muscodor strobelii
  misc_feature: SGI Peptide ID NO. 559764
  misc_feature (2)..(797): NCBI GI: 255934897 Blast Desc: Pc13g00220 [Penicillium chrysogenum Wisconsin 54-1255] gi|211583095|emb|CAP91091.1| Pc13g00220 [Penicillium chrysogenum Wisconsin 54-1255]
  misc_feature (3)..(793): NCBI GI: 212541564 Blast Desc: TPR domain protein [Penicillium marneffei ATCC 18224] gi|210068236|gb|EEA22328.1| TPR domain protein [Penicillium marneffei ATCC 18224]
  misc_feature (2)..(805): NCBI GI: 255934967 Blast Desc: Pc13g00620 [Penicillium chrysogenum Wisconsin 54-1255] gi|211583130|emb|CAP91131.1| Pc13g00620 [Penicillium chrysogenum Wisconsin 54-1255]
  misc_feature (2)..(785): NCBI GI: 115443450 Blast Desc: [Aspergillus terreus NIH2624] gi|114188401|gb|EAU30101.1| [Aspergillus terreus NIH2624]
  misc_feature (3)..(798): NCBI GI: 171693841 Blast Desc: protein product [Podospora anserina] gi|170946869|emb|CAP73673.1| protein product [Podospora anserina]
  misc_feature (2)..(789): NCBI GI: 115443454 Blast Desc: [Aspergillus terreus NIH2624] gi|114188403|gb|EAU30103.1| [Aspergillus terreus NIH2624]
  misc_feature (2)..(797): NCBI GI: 242795697 Blast Desc: kinesin, [Talaromyces stipitatus ATCC 10500] gi|218719233|gb|EED18653.1| kinesin, [Talaromyces stipitatus ATCC 10500]
  misc_feature (2)..(785): NCBI GI: 242761252 Blast Desc: TPR domain protein [Talaromyces stipitatus ATCC 10500] gi|218723340|gb|EED22757.1| TPR domain protein [Talaromyces stipitatus ATCC 10500]
  misc_feature (2)..(728): NCBI GI: 255934965 Blast Desc: Pc13g00600 [Penicillium chrysogenum Wisconsin 54-1255] gi|211583129|emb|CAP91129.1| Pc13g00600 [Penicillium chrysogenum Wisconsin 54-1255]
  misc_feature (4)..(797): NCBI GI: 116200362 Blast Desc: CHGG_10726 [Chaetomium globosum CBS 148.51] gi|88175440|gb|EAQ82908.1| CHGG_10726 [Chaetomium globosum CBS 148.51]
  misc_feature: Useful for introducing or modulating the production of volatile compounds
MNGRWILILDNADNAETFFPKPKSEASTPLGSFLPQSQNGSILVTSRSKYAALRIVGDLRNVMEVHAMSESQAHQLLRNKLHTAPGEDGMIELVNALDHIPLAITQAAAYINRRSRMTVPGYLDEFRRSTSRKTSLLDRDMGDLRRDGSISNSIKTTWRLSFRGIYDQRSSAADLLSLMSFFHPQGIPKWVLRQYSKAQRPTEDDSADDELEDDLESLDGFSFVTRTIDGDTYEVHALVQFCTRAWLSALGQEKKWKQRYLYLMSMAFPPGDFRNRTTCQQLMPHLEHIHNQERDDEEDAKQWANLITNVAWYMWHEGNYNTAEAAAAKAFAARKRILGDDDMSTLSTMVVLASVLRGGGKYVEAEKIHRQALGGYEKALGQRHPDTLTSMSNFALVLRDQGKYDEAEKMHRQVLKGRETELGTQHPDTLASMGNLALVYRDQGKYPQAETLNRRALQGREKLLGKKHLSTLTSASNLALVLYERGKYDESEELNRQTLKEREEVLGKQHHHTLVSLGNLAMVLQDRGKYDESETMNRHLLGIYEQELGMQHPNVLTSASNLASVLQDQGKLEEAEVLNRRSLEGRKRVLGRKHPDSLTSLSNLAYTLRCQEKFSESEALNRQALEGREEQLGSHHLDTLTSMNNLALVLRDQQKYKEAERLTRRAVQEYRTRLGAQHPYTLTSLNNLASILQDQEKYNEAEMVNRRVLEGYEREFGTQHPDTLKSLSSLATIVHRRERYEAAERLYRRTLEGREQQLGLHHVDTVKSVSDLASVLRDQGKYDEAERLNHHIQTAREENEKQDGCEPQTCPSG

SEQ ID NO: 573 - DNA, 5533 bp, Muscodor strobelii
  misc_feature: SGI EST ID NO. CUFF.1658.1
  misc_feature: Variant of the nucleotide sequence at SEQ ID NO 571
ctgacagtcaaagaaaatcgcaggcagttatcgagtatgcctaccgagtgcgcgatgaccggccggagacatgggtattctgggtacacgcgagcacgaccctccgtgtcgaagaagcgtacagggggattgctgatagactgcatctgccagggcggcacaatccaaacgtcaatatctgtcaactcgtcagccattggctacgcgacgaaatgaacggtcggtggattctcatactagacaatgctgacaatgccgagactttcttccccaagccaaaatcggaggcgtcaacaccactcggaagttttctgccacagagccagaatggttcgatcctcgttacttcacgaagcaaatatgccgcattacgaattgtaggcgatctcaggaatgtaatggaagtgcatgcgatgagcgaaagccaagcacaccagctgctccgaaataaactgcacactgctccgggcgaagatggaatgatcgagctagtaaacgctcttgatcacataccgctggctatcacgcaggccgctgcctatatcaaccggcgatcccgtatgacagttcccggctacctcgatgagttccgtagaagtacgtcccggaagacaagtctcctggaccgggacatgggagaccttcgtcgagatgggagtatctccaactctataaagactacgtggcgcttatcattcagaggcatatacgatcagcgatcatctgctgccgatctattatctctcatgagcttcttccatccccaaggaattccgaagtgggtgcttcgacaatacagcaaagcacaaagaccgacagaggacgatagtgccgatgacgagttagaggatgatctcgaatcgttagacggattctcctttgtcacaagaaccatcgacggtgatacatacgaagtgcacgctcttgtacagttttgcacaagagcgtggctatccgcgcttggccaagagaagaaatggaaacaacgctatctctatttgatgtccatggctttccccccaggagattttcgcaatcgtactacatgccagcagttaatgcctcatcttgagcatatacacaatcaggaacgcgacgacgaggaagacgcaaaacaatgggctaatctgataaccaatgtagcgtggtacatgtggcacgaaggcaactacaataccgcggaggctgcggctgcaaaagcattcgccgcaagaaaaagaatcttgggagacgacgacatgtctacgttgagcacaatggtagtattagcgtcggtcctccgaggcggcgggaaatacgtagaggcggaaaagatccatcgacaggcactcggtggctatgaaaaggccttgggccaacgacatcccgatacgctaacgagcatgagcaattttgcgttggttctacgagatcaagggaaatacgacgaggcagagaagatgcaccggcaagttctcaagggaagagaaacagagctgggcacacaacatcccgatactttggcaagcatgggcaacttggcattggtataccgggaccaggggaagtatccccaggcggaaacattgaatcgtcgcgcactacaaggcagagagaagctgctagggaagaagcatctgagtacactaacaagcgcgagcaatctggcattggtgctttacgagcgaggtaaatacgacgaatcagaggaattaaatcgacaaacattaaaagaacgggaggaagtgctggggaaacaacatcaccatacactggttagtctaggcaatctagcgatggtgctccaagaccgtggaaaatatgatgaatcagagacgatgaacaggcatctactaggcatttatgagcaggagctagggatgcagcaccctaatgttcttacgagcgcaagcaacctggcgtcagtgcttcaggaccaagggaaacttgaagaggcagaagtgctgaatcgtcgatcgctggagggtagaaaaagagtgttaggaaggaagcaccctgattcactcacgagcttgagcaaccttgcatatacattacgatgccaagagaaattcagcgagtcagaggcacttaatcgacaagctctggagggaagagaggagcaactgggatcacaccatctagatacactgactagcatgaataatctcgcactggtgctgcgggatcaacagaaatataaagaagcggaaagactgacccgtcgggcggtacaggagtatcgtaccagactaggcgcgcaacatccttacacattgacaagccttaataatctagcttccatattgcaagaccaggagaagtacaacgaggcagagatggtcaatcggagagtgctcgaagggtatgaaagggagtttggaacgcaacatcccgatacactcaaaagcttgagcagtctcgctacaatagtacatcgtcgagagaggtacgaagcggccgagaggctatatcgtcgcactttggagggaagagagcaacagctagggctacatcatgttgatacagtgaaaagcgtgagcgatttggcttctgtacttcgtgaccaaggtaagtatgacgaagcggagagattgaaccaccatatacagaccgcgagagaggaaaatgagaagcaagacggttgtgaaccgcaaacatgtcctagcggttagttacgtgaggaacgtggtgccgtaattagagcgttaacactactagccgagacagcctagacagacaggctgaggtgcgcctcggaagacctaagatggagcctgtccgtaatagcctggagtttagaacctagtcaacgcactaagcgtggcttcatctttgtcggtgacgtcccctcagcaaaattgcctactactgtaaatagttacaacgtgatgccagtctaatatatacatgtccattctcctaacatcagtctcccttactcatcccgctgcaagcagtctatacacaaaagcggacctacgggatccagtacgagcttgtcacgccttgcgcttcagtcatcccgcttatcagtgtaccattcctcgtccctcctgccttaatcactccgtcatgtagtgcccgaagcgcccgatgaagtcctcggcacatcgccacgcccgtcatcccctcgtcacgcagcgtctcgtgtagtactctcgctacgtcaacacagtgcttgtcggacactttccacattgcaccgacaacgtgccgaaaccccgcgagctggaaggtattgataaagttgattcactcgtcggcaagttttctgccttgttggctgccgtcgagcatgccgacagaaacccaagaaatgacggattctcttgaagtctgtggtcacgaaggtttgccaccgtcagcgattcagtcttccaatcctccaagagcaggcaaccccgcaaaggctctattagatccgaatatccatggccagcaaagtggaatgtcctgcacgtttgcaattccgagaagtaaatcgtccttgcgcagagacggcgtgactggccatagctggagctacggacaaagaccctttaccatctctacctcgtctgtagtaaataggaggctactattcccggaaaggtttggcatttcccgcatagcaattaacagtgcatggttagagactagtccggcgcgccctcgaagatggagttggcgcccatgtatcaattctttcaccgttgaggcgtacgacgacgtagccctgtcgagcacagtctccgagcaccctttggtataatcctgtagcatggaaatagctggcttatgagtcccgtgggaatccaccacacacgaggccacttatcatcggaaacaggctttgtcgacccgagtgcgtggaagaccggacgagctaaaacatcccagagccactcgagcagtgacgtttgtgaccctttggttcgttctgctatgtgttctcaccgtcagatcgggtagtcttaaagccctaatttgattatgctcgattaagaacgcatcgcaacggatgatagggtctggacttgctgcggccttcagatcgtcggaagttggcaggatattaaagttctcaaacccaggctgggcacggatccgcgatcagagctcgtccagttcctgtaccgcttcacgacgtcgcctcgatagcgattctcaagacggctcttggtcaataggactcgaaatagtcatgtccatttctggtaagtccagctcatcccaaagagagatgaagcctcttgctcagctaaagtaccgttacgtaagatctgaaatatctccgcgcgtttcgatcagcaaagttttaataatcccgcgaccaagctcgagaaatcgtaaagcatgcttggcatctttccccgcactaaaggcagtagcggccgcagatgaagctaagccagcgaagtctgcaagcattatgctgcttgtcggcatgcctcaaccatcgtgggctgatatcggggagggtctggactgcctgctgcagcagatgacttgagccttcccagtcgcgcagtgagcctcgaatttgagcagtctgctgagccagacgaatacgaacggaagtggaggctgtacgaaaacgccggccttcttcgcacgagggcagcctgcggtgcaggtcggattctgtccgctcaaatcgcgtgccgagccagtttttaaggttgcttaaccggccagctcgatcaggatggtctttaggcgtggctacgagccatccctccgtatgtctaatgggttgatcaggacattccatagatcccgcctccatgaatgttagtaaccggatataaatatataactcgatctgttagtcgcttgctggatccacttgcattgaatctcttattgcacccctatgcaatccacctaacgcattcagtgtagctatcacggtagcaaggagccttcttctgacagttccttgaagaatcgtagaccgcaccagtcttggcgtgtagttcacgtctcgttcaaggaggggtagaaaaccaatactcctgcccggcgtggatcggaaataatcggttgtttgtcaggggttgggtcggacggtggtcccagagattctcgctgacaagtggaaaaatctttcaaatgatatcgtagcctgcatggcatgggctcgaatttgagatgaatgcttggtgactcctccgtgagtgtgctcatcgcgggcttaggggaaacaacatgaggctgcgctagggcagcattatatgcaattaagaccaatggggagtgtttggcttgcatctgacctgcgtcccgtagcttcattgataccaaggcagactttcgaattgaatggatctgtgcatgataagtcgggtggcagtctagtcagcaaccatgggaagtgagccaggatatttgaaaacacaggtgtgatgtgtgcgtgcaggtgctcgggattacggagtgagaagcggctgccgataggtcgtggtcaaaaccccctactatggtagtgtttggtacccagcgagccggatatagccagttggttgtaggaaatcgtctgctgctaggggtcagattgtttaccctcgcg

SEQ ID NO: 574 - DNA, 1275 bp, Muscodor strobelii
  misc_feature: SGI cDNA ID NO. 559765
  misc_feature: Elevated expression when VOC is produced
  misc_feature: Encodes the peptide sequence at SEQ ID NO 575
atggctgcgcgcgacgaggtggcctctgaaatcgactcgaccttcttcctccaacgtgtcgaatgccccggcattactccagttgatcccgtcaattggtatttggtcaagtgccatgctatcgagacaggaaagtcatcaggcgccgtctcgtctatagtcggtgcgatcgtggccttatacaggggcttgttgtactgtctacctctagctgaatcattgagatgctaccattcggccagagctgcagttgctcaggatcttctgagggatcatgggcatgatttcaatgttgtcttgcttaccgttttgctcttgtctgtttttgaattcgtctacccagaagagctcacgccatacctgaaagacccaggtgaattgttcaaggagcacttggagggctgggtgcggtatgctgctggtcactctccttgctcaataaggtcaatcatttggctgagactccttgatgccatcgctatgcgtggtggtagaaccggaattttggcagagagtgtccgcatcgtcctgcttcaatgcgaagatcttaccattgatgtcgacttgccagtgacctatacactggagccgtcagatcacttctacagaacgatcatcactccaacatttgccttctatttctgtctccagatgatatctcgggacattgcaatgttgacacactatcaccgcccgcgcaccctgggatctgatcaagagcatgtcgcccagtctctagcggacttcaaagttaagttgcgctcgctgtggaagagtcgctgtgcaactcaacgcctgtcgcccggggaactgtgctctcaacttgctcccaaggtagcagatctgattatcaacttgattgacatctgcggagcagcatattacactgaagtggtcgagatggaccgcgttcttggtgatcctcttcataagtggatggactctagacccgcactacaggctattcgcaagatcatcgatgattcttcaacgcgcatttgcagtgcagacgagggcggttgccgacaccatgacataagcgtcaacccgggattccttcgcccgctctttctgatagctatcgaatgctgggatcaggagcaaatactgtgggcaacagagaagatgaggcaaatcagaaacccgatttaccggtctgaattttttgctgcgtttggaaaggcgctatccgatgcgcaatttcaaaagggtaggagggtaacgtccaagtatttctgtatcttgcacttcagagttcctccaccgtatctctaa

SEQ ID NO: 575 - protein, 424 aa, Muscodor strobelii
  misc_feature: SGI Peptide ID NO. 559765
  misc_feature (94)..(417): NCBI GI: 255946586 Blast Desc: Pc22g00120 [Penicillium chrysogenum Wisconsin 54-1255] gi|211591077|emb|CAP97300.1| Pc22g00120 [Penicillium chrysogenum Wisconsin 54-1255]
  misc_feature (13)..(407): NCBI GI: 242793322 Blast Desc: C6 finger domain protein, [Talaromyces stipitatus ATCC 10500] gi|218718726|gb|EED18146.1| C6 finger domain protein, [Talaromyces stipitatus ATCC 10500]
  misc_feature (128)..(304): NCBI GI: 67541352 Blast Desc: AN6846.2 [Aspergillus nidulans FGSC A4] gi|40739055|gb|EAA58245.1| AN6846.2 [Aspergillus nidulans FGSC A4] gi|259480443|tpe|CBF71580.1| TPA: Zn(II)2Cys6 transcription
  misc_feature (13)..(407): NCBI GI: 212535504 Blast Desc: C6 finger domain protein, [Penicillium marneffei ATCC 18224] gi|210070307|gb|EEA24397.1| C6 finger domain protein, [Penicillium marneffei ATCC 18224]
  misc_feature (100)..(379): NCBI GI: 238499967 Blast Desc: C6 finger domain protein, [Aspergillus flavus NRRL3357] gi|220692971|gb|EED49317.1| C6 finger domain protein, [Aspergillus flavus NRRL3357]
  misc_feature (14)..(280): NCBI GI: 115387309 Blast Desc: conserved [Aspergillus terreus NIH2624] gi|114195244|gb|EAU36944.1| conserved [Aspergillus terreus NIH2624]
  misc_feature (148)..(419): NCBI GI: 189205415 Blast Desc: conserved [Pyrenophora tritici-repentis Pt-1C-BFP] gi|187975135|gb|EDU41761.1| conserved [Pyrenophora tritici-repentis Pt-1C-BFP]
  misc_feature: Useful for introducing or modulating the production of volatile compounds
MAARDEVASEIDSTFFLQRVECPGITPVDPVNWYLVKCHAIETGKSSGAVSSIVGAIVALYRGLLYCLPLAESLRCYHSARAAVAQDLLRDHGHDFNVVLLTVLLLSVFEFVYPEELTPYLKDPGELFKEHLEGWVRYAAGHSPCSIRSIIWLRLLDAIAMRGGRTGILAESVRIVLLQCEDLTIDVDLPVTYTLEPSDHFYRTIITPTFAFYFCLQMISRDIAMLTHYHRPRTLGSDQEHVAQSLADFKVKLRSLWKSRCATQRLSPGELCSQLAPKVADLIINLIDICGAAYYTEVVEMDRVLGDPLHKWMDSRPALQAIRKIIDDSSTRICSADEGGCRHHDISVNPGFLRPLFLIAIECWDQEQILWATEKMRQIRNPIYRSEFFAAFGKALSDAQFQKGRRVTSKYFCILHFRVPPPYL

SEQ ID NO: 576 - DNA, 804 bp, Muscodor strobelii
  misc_feature: SGI cDNA ID NO. 559766
  misc_feature: Elevated expression when VOC is produced
  misc_feature: Encodes the peptide sequence at SEQ ID NO 577
atggcagctacccctaaacgacctgcctaccctacatgcgtaccatccaagttcgctccagacggaactgtgatgcgttttccgggcaacaccttgctatgtcacatacctccagattcgcccctccaagctgtgctgcgttcgatatacgatgccattaactgccacccacaactttccaaggtgtaccgcctgctcccttcggagtcgtggcacatgacgatactcgacgggtaccggaagaaagagtgcgaaggaggcatgtggccaaaaggcctgaacaagagacctctgaatgagatgacagagattctcaaagcaagcctgaggaaagctggtcttgagctagagaaagagggcttggggccaccttaccgggttcggtttgaggggttcgacaataaacctgtcggcctcgcattggccataaagggagccacggaagatgaggaaaggcgtttggggcgcctgcgagatgtgctagccggtgtcttaggatacagagcgccgaatcatgacatatatggcttccatgtcagcgttgcatacctgctccgccaccttgacgaggaaaatcttgaagacgagttggaggatctgctcgagaaggaaactgagaccggtagaggtacggaattctcactaggggctgttgagttttgttcgtatgaggacatgttctcatttcctagattgttctacctgggcgaggtattgtcaacaaagcggacatgcttgcttcagaaagaagattttgctcatcaacttgagttcgctcctaagaaagacatggaaaaaaaatga

SEQ ID NO: 577 - protein, 267 aa, Muscodor strobelii
  misc_feature: SGI Peptide ID NO. 559766
  misc_feature (17)..(141): Pfam Id: PF08975 Pfam Desc: Domain of function (DUF1868)
  misc_feature (17)..(93): Pfam Id: PF08975 Pfam Desc: Domain of function (DUF1868)
  misc_feature (11)..(241): NCBI GI: 271499081 Blast Desc: Domain of function DUF1868 [Dickeya dadantii Ech586] gi|270342636|gb|ACZ75401.1| Domain of function DUF1868 [Dickeya dadantii Ech586]
  misc_feature (11)..(241): NCBI GI: 251791139 Blast Desc: Domain of function DUF1868 [Dickeya zeae Ech1591] gi|247539760|gb|ACT08381.1| Domain of function DUF1868 [Dickeya zeae Ech1591]
  misc_feature (10)..(229): NCBI GI: 149188560 Blast Desc: VSAK1_21234 [Vibrio shilonii AK1] gi|148837778|gb|EDL54722.1| VSAK1_21234 [Vibrio shilonii AK1]
  misc_feature (1)..(236): NCBI GI: 16126034 Blast Desc: CC_1790 [Caulobacter crescentus CB15] gi|221234805|ref|YP_002517241.1| CCNA_01868 [Caulobacter crescentus NA1000] gi|13423220|gb|AAK23766.1| CC_1790 crescentus
  misc_feature (17)..(239): NCBI GI: 242240853 Blast Desc: Domain of function DUF1868 [Dickeya dadantii Ech703] gi|242132910|gb|ACS87212.1| Domain of function DUF1868 [Dickeya dadantii Ech703]
  misc_feature (17)..(229): NCBI GI: 126726213 Blast Desc: RB2150_08393 [Rhodobacterales bacterium HTCC2150] gi|126705417|gb|EBA04508.1| RB2150_08393 [Rhodobacterales bacterium HTCC2150]
  misc_feature (10)..(236): NCBI GI: 260776849 Blast Desc: VIC_002239 [Vibrio coralliilyticus ATCC BAA-450] gi|260606515|gb|EEX32789.1| VIC_002239 [Vibrio coralliilyticus ATCC BAA-450]
  misc_feature (8)..(229): NCBI GI: 209551398 Blast Desc: Domain of function DUF1868 [Rhizobium leguminosarum bv. trifolii WSM2304] gi|209537154|gb|ACI57089.1| Domain of function DUF1868 [Rhizobium leguminosarum bv. trifolii WSM2304]
  misc_feature (8)..(233): NCBI GI: 218463156 Blast Desc: RetlK5_28620 [Rhizobium etli Kim 5]
  misc_feature (17)..(237): NCBI GI: 259416391 Blast Desc: conserved [Silicibacter sp. TrichCH4B] gi|259347830|gb|EEW59607.1| conserved [Silicibacter sp. TrichCH4B]
  misc_feature: Useful for introducing or modulating the production of volatile compounds
MAATPKRPAYPTCVPSKFAPDGTVMRFPGNTLLCHIPPDSPLQAVLRSIYDAINCHPQLSKVYRLLPSESWHMTILDGYRKKECEGGMWPKGLNKRPLNEMTEILKASLRKAGLELEKEGLGPPYRVRFEGFDNKPVGLALAIKGATEDEERRLGRLRDVLAGVLGYRAPNHDIYGFHVSVAYLLRHLDEENLEDELEDLLEKETETGRGTEFSLGAVEFCSYEDMFSFPRLFYLGEVLSTKRTCLLQKEDFAHQLEFAPKKDMEKK

SEQ ID NO: 578 - DNA, 1029 bp, Muscodor strobelii
  misc_feature: SGI cDNA ID NO. 559767
  misc_feature: Elevated expression when VOC is produced
  misc_feature: Encodes the peptide sequence at SEQ ID NO 579
atgttgttcaagactctcgtgcccgctcttgcggtgcagctcactgcagctcaggagctcatgcgcttcggatgctcacagctcacgattgatcaaaccgaccccttggtccagccaggcgcggtcccatcaacgcatatgcatcaagtcgttggcggcaactccttcaatgccagcatggtaccagcaagccatgacccacccacggtttcgacttgcaccagttgcacgtacagcgaagacttcagcaactattggacggcaaacctttactacaaggcccggaacggaacgtacaagcgcgttccgcagtttaccaatcttggacttggagtccaagctggcgtgactgtctactatatcaggggataccagtccagcgccaaagtcaccgctttcaagcctggcttccgcatgcttgttggcgacccaacaaatcgcgcggcgtctaccatgcagaagcagctctgctaccgctgcgaggccaacatgcagcagaaccccttcggcggcgcgccgtgcacaggttctgacacgcaggcgttccccaagggtgtctgcggtggcggttggcgtgtctccgtccatttccccagctgctgggacggtgtgaacttggactcacctgatcacaagagtcacgtcgcatacccagcatcaggaaccttcgaatcgggaggcgcttgcccatccactcatcccgtgaagatcccccaaatcatgtacgaagttatgttcgacacgcgtgcattcaacaatcaggccgactggcccgctgacggttccccgccgtggtactggagcatgggcgacaacactggttatggtctgcatggcgactacctgtttggctggaagggcgatgctctccagaaggcaatggacaccaagtgcgctaatgaccgatgccccgcactccagagacagacagatcaagcagctattgcttgtaccaaggcctcgcagtcgaaggtggacattggcgaccaatggcttacctcgctgcctgggatggcaatgccgatgtga

SEQ ID NO: 579 - protein, 342 aa, Muscodor strobelii
  misc_feature: SGI Peptide ID NO. 559767
  misc_feature (34)..(285): Pfam Id: PF09362 Pfam Desc: Domain of function (DUF1996)
  misc_feature (1)..(337): NCBI GI: 39941238 Blast Desc: MGG_05530 [Magnaporthe grisea 70-15] gi|145022203|gb|EDK06223.1| MGG_05530 [Magnaporthe grisea 70-15]
  misc_feature (19)..(342): NCBI GI: 116208376 Blast Desc: CHGG_03481 [Chaetomium globosum CBS 148.51] gi|88184078|gb|EAQ91546.1| CHGG_03481 [Chaetomium globosum CBS 148.51]
  misc_feature (9)..(319): NCBI GI: 171682738 Blast Desc: protein product [Podospora anserina] gi|170941328|emb|CAP66978.1| protein product [Podospora anserina]
  misc_feature (20)..(340): NCBI GI: 116203171 Blast Desc: CHGG_09470 [Chaetomium globosum CBS 148.51] gi|88177988|gb|EAQ85456.1| CHGG_09470 [Chaetomium globosum CBS 148.51]
  misc_feature (20)..(319): NCBI GI: 171694483 Blast Desc: protein product [Podospora anserina] gi|170947190|emb|CAP73995.1| protein product [Podospora anserina]
  misc_feature (10)..(342): NCBI GI: 169619878 Blast Desc: SNOG_13137 [Phaeosphaeria nodorum SN15] gi|111058344|gb|EAT79464.1| SNOG_13137 [Phaeosphaeria nodorum SN15]
  misc_feature (1)..(337): NCBI GI: 189195938 Blast Desc: conserved [Pyrenophora tritici-repentis Pt-1C-BFP] gi|187980186|gb|EDU46812.1| conserved [Pyrenophora tritici-repentis Pt-1C-BFP]
  misc_feature (1)..(340): NCBI GI: 116191393 Blast Desc: CHGG_05414 [Chaetomium globosum CBS 148.51] gi|88181327|gb|EAQ88795.1| CHGG_05414 [Chaetomium globosum CBS 148.51]
  misc_feature (20)..(342): NCBI GI: 164427037 Blast Desc: NCU02341 [Neurospora crassa OR74A] gi|157071579|gb|EAA30531.2| conserved [Neurospora crassa OR74A]
  misc_feature (60)..(337): NCBI GI: 145611868 Blast Desc: MGG_00066 [Magnaporthe grisea 70-15] gi|145019100|gb|EDK03379.1| MGG_00066 [Magnaporthe grisea 70-15]
  misc_feature: Useful for introducing or modulating the production of volatile compounds
MLFKTLVPALAVQLTAAQELMRFGCSQLTIDQTDPLVQPGAVPSTHMHQVVGGNSFNASMVPASHDPPTVSTCTSCTYSEDFSNYWTANLYYKARNGTYKRVPQFTNLGLGVQAGVTVYYIRGYQSSAKVTAFKPGFRMLVGDPTNRAASTMQKQLCYRCEANMQQNPFGGAPCTGSDTQAFPKGVCGGGWRVSVHFPSCWDGVNLDSPDHKSHVAYPASGTFESGGACPSTHPVKIPQIMYEVMFDTRAFNNQADWPADGSPPWYWSMGDNTGYGLHGDYLFGWKGDALQKAMDTKCANDRCPALQRQTDQAAIACTKASQSKVDIGDQWLTSLPGMAMPM

SEQ ID NO: 580 - DNA, 1111 bp, Muscodor strobelii
  misc_feature: SGI EST ID NO. CUFF.1634.0
  misc_feature: Variant of the nucleotide sequence at SEQ ID NO 578
cagcaagccatgacccacccacggtttcgacttgcaccagttgcacgtacagcgaagacttcagcaactattggacggcaaacctttactacaaggcccggaacggaacgtacaagcgcgttccgcagtttaccaatcttggacttggagtccaagctggcgtgactgtctactatatcaggggataccagtccagcgccaaagtcaccgctttcaagcctggcttccgcatgcttgttggcgacccaacaaatcgcgcggcgtctaccatgcagaagcagctctgctaccgctgcgaggccaacatgcagcagaaccccttcggcggcgcgccgtgcacaggttctgacacgcaggcgttccccaagggtgtctgcggtggcggttggcgtgtctccgtccatttccccagctgctgggacggtgtgaacttggactcacctgatcacaagagtcacgtcgcatacccagcatcaggaaccttcgaatcgggaggcgcttgcccatccactcatcccgtgaagatcccccaaatcatgtacgaagttatgttcgacacgcgtgcattcaacaatcaggccgactggcccgctgacggttccccgccgtggtactggagcatgggcgacaacactggttatggtctgcatggcgactacctgtttggctggaagggcgatgctctccagaaggcaatggacaccaagtgcgctaatgaccgatgccccgcactccagagacagacagatcaagcagctattgcttgtaccaaggcctcgcagtcgaaggtggacattggcgaccaatggcttacctcgctgcctgggatggcaatgccgatgtgaatgagagatgttgagtgactaactggagagaagatatttctttgggttcttaagacatgatattgtatttaccagactgagaaaatctaccttcttgttggcccacgctataccttcgcttaatttctggcgctggaggatcattaagactgtaactttgtagacttcggcagcccaaaccaatgaaataattcgcgtcttctgataccccatgctctgattttgttggtattggtattccgatgaggcatgatgcgcccgtgcaa

SEQ ID NO: 581 - DNA, 1038 bp, Muscodor strobelii
  misc_feature: SGI cDNA ID NO. 559768
  misc_feature: Elevated expression when VOC is produced
  misc_feature: Encodes the peptide sequence at SEQ ID NO 582
atgttgttcaagactctcgtgcccgctcttgcggtgcagctcactgcagctcaggagctcatgcgcttcggatgctcacagctcacgattgatcaaaccgaccccttggtccagccaggcgcggtcccatcaacgcatatgcatcaagtcgttggcggcaactccttcaatgccagcatggtaccagcaagccatgacccacccacggtttcgacttgcaccagttgcacgtacagcgaagacttcagcaactattggacggcaaacctttactacaaggcccggaacggaacgtacaagcgcgttccgcagtttaccaatcttggacttggagtccaagctggcgtgactgtctactatatcaggggataccagtccagcgccaaagtcaccgctttcaagcctggcttccgcatgcttgttggcgacccaacaaatcgcgcggcgtctaccatgcagaagcagctctgctaccgctgcgaggccaacatgcagcagaaccccttcggcggcgcgccgtgcacaggttctgacacgcaggcgttccccaagggtgtctgcggtggcggttggcgtgtctccgtccatttccccagctgctgggacggtgtgaacttggactcacctgatcacaagagtcacgtcgcatacccagcatcaggaaccttcgaatcgggaggcgcttgcccatccactcatcccgtgaagatcccccaaatcatgtacgaagttatgttcgacacgcgtgcattcaacaatcaggccgactggcccgctgacggttccccgccgtggtactggagcatgggcgacaacactggttatggtctgcatggcgactacctgtttggctggaagggcgatgctctccagaaggcaatggacaccaagtgcgctaatgaccgatgccccgcactccagagacagacagatcaagcagctattgcttgtaccaaggcctcgcagtcgaaggtggacattggcgaccaatgtgagtaccagcttatcttaccaagcaatatgaagagccatcgctga

SEQ ID NO: 582 - protein, 345 aa, Muscodor strobelii
  misc_feature: SGI Peptide ID NO. 559768
  misc_feature (34)..(285): Pfam Id: PF09362 Pfam Desc: Domain of function (DUF1996)
  misc_feature (1)..(330): NCBI GI: 39941238 Blast Desc: MGG_05530 [Magnaporthe grisea 70-15] gi|145022203|gb|EDK06223.1| MGG_05530 [Magnaporthe grisea 70-15]
  misc_feature (19)..(341): NCBI GI: 116208376 Blast Desc: CHGG_03481 [Chaetomium globosum CBS 148.51] gi|88184078|gb|EAQ91546.1| CHGG_03481 [Chaetomium globosum CBS 148.51]
  misc_feature (2)..(335): NCBI GI: 171682738 Blast Desc: protein product [Podospora anserina] gi|170941328|emb|CAP66978.1| protein product [Podospora anserina]
  misc_feature (20)..(318): NCBI GI: 116203171 Blast Desc: CHGG_09470 [Chaetomium globosum CBS 148.51] gi|88177988|gb|EAQ85456.1| CHGG_09470 [Chaetomium globosum CBS 148.51]
  misc_feature (20)..(333): NCBI GI: 171694483 Blast Desc: protein product [Podospora anserina] gi|170947190|emb|CAP73995.1| protein product [Podospora anserina]
  misc_feature (10)..(341): NCBI GI: 169619878 Blast Desc: SNOG_13137 [Phaeosphaeria nodorum SN15] gi|111058344|gb|EAT79464.1| SNOG_13137 [Phaeosphaeria nodorum SN15]
  misc_feature (1)..(341): NCBI GI: 189195938 Blast Desc: conserved [Pyrenophora tritici-repentis Pt-1C-BFP] gi|187980186|gb|EDU46812.1| conserved [Pyrenophora tritici-repentis Pt-1C-BFP]
  misc_feature (1)..(327): NCBI GI: 116191393 Blast Desc: CHGG_05414 [Chaetomium globosum CBS 148.51] gi|88181327|gb|EAQ88795.1| CHGG_05414 [Chaetomium globosum CBS 148.51]
  misc_feature (60)..(320): NCBI GI: 145611868 Blast Desc: MGG_00066 [Magnaporthe grisea 70-15] gi|145019100|gb|EDK03379.1| MGG_00066 [Magnaporthe grisea 70-15]
  misc_feature (10)..(329): NCBI GI: 189200126 Blast Desc: conserved [Pyrenophora tritici-repentis Pt-1C-BFP] gi|187983499|gb|EDU48987.1| conserved [Pyrenophora tritici-repentis Pt-1C-BFP]
  misc_feature: Useful for introducing or modulating the production of volatile compounds
MLFKTLVPALAVQLTAAQELMRFGCSQLTIDQTDPLVQPGAVPSTHMHQVVGGNSFNASMVPASHDPPTVSTCTSCTYSEDFSNYWTANLYYKARNGTYKRVPQFTNLGLGVQAGVTVYYIRGYQSSAKVTAFKPGFRMLVGDPTNRAASTMQKQLCYRCEANMQQNPFGGAPCTGSDTQAFPKGVCGGGWRVSVHFPSCWDGVNLDSPDHKSHVAYPASGTFESGGACPSTHPVKIPQIMYEVMFDTRAFNNQADWPADGSPPWYWSMGDNTGYGLHGDYLFGWKGDALQKAMDTKCANDRCPALQRQTDQAAIACTKASQSKVDIGDQCEYQLILPSNMKSHR

SEQ ID NO: 583 - DNA, 1111 bp, Muscodor strobelii; identical to SEQ ID NO: 580
  misc_feature: SGI EST ID NO. CUFF.1634.0
  misc_feature: Variant of the nucleotide sequence at SEQ ID NO 581

SEQ ID NO: 584 - DNA, 1875 bp, Muscodor strobelii
  misc_feature: SGI cDNA ID NO. 559769
  misc_feature: Encodes the peptide sequence at SEQ ID NO 585
atgtcgccgaagtccaaatattctcatctacccctcgcaacagatggtcccatcgaatgcgcagtgaatggaaccgtcttgttgaatacgccgtacttcaatcgtggatcagcccatacggctgaagaacgggagcagtttaaccttggcggcttgcttcctcaaagcgtgcaaactctcgaacagcaagctgagcgagcttatcagcagtacaagtcgagacaagatgacttggccaagaacactttcttaacctcgttaaaagaccagaactcagttctgtatttcaaggcaagtcgctacccatgctccagccctgttgccgagactaacatcctgcagctcctccaagatcatatacaagaaatgttcagcatcgtctacacacccacagaaggcgatgctatccaaaacttctcccggttgtttcgaaggccagaaggatgtttcctcaacatcaacgatatggaccgagtctctcacgatctagcacagtgggggaagcccgaagatattgactacatagttgtgtcagacggcgaggagattcttggcattggtgatcaaggtgcaggtggtatcttgatctcggtagcgaaactcgtcttgacaactctttgcgctggtatccatccaaatcgcacactccctgttgtcttggactgcggcacaaataatgaggagctccttaatgatgacctttatcttggtcttcgccagaagagagtccgcggagagcggtacgacaagtttgttgatgagttcgtccaatctgctcgaaagctatttccgaatgcctacatccactttgaggacttcgggctgacgaacgctcgccgtattctggaacattacagacccgaaatcgcatgcttcaacgatgacgtgcaaggcacgggctgcgtcaccctagccggaatcatggctggcctacacgtaagcaaccaaaagctcaaagacatcaaactcgtcgtctttggcgccggaactgcaggagtaggcatcgcagaccaagttcgtgacgccatcgccaccgagaaggggataagcaaagaagacgcagcgaagcaaatctggttaatcgacaaacccggcctattgaccacaaaaggagatctcgatgccggtcagaaaatgtacgcaaaggaggccgaagactggtccaatgacgacaactccctacactccgtaatcaagaacgtcaaaccaaacgtcctgatagggacttctacaaaacccaagtccttcaccgaatccatagtccgggaaatggcctctcataccccccgtcccgtcatcctacctctctccaaccccacaaaactccacgaggcagtcccagaagatatcctaaaatggacagacggcaaagccctagtcgccaccggctcccctttctcccccgtgaaaggaccctggggcaaagacggcgaggagataagcatagaggtagcagaatgcaacaacagcgtcgtcttcccgggaatcggactcggcgccgttctctgccgcgcaaaactcctgactaacaaaatgctcgtagcagccgttcacggcgtttcgtctctctcccctgccctatcagacgacacagcgcctttacttcctggtgttgacgatgtgcgaaacgtctctgttagggtggcgagagaggtcatcaaagctgcgatagaggaaggcgttgcgacacaggagggcattccggaggatgaaggggagttggaggagtggatcagggtccagatgtggaacccggtgtatagacctcttaagaaggtggagagcagcacggcttccagggctgcgaaggcggagcttaaggttgtggggagtattgaacgtgttggggagaagatggggagagttgatgaatga

SEQ ID NO: 585 - protein, 624 aa, Muscodor strobelii
  misc_feature: SGI Peptide ID NO. 559769
  misc_feature (105)..(294): Pfam Id: PF00390 Pfam Desc: Malic enzyme, N-terminal domain
  misc_feature (296)..(557): Pfam Id: PF03949 Pfam Desc: Malic enzyme, NAD binding domain
  misc_feature (296)..(470): Pfam Id: PF03949 Pfam Desc: Malic enzyme, NAD binding domain
  misc_feature (487)..(557): Pfam Id: PF03949 Pfam Desc: Malic enzyme, NAD binding domain
  misc_feature (5)..(616): NCBI GI: 46107844 Blast Desc: FG00805.1 [Gibberella zeae PH-1]
  misc_feature (3)..(612): NCBI GI: 171694574 Blast Desc: protein product [Podospora anserina] gi|170947529|emb|CAP59690.1| protein product [Podospora anserina]
  misc_feature (5)..(616): NCBI GI: 261361443 Blast Desc: NAD-dependent malic enzyme [Verticillium albo-atrum VaMs.102]
  misc_feature (5)..(611): NCBI GI: 85119192 Blast Desc: NCU02906 [Neurospora crassa OR74A] gi|28927399|gb|EAA36352.1| NCU02906 [Neurospora crassa OR74A]
  misc_feature (1)..(617): NCBI GI: 256735515 Blast Desc: [Nectria haematococca mpVI 77-13-4]
  misc_feature (5)..(613): NCBI GI: 39946676 Blast Desc: MGG_08562 [Magnaporthe grisea 70-15] gi|145012419|gb|EDJ97075.1| MGG_08562 [Magnaporthe grisea 70-15]
  misc_feature (6)..(605): NCBI GI: 154296004 Blast Desc: BC1G_13155 [Botryotinia fuckeliana B05.10] gi|150843807|gb|EDN19000.1| BC1G_13155 [Botryotinia fuckeliana B05.10]
  misc_feature (6)..(605): NCBI GI: 156039886 Blast Desc: SS1G_12079 [Sclerotinia sclerotiorum 1980] gi|154696136|gb|EDN95874.1| SS1G_12079 [Sclerotinia sclerotiorum 1980]
  misc_feature (5)..(596): NCBI GI: 212546111 Blast Desc: malate dehydrogenase, [Penicillium marneffei ATCC 18224] gi|210064729|gb|EEA18824.1| malate dehydrogenase, [Penicillium marneffei ATCC 18224]
  misc_feature (5)..(592): NCBI GI: 121709091 Blast Desc: malate dehydrogenase, [Aspergillus clavatus NRRL 1] gi|119400453|gb|EAW10878.1| malate dehydrogenase, [Aspergillus clavatus NRRL 1]
  misc_feature (12)..(594): SWISSPROT Homolog: EC 1.1.1.38 Malate dehydrogenase (oxaloacetate-decarboxylating)
MSPKSKYSHLPLATDGPIECAVNGTVLLNTPYFNRGSAHTAEEREQFNLGGLLPQSVQTLEQQAERAYQQYKSRQDDLAKNTFLTSLKDQNSVLYFKASRYPCSSPVAETNILQLLQDHIQEMFSIVYTPTEGDAIQNFSRLFRRPEGCFLNINDMDRVSHDLAQWGKPEDIDYIVVSDGEEILGIGDQGAGGILISVAKLVLTTLCAGIHPNRTLPVVLDCGTNNEELLNDDLYLGLRQKRVRGERYDKFVDEFVQSARKLFPNAYIHFEDFGLTNARRILEHYRPEIACFNDDVQGTGCVTLAGIMAGLHVSNQKLKDIKLVVFGAGTAGVGIADQVRDAIATEKGISKEDAAKQIWLIDKPGLLTTKGDLDAGQKMYAKEAEDWSNDDNSLHSVIKNVKPNVLIGTSTKPKSFTESIVREMASHTPRPVILPLSNPTKLHEAVPEDILKWTDGKALVATGSPFSPVKGPWGKDGEEISIEVAECNNSVVFPGIGLGAVLCRAKLLTNKMLVAAVHGVSSLSPALSDDTAPLLPGVDDVRNVSVRVAREVIKAAIEEGVATQEGIPEDEGELEEWIRVQMWNPVYRPLKKVESSTASRAAKAELKVVGSIERVGEKMGRVDE

SEQ ID NO: 586 - DNA, 2989 bp, Muscodor strobelii
  misc_feature: SGI EST ID NO. CUFF.1640.0
  misc_feature: Variant of the nucleotide sequence at SEQ ID NO 584
cggaccacagcgatgagttcgttgtgtgtggagtcctctccaaccctcgcaattttctcttgcttctcttttgctcacaaattgcacgacaattgcttccattcagcgtacggatccgtaaactctcacgggatcatggccagctatatgcgaaacacgtatgcacccgtgactaagtaggtattgaccctcatatttcctttgagcttcgctattcggcgtacgcagcatccttactccggccacttcatatctcctacgagtcttcatctgaaggtcttactgttctggcacgtcttgtgctggggcttcaagagggttcggtgacaaacaaggcgatgagtggtatttatactgttcgttgatatcaatgctgcaagaatgactactggaccatcatagtccacgctcatctgctgatgctgtttcatgcaacgttggcattcccgacatgagcgaggctccaagcgctcctacatatataccttatctcacagtcgattttatcgaatggagttcgtttctaagccagtgcaattgtcttctgcccatgatttcctctcgtacttatctcgtgacgttgccttaaagaatctccatgaagtcaatagacacccacacgcactcctcatggaatctcattttagtctattgggctcttagctttgcgaaaagtatctgtgagagaatttcccggaacattctgaggcggcatctcgtgccacctgcaaaatctccgaaggcggtttgcattgaacctgcattcgcggcgtttcttctgccaagatatatcagctttcagcagtcgcgtcttacatagcacgcaggtcagaaatcatgcgactttggttttgaattaaaattattgtgaccaaaacctgttaaacagattgatgtataaatatcgtctcgctctgcgagcgctgacaacaagtcgtaacaatcgagcaagtttctcgacgtctatcgccagaatgtcgccgaagtccaaatattctcatctacccctcgcaacagatggtcccatcgaatgcgcagtgaatggaaccgtcttgttgaatacgccgtacttcaatcgtggatcagcccatacggctgaagaacgggagcagtttaaccttggcggcttgcttcctcaaagcgtgcaaactctcgaacagcaagctgagcgagcttatcagcagtacaagtcgagacaagatgacttggccaagaacactttcttaacctcgttaaaagaccagaactcagttctgtatttcaagctcctccaagatcatatacaagaaatgttcagcatcgtctacacacccacagaaggcgatgctatccaaaacttctcccggttgtttcgaaggccagaaggatgtttcctcaacatcaacgatatggaccgagtctctcacgatctagcacagtgggggaagcccgaagatattgactacatagttgtgtcagacggcgaggagattcttggcattggtgatcaaggtgcaggtggtatcttgatctcggtagcgaaactcgtcttgacaactctttgcgctggtatccatccaaatcgcacactccctgttgtcttggactgcggcacaaataatgaggagctccttaatgatgacctttatcttggtcttcgccagaagagagtccgcggagagcggtacgacaagtttgttgatgagttcgtccaatctgctcgaaagctatttccgaatgcctacatccactttgaggacttcgggctgacgaacgctcgccgtattctggaacattacagacccgaaatcgcatgcttcaacgatgacgtgcaaggcacgggctgcgtcaccctagccggaatcatggctggcctacacgtaagcaaccaaaagctcaaagacatcaaactcgtcgtctttggcgccggaactgcaggagtaggcatcgcagaccaagttcgtgacgccatcgccaccgagaaggggataagcaaagaagacgcagcgaagcaaatctggttaatcgacaaacccggcctattgaccacaaaaggagatctcgatgccggtcagaaaatgtacgcaaaggaggccgaagactggtccaatgacgacaactccctacactccgtaatcaagaacgtcaaaccaaacgtcctgatagggacttctacaaaacccaagtccttcaccgaatccatagtccgggaaatggcctctcataccccccgtcccgtcatcctacctctctccaaccccacaaaactccacgaggcagtcccagaagatatcctaaaatggacagacggcaaagccctagtcgccaccggctcccctttctcccccgtgaaaggaccctggggcaaagacggcgaggagataagcatagaggtagcagaatgcaacaacagcgtcgtcttcccgggaatcggactcggcgccgttctctgccgcgcaaaactcctgactaacaaaatgctcgtagcagccgttcacggcgtttcgtctctctcccctgccctatcagacgacacagcgcctttacttcctggtgttgacgatgtgcgaaacgtctctgttagggtggcgagagaggtcatcaaagctgcgatagaggaaggcgttgcgacacaggagggcattccggaggatgaaggggagttggaggagtggatcagggtccagatgtggaacccggtgtatagacctcttaagaaggtggagagcagcacggcttccagggctgcgaaggcggagcttaaggttgtggggagtattgaacgtgttggggagaagatggggagagttgatgaatgagtgagcattgtatgatgtggtattgtgagggaggcatgttggcgttgtggcttgcaattggtgatggacgtgggaaagccgagtttttgccatcgcgatagcgggtacttgttcgtctttgctgttatggaatgtatggtggtggttagtctaatgtcgtaattatcttattgaaccatatgtttctggcc

SEQ ID NO: 587 - DNA, 1824 bp, Muscodor strobelii
  misc_feature: SGI cDNA ID NO. 559770
  misc_feature: Reduced expression when VOC is produced
  misc_feature: Encodes the peptide sequence at SEQ ID NO 588
atgtcgccgaagtccaaatattctcatctacccctcgcaacagatggtcccatcgaatgcgcagtgaatggaaccgtcttgttgaatacgccgtacttcaatcgtggatcagcccatacggctgaagaacgggagcagtttaaccttggcggcttgcttcctcaaagcgtgcaaactctcgaacagcaagctgagcgagcttatcagcagtacaagtcgagacaagatgacttggccaagaacactttcttaacctcgttaaaagaccagaactcagttctgtatttcaagctcctccaagatcatatacaagaaatgttcagcatcgtctacacacccacagaaggcgatgctatccaaaacttctcccggttgtttcgaaggccagaaggatgtttcctcaacatcaacgatatggaccgagtctctcacgatctagcacagtgggggaagcccgaagatattgactacatagttgtgtcagacggcgaggagattcttggcattggtgatcaaggtgcaggtggtatcttgatctcggtagcgaaactcgtcttgacaactctttgcgctggtatccatccaaatcgcacactccctgttgtcttggactgcggcacaaataatgaggagctccttaatgatgacctttatcttggtcttcgccagaagagagtccgcggagagcggtacgacaagtttgttgatgagttcgtccaatctgctcgaaagctatttccgaatgcctacatccactttgaggacttcgggctgacgaacgctcgccgtattctggaacattacagacccgaaatcgcatgcttcaacgatgacgtgcaaggcacgggctgcgtcaccctagccggaatcatggctggcctacacgtaagcaaccaaaagctcaaagacatcaaactcgtcgtctttggcgccggaactgcaggagtaggcatcgcagaccaagttcgtgacgccatcgccaccgagaaggggataagcaaagaagacgcagcgaagcaaatctggttaatcgacaaacccggcctattgaccacaaaaggagatctcgatgccggtcagaaaatgtacgcaaaggaggccgaagactggtccaatgacgacaactccctacactccgtaatcaagaacgtcaaaccaaacgtcctgatagggacttctacaaaacccaagtccttcaccgaatccatagtccgggaaatggcctctcataccccccgtcccgtcatcctacctctctccaaccccacaaaactccacgaggcagtcccagaagatatcctaaaatggacagacggcaaagccctagtcgccaccggctcccctttctcccccgtgaaaggaccctggggcaaagacggcgaggagataagcatagaggtagcagaatgcaacaacagcgtcgtcttcccgggaatcggactcggcgccgttctctgccgcgcaaaactcctgactaacaaaatgctcgtagcagccgttcacggcgtttcgtctctctcccctgccctatcagacgacacagcgcctttacttcctggtgttgacgatgtgcgaaacgtctctgttagggtggcgagagaggtcatcaaagctgcgatagaggaaggcgttgcgacacaggagggcattccggaggatgaaggggagttggaggagtggatcagggtccagatgtggaacccggtgtatagacctcttaagaaggtggagagcagcacggcttccagggctgcgaaggcggagcttaaggttgtggggagtattgaacgtgttggggagaagatggggagagttgatgaatga

SEQ ID NO: 588 - protein, 607 aa, Muscodor strobelii
  misc_feature: SGI Peptide ID NO. 559770
  misc_feature (88)..(277): Pfam Id: PF00390 Pfam Desc: Malic enzyme, N-terminal domain
  misc_feature (279)..(540): Pfam Id: PF03949 Pfam Desc: Malic enzyme, NAD binding domain
  misc_feature (279)..(453): Pfam Id: PF03949 Pfam Desc: Malic enzyme, NAD binding domain
  misc_feature (470)..(540): Pfam Id: PF03949 Pfam Desc: Malic enzyme, NAD binding domain
  misc_feature (5)..(599): NCBI GI: 46107844 Blast Desc: FG00805.1 [Gibberella zeae PH-1]
  misc_feature (3)..(595): NCBI GI: 171694574 Blast Desc: protein product [Podospora anserina] gi|170947529|emb|CAP59690.1| protein product [Podospora anserina]
  misc_feature (5)..(599): NCBI GI: 261361443 Blast Desc: NAD-dependent malic enzyme [Verticillium albo-atrum VaMs.102]
  misc_feature (5)..(594): NCBI GI: 85119192 Blast Desc: NCU02906 [Neurospora crassa OR74A] gi|28927399|gb|EAA36352.1| NCU02906 [Neurospora crassa OR74A]
  misc_feature (1)..(600): NCBI GI: 256735515 Blast Desc: [Nectria haematococca mpVI 77-13-4]
  misc_feature (5)..(596): NCBI GI: 39946676 Blast Desc: MGG_08562 [Magnaporthe grisea 70-15] gi|145012419|gb|EDJ97075.1| MGG_08562 [Magnaporthe grisea 70-15]
  misc_feature (6)..(588): NCBI GI: 154296004 Blast Desc: BC1G_13155 [Botryotinia fuckeliana B05.10] gi|150843807|gb|EDN19000.1| BC1G_13155 [Botryotinia fuckeliana B05.10]
  misc_feature (6)..(588): NCBI GI: 156039886 Blast Desc: SS1G_12079 [Sclerotinia sclerotiorum 1980] gi|154696136|gb|EDN95874.1| SS1G_12079 [Sclerotinia sclerotiorum 1980]
  misc_feature (5)..(579): NCBI GI: 212546111 Blast Desc: malate dehydrogenase, [Penicillium marneffei ATCC 18224] gi|210064729|gb|EEA18824.1| malate dehydrogenase, [Penicillium marneffei ATCC 18224]
  misc_feature (5)..(575): NCBI GI: 121709091 Blast Desc: malate dehydrogenase, [Aspergillus clavatus NRRL 1] gi|119400453|gb|EAW10878.1| malate dehydrogenase, [Aspergillus clavatus NRRL 1]
  misc_feature (12)..(577): SWISSPROT Homolog: EC 1.1.1.38 Malate dehydrogenase (oxaloacetate-decarboxylating)
  misc_feature: Useful for introducing or modulating the production of volatile compounds
MSPKSKYSHLPLATDGPIECAVNGTVLLNTPYFNRGSAHTAEEREQFNLGGLLPQSVQTLEQQAERAYQQYKSRQDDLAKNTFLTSLKDQNSVLYFKLLQDHIQEMFSIVYTPTEGDAIQNFSRLFRRPEGCFLNINDMDRVSHDLAQWGKPEDIDYIVVSDGEEILGIGDQGAGGILISVAKLVLTTLCAGIHPNRTLPVVLDCGTNNEELLNDDLYLGLRQKRVRGERYDKFVDEFVQSARKLFPNAYIHFEDFGLTNARRILEHYRPEIACFNDDVQGTGCVTLAGIMAGLHVSNQKLKDIKLVVFGAGTAGVGIADQVRDAIATEKGISKEDAAKQIWLIDKPGLLTTKGDLDAGQKMYAKEAEDWSNDDNSLHSVIKNVKPNVLIGTSTKPKSFTESIVREMASHTPRPVILPLSNPTKLHEAVPEDILKWTDGKALVATGSPFSPVKGPWGKDGEEISIEVAECNNSVVFPGIGLGAVLCRAKLLTNKMLVAAVHGVSSLSPALSDDTAPLLPGVDDVRNVSVRVAREVIKAAIEEGVATQEGIPEDEGELEEWIRVQMWNPVYRPLKKVESSTASRAAKAELKVVGSIERVGEKMGRVDE

SEQ ID NO: 589 - DNA, 2989 bp, Muscodor strobelii; identical to SEQ ID NO: 586
  misc_feature: SGI EST ID NO. CUFF.1640.0
  misc_feature: Variant of the nucleotide sequence at SEQ ID NO 587

SEQ ID NO: 590 - DNA, 1566 bp, Muscodor strobelii
  misc_feature: SGI cDNA ID NO. 559771
  misc_feature: Encodes the peptide sequence at SEQ ID NO 591
atggcagccaagcagaccaaaggctctgccaccgacgagatcgacgacctctttggaggcattggcgacgacagcaccgtcaagaagtcgaccaaagccaagtccagcaagcctcgcagcgacaagcccgagaaggacatcctcgccgacctgcagaacgagctcgacggccaggagcccgcacgcccgcacacgcctcgcgtcaaggagacgaagcgaactagcaccgcaaccccgcctcctggtgctgctgctcgactctccgaagacaagccctcagcagcggtagcagcaactcgcaagtccgccgacagcacacgttcctttcacgcctctttcacacccagtgccaccagctctgagctgcaagatgccgagaagaagggccccgtcgagcagactgaggctgctgcgcccgccgctggaggtggttggtggggcggcatcttcgcgacggcgtccgctaccgccaacgccgccatgaagcaggccgaggccgcgtacaaggagatccagcagaacgaagaggccaagaagtgggcagaacaggtcagaggcaacgtcggggctttgaagggtcttggagacgacctccgtcaccgcgccatgccaaccttcgccaacatcctgcacaccctcgccccgcccatctcctcgcacgaacgtctcctaatccacatcacgcacgacctagtcgggtacccgtctttcgacccgctaatctacggcgtcttcagccgcgtcatgtcgcaagtcgaaggcggctccctcatggtcgtgcaacgaggccacgagaacacagcccgtcgctcctcagacgctcccacaccattcttcggctcctcttctagtacagcagggtggcgcgacgggccttggtggcgacaagtcgattcaccgcgcgatctaggagccatcaagggacttaccgaggggacgaagctctgtcgcgtaaacgcagagtcctactcaacggagtacttctcccgcagcgggggtataaccgaggcgcagaaacgagccctcgagcctgtgtcagaggataatccagtgaggacgtctgatatattcctcgcggtgcaggcgataatcgtcgagtctgattctgcgctcttcgctggttctactactagcgaagcggagaaggagagtagtcctgtcgtggatgatagtaccgatacgtgtgtctgcttcgcggtatatgtcctggaccctgtgcatgatattacgtatcacactgttagtcagaatattccacttaagtggattcgttggatggatgctccgactcctctcacgcccgcgacggataatgagggccagggggatgaggaacagatccccgatgaaattcgtgagattttggagacgggcggtgtagacccgagggaatgggttgctgagtggatcgaggagacgcttagtctgagtgttggtgtggtggcccagagatatgtcgctagacgcatgggtgtgggtgagggtggactgggaaagggaaagcagaagattgaggcgcttgttcaggagggtggtggtgaggctgcgagggctggcctgatttga

SEQ ID NO: 591 - protein, 521 aa, Muscodor strobelii
  misc_feature: SGI Peptide ID NO. 559771
  misc_feature (1)..(521): NCBI GI: 85119165 Blast Desc: NCU02899 [Neurospora crassa OR74A] gi|28927392|gb|EAA36345.1| conserved [Neurospora crassa OR74A]
  misc_feature (1)..(521): NCBI GI: 116182926 Blast Desc: CHGG_02091 [Chaetomium globosum CBS 148.51] gi|88186388|gb|EAQ93856.1| CHGG_02091 [Chaetomium globosum CBS 148.51]
  misc_feature (1)..(521): NCBI GI: 261361442 Blast Desc: conserved [Verticillium albo-atrum VaMs.102]
  misc_feature (1)..(521): NCBI GI: 46107842 Blast Desc: FG00804.1 [Gibberella zeae PH-1]
  misc_feature (1)..(521): NCBI GI: 154296428 Blast Desc: BC1G_13040 [Botryotinia fuckeliana B05.10] gi|150843401|gb|EDN18594.1| BC1G_13040 [Botryotinia fuckeliana B05.10]
  misc_feature (1)..(521): NCBI GI: 156054716 Blast Desc: SS1G_06206 [Sclerotinia sclerotiorum 1980] gi|154703986|gb|EDO03725.1| SS1G_06206 [Sclerotinia sclerotiorum 1980]
  misc_feature (1)..(521): NCBI GI: 256734807 Blast Desc: NECHADRAFT_90424 [Nectria haematococca mpVI 77-13-4]
  misc_feature (17)..(521): NCBI GI: 171694586 Blast Desc: protein product [Podospora anserina] gi|170947535|emb|CAP59696.1| protein product [Podospora anserina]
  misc_feature (2)..(521): NCBI GI: 39940632 Blast Desc: MGG_04924 [Magnaporthe grisea 70-15] gi|145010840|gb|EDJ95496.1| MGG_04924 [Magnaporthe grisea 70-15]
  misc_feature (1)..(518): NCBI GI: 225677960 Blast Desc: conserved [Paracoccidioides brasiliensis Pb03]
MAAKQTKGSATDEIDDLFGGIGDDSTVKKSTKAKSSKPRSDKPEKDILADLQNELDGQEPARPHTPRVKETKRTSTATPPPGAAARLSEDKPSAAVAATRKSADSTRSFHASFTPSATSSELQDAEKKGPVEQTEAAAPAAGGGWWGGIFATASATANAAMKQAEAAYKEIQQNEEAKKWAEQVRGNVGALKGLGDDLRHRAMPTFANILHTLAPPISSHERLLIHITHDLVGYPSFDPLIYGVFSRVMSQVEGGSLMVVQRGHENTARRSSDAPTPFFGSSSSTAGWRDGPWWRQVDSPRDLGAIKGLTEGTKLCRVNAESYSTEYFSRSGGITEAQKRALEPVSEDNPVRTSDIFLAVQAIIVESDSALFAGSTTSEAEKESSPVVDDSTDTCVCFAVYVLDPVHDITYHTVSQNIPLKWIRWMDAPTPLTPATDNEGQGDEEQIPDEIREILETGGVDPREWVAEWIEETLSLSVGVVAQRYVARRMGVGEGGLGKGKQKIEALVQEGGGEAARAGLI

SEQ ID NO: 592 - DNA, 2171 bp, Muscodor strobelii
  misc_feature: SGI EST ID NO. CUFF.1647.0
  misc_feature: Variant of the nucleotide sequence at SEQ ID NO 590
tgcgaaccccgtataactattgaaactacatgtactattctttcgacactgctgcatctaactaagtcacaggtctatcgggtattaaaataccagttccatctgtgcaaccgtatattgcccgccgttgactctatcatcgtgtcgtgcttctccggagtacatgtaccctgcaacccggctctccaagtctaacagcagccagagctattgtggagacatcgtcgtcagtgttgagccgaaacgtgaagctattgtccgatatacaactattaacatagccggaccggtcattacagccgtccttcaacagaaacctcataatctctattgtacataaaacacacaacgcatcgtgcccagcatggcagccaagcagaccaaaggctctgccaccgacgagatcgacgacctctttggaggcattggcgacgacagcaccgtcaagaagtcgaccaaagccaagtccagcaagcctcgcagcgacaagcccgagaaggacatcctcgccgacctgcagaacgagctcgacggccaggagcccgcacgcccgcacacgcctcgcgtcaaggagacgaagcgaactagcaccgcaaccccgcctcctggtgctgctgctcgactctccgaagacaagccctcagcagcggtagcagcaactcgcaagtccgccgacagcacacgttcctttcacgcctctttcacacccagtgccaccagctctgagctgcaagatgccgagaagaagggccccgtcgagcagactgaggctgctgcgcccgccgctggaggtggttggtggggcggcatcttcgcgacggcgtccgctaccgccaacgccgccatgaagcaggccgaggccgcgtacaaggagatccagcagaacgaagaggccaagaagtgggcagaacaggtcagaggcaacgtcggggctttgaagggtcttggagacgacctccgtcaccgcgccatgccaaccttcgccaacatcctgcacaccctcgccccgcccatctcctcgcacgaacgtctcctaatccacatcacgcacgacctagtcgggtacccgtctttcgacccgctaatctacggcgtcttcagccgcgtcatgtcgcaagtcgaaggcggctccctcatggtcgtgcaacgaggccacgagaacacagcccgtcgctcctcagacgctcccacaccattcttcggctcctcttctagtacagcagggtggcgcgacgggccttggtggcgacaagtcgattcaccgcgcgatctaggagccatcaagggacttaccgaggggacgaagctctgtcgcgtaaacgcagagtcctactcaacggagtacttctcccgcagcgggggtataaccgaggcgcagaaacgagccctcgagcctgtgtcagaggataatccagtgaggacgtctgatatattcctcgcggtgcaggcgataatcgtcgagtctgattctgcgctcttcgctggttctactactagcgaagcggagaaggagagtagtcctgtcgtggatgatagtaccgatacgtgtgtctgcttcgcggtatatgtcctggaccctgtgcatgatattacgtatcacactgttagtcagaatattccacttaagtggattcgttggatggatgctccgactcctctcacgcccgcgacggataatgagggccagggggatgaggaacagatccccgatgaaattcgtgagattttggagacgggcggtgtagacccgagggaatgggttgctgagtggatcgaggagacgcttagtctgagtgttggtgtggtggcccagagatatgtcgctagacgcatgggtgtgggtgagggtggactgggaaagggaaagcagaagattgaggcgcttgttcaggagggtggtggtgaggctgcgagggctggcctgatttgaggatgtagttacagccccttgttctgtttctgttacgcgccttgagctggatcgagttcgagttctgtattgcaatggttatttcgctgacctcgtaggtgtcttggcgtatcatatttcggctgggtctctttaccttgattcatcacttgcgttgatggttgtattgagagtttctctggaataggaatatatctatctttccattactctacgtcaactattaagagttttatcgacg

SEQ ID NO: 593 - DNA, 2796 bp, Muscodor strobelii
  misc_feature: SGI cDNA ID NO. 559772
  misc_feature: Encodes the peptide sequence at SEQ ID NO 594
atggataccccctcgtccgctgctcgcgccagaagtcggtggtcttcaacgcgcaaacgtcacaccttccctacagattcctcatttgccagcaccagccctatgacaccaaccggagatgagctctcctctaccacgcctgctggaagccatcccccatcttctctctctcatgaaacccctagcccttctgcttcaaaggatagtaagatcaaaatccgctgggctggtggcaaattgtcttcttttccggagcccgatagcaaaggcggccgctcattgagaaagcgggcccgagtggattatacctcctttgagcatcctgatgaggaacacagtgatggcaacaaggccacgccctccgcagctcgcgctctgaagaagcgacgggccgattcggcatttcatgatgtcgagaccgacgaagagttcagtgctcgcgtcaagaggcgtgcatccgaacagcccacgctgccatcatcagtcgctcgtagacgtgcacagccacgcaagtctactattgaacctcaagccaccatttctctgcagagtaccgaagacgttgaagtccaagatacaatcgaggtcggtggacatcagagtgagcagtctgacgaatccaccttgcgtcgcatgagttcaggctcatcccacaacggctcaaggctatctcaaagcaaactttctctcgacctcatgtcaacacctcagaaatccgtctccagtcttgtcccagaactcatgaatgagagctttgattacagtcccactgcacaactcaccgaatctattatggaacctccatcagaagagcccccgccagaagagcctctaccaggagagccgcaaccggaagaggcttcacaagaaattttacacgaagccccgagcgaggcagcaccagaacctgaagaatctccaactcctgagaattccttttggcacctcactccatatcttgaaggagcttttgtccaacttccaatcgctcatcctacagctgaacctacaatcgagccccaggccagtcaggaaggtcctatggtaaaagcaactagcagtcaagttaatgatcctgagccgagcaattcgcaggcaggcgacactcaaagagatacacccttgaccgacgatttacagccagatgccaccccgatagatgggcttcttgaggacacacctgccgcttctcctgatgctatttacaccgcggcaaattctcccactgcggaagcagagtcagagcctgccctctcccagcctgtcccgaagaagacattccgctttcgacagacccgggatgcctccgagttcactaagcttctcgagaacttcaaagaccttcctcctgatgagctttaccatcgacttgaagtcatcaacaaggcaatggttgcttggcagtttgagtttcttgaaatgaagaagctcactgatgatgaagctaactcaattcggcgtcgtcaagaagaggccgcctttgagcaacgcgttaagatggccgtgagcaaggatcccgacgccaacccagttcccaaggacttcgaagttaaaggcgtccgtgccaagcttcctgatcccgaaattgcttacgcccgacaccaggacaaactcatggcagcaaactacttgttcgactacgacgatcgagagagtaaaattggcttccagaaccctcttgagcaaaaacctggttatggaaagggccggttgcgcgatcgccccaaacagacagctaaagcggccgaggctgatgaccccaatgttgttcatagcaagcgagctagaaaagctcccatggcgtatgatggcagcgaggtccctagcagagcctccactcccgttcccccgattcaacgccgccgacgccgcgctggacaagctgcagaggaaattggcgacagcagtctatcttttggaacgcctctaccaaactcgtccgccgagcagcccccacttaagaagaagggcaaaggcggtcgtccgaggaaacatccgctgccagtgcctcctgtggaggagcattatcctgctgttgctgaagatgaacagcaacatctcgctgaagagcagaggcccgcccgcaaacgtcgccgcagagtctacgctgatgaagcagacgaggatgacgtagccatcactaatagtaccaaccgcaagacgccggcctacgccagagaagaatcgcgtcctcccacttcgtcttcgactgccacgcaatccactgttgcttcaatatcaaataactaccagcttcgggagaaaagacagaggaagttcactctcaatccagacgacgaggaggactatgatgaggagccaaagcccaagcgggttcgccgttcaaagaagatcaaggccgaagacgctgtggccacgtccaatcaaaagcctccatctggagccgtacctgtagagccacccgcccctactaattccgcctcacaaaagctaaacatcaaaatcaaggtaatcgctcatccagctccgacttcgaacccgatgcccaaccctttctccgtaccctcgtcatcgcattcgacccccggtcccagcacgaatggcctccagaacggtggcacactaggacttgacacaactgacgagaaggattacagtcagatgactaaatccgagaagatgtcgcattcaatgaaagcacgatgggcatcgggctcgatgtcccaggccgttgccaagcgacgtgccacgcttgcaatcaaaaagcaggcagtaaaggctgcagagcccagcccactcaatgaagcggctcccgctccggcgcaagccggataa

SEQ ID NO: 594 - protein, 931 aa, Muscodor strobelii
  misc_feature: SGI Peptide ID NO. 559772
  misc_feature (307)..(898): NCBI GI: 46107840 Blast Desc: FG00803.1 [Gibberella zeae PH-1]
  misc_feature (307)..(898): NCBI GI: 256735514 Blast Desc: NECHADRAFT_75436 [Nectria haematococca mpVI 77-13-4]
  misc_feature (387)..(797): NCBI GI: 116182924 Blast Desc: CHGG_02090 [Chaetomium globosum CBS 148.51] gi|88186387|gb|EAQ93855.1| CHGG_02090 [Chaetomium globosum CBS 148.51]
  misc_feature (425)..(632): NCBI GI: 145602416 Blast Desc: MGG_04923 [Magnaporthe grisea 70-15] gi|145010841|gb|EDJ95497.1| MGG_04923 [Magnaporthe grisea 70-15]
  misc_feature (425)..(651): NCBI GI: 171694588 Blast Desc: protein product [Podospora anserina] gi|170947536|emb|CAP59697.1| protein product [Podospora anserina]
  misc_feature (405)..(615): NCBI GI: 85119161 Blast Desc: NCU02898 [Neurospora crassa OR74A] gi|28927391|gb|EAA36344.1| NCU02898 [Neurospora crassa OR74A]
  misc_feature (24)..(229): NCBI GI: 46107840 Blast Desc: FG00803.1 [Gibberella zeae PH-1]
  misc_feature (89)..(285): NCBI GI: 256735514 Blast Desc: NECHADRAFT_75436 [Nectria haematococca mpVI 77-13-4]
  misc_feature (314)..(624): NCBI GI: 261361441 Blast Desc: [Verticillium albo-atrum VaMs.102]
  misc_feature (869)..(919): NCBI GI: 145602416 Blast Desc: MGG_04923 [Magnaporthe grisea 70-15] gi|145010841|gb|EDJ95497.1| MGG_04923 [Magnaporthe grisea 70-15]
MDTPSSAARARSRWSSTRKRHTFPTDSSFASTSPMTPTGDELSSTTPAGSHPPSSLSHETPSPSASKDSKIKIRWAGGKLSSFPEPDSKGGRSLRKRARVDYTSFEHPDEEHSDGNKATPSAARALKKRRADSAFHDVETDEEFSARVKRRASEQPTLPSSVARRRAQPRKSTIEPQATISLQSTEDVEVQDTIEVGGHQSEQSDESTLRRMSSGSSHNGSRLSQSKLSLDLMSTPQKSVSSLVPELMNESFDYSPTAQLTESIMEPPSEEPPPEEPLPGEPQPEEASQEILHEAPSEAAPEPEESPTPENSFWHLTPYLEGAFVQLPIAHPTAEPTIEPQASQEGPMVKATSSQVNDPEPSNSQAGDTQRDTPLTDDLQPDATPIDGLLEDTPAASPDAIYTAANSPTAEAESEPALSQPVPKKTFRFRQTRDASEFTKLLENFKDLPPDELYHRLEVINKAMVAWQFEFLEMKKLTDDEANSIRRRQEEAAFEQRVKMAVSKDPDANPVPKDFEVKGVRAKLPDPEIAYARHQDKLMAANYLFDYDDRESKIGFQNPLEQKPGYGKGRLRDRPKQTAKAAEADDPNVVHSKRARKAPMAYDGSEVPSRASTPVPPIQRRRRRAGQAAEEIGDSSLSFGTPLPNSSAEQPPLKKKGKGGRPRKHPLPVPPVEEHYPAVAEDEQQHLAEEQRPARKRRRRVYADEADEDDVAITNSTNRKTPAYAREESRPPTSSSTATQSTVASISNNYQLREKRQRKFTLNPDDEEDYDEEPKPKRVRRSKKIKAEDAVATSNQKPPSGAVPVEPPAPTNSASQKLNIKIKVIAHPAPTSNPMPNPFSVPSSSHSTPGPSTNGLQNGGTLGLDTTDEKDYSQMTKSEKMSHSMKARWASGSMSQAVAKRRATLAIKKQAVKAAEPSPLNEAAPAPAQAG

SEQ ID NO: 595 - DNA, 3963 bp, Muscodor strobelii
  misc_feature: SGI EST ID NO. CUFF.1655.0
  misc_feature: Variant of the nucleotide sequence at SEQ ID NO 593
cgcagctgtactgtatcaagacgtcgaccaacgcatgcgcacgcttgccatcattccatcctctcgacgataacatcctcttcgtaagagaactcatcgtctttgcgttcttgtgtagtgctactattttgccgcggagctcttgcctcgttgcactggcaccgacatctcgtcagcctgctcttgtctattgacgtccaacactttccaacttgcgccctttggccttttcttgtatgcacctctggaaagtcattctcttgtttcgcgtgcactgtctgcgaattacacggtacctgccagcgtacccacttacagcataatctccgacctcaaagtcttcttacacctgctcaccttctcgcctgcctcatcgccttgcaccaacacgtgtaaattatcaggtaaattttctggccatcgtcacgatggataccccctcgtccgctgctcgcgccagaagtcggtggtcttcaacgcgcaaacgtcacaccttccctacagattcctcatttgccagcaccagccctatgacaccaaccggagatgagctctcctctaccacgcctgctggaagccatcccccatcttctctctctcatgaaacccctagcccttctgcttcaaaggatagtaagatcaaaatccgctgggctggtggcaaattgtcttcttttccggagcccgatagcaaaggcggccgctcattgagaaagcgggcccgagtggattatacctcctttgagcatcctgatgaggaacacagtgatggcaacaaggccacgccctccgcagctcgcgctctgaagaagcgacgggccgattcggcatttcatgatgtcgagaccgacgaagagttcagtgctcgcgtcaagaggcgtgcatccgaacagcccacgctgccatcatcagtcgctcgtagacgtgcacagccacgcaagtctactattgaacctcaagccaccatttctctgcagagtaccgaagacgttgaagtccaagatacaatcgaggtcggtggacatcagagtgagcagtctgacgaatccaccttgcgtcgcatgagttcaggctcatcccacaacggctcaaggctatctcaaagcaaactttctctcgacctcatgtcaacacctcagaaatccgtctccagtcttgtcccagaactcatgaatgagagctttgattacagtcccactgcacaactcaccgaatctattatggaacctccatcagaagagcccccgccagaagagcctctaccaggagagccgcaaccggaagaggcttcacaagaaattttacacgaagccccgagcgaggcagcaccagaacctgaagaatctccaactcctgagaattccttttggcacctcactccatatcttgaaggagcttttgtccaacttccaatcgctcatcctacagctgaacctacaatcgagccccaggccagtcaggaaggtcctatggtaaaagcaactagcagtcaagttaatgatcctgagccgagcaattcgcaggcaggcgacactcaaagagatacacccttgaccgacgatttacagccagatgccaccccgatagatgggcttcttgaggacacacctgccgcttctcctgatgctatttacaccgcggcaaattctcccactgcggaagcagagtcagagcctgccctctcccagcctgtcccgaagaagacattccgctttcgacagacccgggatgcctccgagttcactaagcttctcgagaacttcaaagaccttcctcctgatgagctttaccatcgacttgaagtcatcaacaaggcaatggttgcttggcagtttgagtttcttgaaatgaagaagctcactgatgatgaagctaactcaattcggcgtcgtcaagaagaggccgcctttgagcaacgcgttaagatggccgtgagcaaggatcccgacgccaacccagttcccaaggacttcgaagttaaaggcgtccgtgccaagcttcctgatcccgaaattgcttacgcccgacaccaggacaaactcatggcagcaaactacttgttcgactacgacgatcgagagagtaaaattggcttccagaaccctcttgagcaaaaacctggttatggaaagggccggttgcgcgatcgccccaaacagacagctaaagcggccgaggctgatgaccccaatgttgttcatagcaagcgagctagaaaagctcccatggcgtatgatggcagcgaggtccctagcagagcctccactcccgttcccccgattcaacgccgccgacgccgcgctggacaagctgcagaggaaattggcgacagcagtctatcttttggaacgcctctaccaaactcgtccgccgagcagcccccacttaagaagaagggcaaaggcggtcgtccgaggaaacatccgctgccagtgcctcctgtggaggagcattatcctgctgttgctgaagatgaacagcaacatctcgctgaagagcagaggcccgcccgcaaacgtcgccgcagagtctacgctgatgaagcagacgaggatgacgtagccatcactaatagtaccaaccgcaagacgccggcctacgccagagaagaatcgcgtcctcccacttcgtcttcgactgccacgcaatccactgttgcttcaatatcaaataactaccagcttcgggagaaaagacagaggaagttcactctcaatccagacgacgaggaggactatgatgaggagccaaagcccaagcgggttcgccgttcaaagaagatcaaggccgaagacgctgtggccacgtccaatcaaaagcctccatctggagccgtacctgtagagccacccgcccctactaattccgcctcacaaaagctaaacatcaaaatcaaggtaatcgctcatccagctccgacttcgaacccgatgcccaaccctttctccgtaccctcgtcatcgcattcgacccccggtcccagcacgaatggcctccagaacggtggcacactaggacttgacacaactgacgagaaggattacagtcagatgactaaatccgagaagatgtcgcattcaatgaaagcacgatgggcatcgggctcgatgtcccaggccgttgccaagcgacgtgccacgcttgcaatcaaaaagcaggcagtaaaggctgcagagcccagcccactcaatgaagcggctcccgctccggcgcaagccggataattcaccaccacctctcccaacacctacctgtacaatatcctccgcccgtctctgtgctcccacctatagctagggaaaactgagctgtaccactatacaagaaccgaggccgaatctttaccgacaccaacaagcgaatctgtacaataagaaacgagcgaatcgagctacacgaatgctttcccgtcacctttcctttgctgtcaccatggccatacaacacctaatttgcatacaacgggcgtttaaaatgctcaatttgacaaaatacacggaagataccccctgaaaaagtttcttgacgaatttccttgcttgtttccttttttgcggattggccgcccgccctcactcacccaccaccaccaacgcaccatcacctcccacagaaaatcgcagtttgaagaacgtcccgatccagatgccaggctgtaatgcgacatggcactagggcgggtgctgcccaacccgtcaggttggcctattgtggaaggaagacgaacccaaccgaaccctcgtttccagttgccaggctgtaacgcgacatggctttggaacgagtaactcttggaaggaagggaaggaaaagctcagtaggcgttacggtccaatagtcacgtaaggggctggtggtcgcacatcagtcatggatcggacgctgaacggcatagatattggtcgtggaggtgggatgaagagggcacttggggttaatatgagggctttttgtagatgctga

SEQ ID NO: 596 - DNA, 675 bp, Muscodor strobelii
  misc_feature: SGI cDNA ID NO. 559773
  misc_feature: Reduced expression when VOC is produced
  misc_feature: Encodes the peptide sequence at SEQ ID NO 597
atggccaagcaatcccgtggtgcccctgggtatgtttacgaccccgatcctcgcatcctttcgattatttccccgcgctgtatcgaacttggcgacgacactcgacaaatgctcaagagtctcctacccgcgctacgaaaattaccacactgcgtctccacgaagtattctggaacaggccttgcgtccgcaagcagattcccgcgcaaccggtccgatgccaacacgcgaaacatagaacgtcaagccagtctcggtcggggacttttgagcatttcgaggaatggcaagctcaagatgaccctcggtcttcccgtcggtgccatcatgaactgcgccgacaactctggcgcccgtaatctctacatcatctccgtcaagggtatcggtgcccgcctcaacagactgcccgccggcggtgtcggcgacatggtcatggccaccgtcaagaagggaaagcccgagctccgcaagaaggtccaccccgccgtcatcgtccgccagtccaagccctggaagcgcaccgacggcgtcttcctctacttcgaggacaacgctggtgtcatcgtcaaccccaagggtgagatgaagggatccgccatcaccggccccgtcggaaaggaggctgctgagttgtggccccgtattgccagcaactccggtgtcgtcatgtaa

SEQ ID NO: 597 - protein, 224 aa, Muscodor strobelii
  misc_feature: SGI Peptide ID NO. 559773
  misc_feature (103)..(224): Pfam Id: PF00238 Pfam Desc: Ribosomal protein L14p/L23e
  misc_feature (96)..(224): NCBI GI: 39940638 Blast Desc: 60S ribosomal protein L23 [Magnaporthe grisea 70-15] gi|59802848|gb|AAX07639.1| 60S ribosomal protein L23-like protein [Magnaporthe grisea] gi|145010843|gb|EDJ95499.1| 60S ribosomal
  misc_feature (96)..(224): NCBI GI: 85119188 Blast Desc: 60S ribosomal protein L23 [Neurospora crassa OR74A] gi|28927398|gb|EAA36351.1| 60S ribosomal protein L23 [Neurospora crassa OR74A]
  misc_feature (96)..(224): NCBI GI: 261361440 Blast Desc: 60S ribosomal protein L23 [Verticillium albo-atrum VaMs.102]
  misc_feature (96)..(224): NCBI GI: 171694576 Blast Desc: protein product [Podospora anserina] gi|170947530|emb|CAP59691.1| protein product [Podospora anserina]
  misc_feature (96)..(224): NCBI GI: 46107838 Blast Desc: FG00802.1 [Gibberella zeae PH-1]
  misc_feature (96)..(224): NCBI GI: 256734806 Blast Desc: [Nectria haematococca mpVI 77-13-4]
  misc_feature (96)..(224): NCBI GI: 116182920 Blast Desc: 60S ribosomal protein L23 [Chaetomium globosum CBS 148.51] gi|88186385|gb|EAQ93853.1| 60S ribosomal protein L23 [Chaetomium globosum CBS 148.51]
  misc_feature (96)..(224): NCBI GI: 154321469 Blast Desc: 60S ribosomal protein L23 [Botryotinia fuckeliana B05.10] gi|156053952|ref|XP_001592902.1| 60S ribosomal protein L23 [Sclerotinia sclerotiorum 1980] gi|150852147|gb|EDN27339.1|
  misc_feature (99)..(224): NCBI GI: 38327027 Blast Desc: alkaline serine protease [Bionectria ochroleuca]
  misc_feature (93)..(224): NCBI GI: 169595466 Blast Desc: SNOG_00472 [Phaeosphaeria nodorum SN15] gi|111070847|gb|EAT91967.1| SNOG_00472 [Phaeosphaeria nodorum SN15]
  misc_feature: Useful for introducing or modulating the production of volatile compounds
MAKQSRGAPGYVYDPDPRILSIISPRCIELGDDTRQMLKSLLPALRKLPHCVSTKYSGTGLASASRFPRNRSDANTRNIERQASLGRGLLSISRNGKLKMTLGLPVGAIMNCADNSGARNLYIISVKGIGARLNRLPAGGVGDMVMATVKKGKPELRKKVHPAVIVRQSKPWKRTDGVFLYFEDNAGVIVNPKGEMKGSAITGPVGKEAAELWPRIASNSGVVM

SEQ ID NO: 598 - DNA, 1528 bp, Muscodor strobelii
  misc_feature: SGI EST ID NO. CUFF.1710.2
  misc_feature: Variant of the nucleotide sequence at SEQ ID NO 596
ctgcaaatgtggacccgttgattttcacacagcgacatcgtcttcttgcccaccactcctcaccacctcgacaccgacaattacctccgtaacacacaaccgtcgcaatggccaagcaatcgtaagttgatgactttatctgctgagttggagaccctagaagaggaggaaatgccgcccgccaaccaagcctggacatgagggggatggaggcgtgatacatggacctgaagaggagacgatgagcagggagaaagaagaggactactacgaaaccgacgatttgactgcagatatgtggaatgcgaaacacaccggaaatggctcggtcgacgatcagcagctacgcgtggcgggcattggcatcattgggaatctcaatcaggaactacgacactcgaacaaatggctaactcttcttctattctagccgtggtgcccctgggtatgtttacgaccccgatcctcgcatcctttcgattatttccccgcgctgtatcgaacttggcgacgacactcgacaaatgctcaagagtctcctacccgcgctacgaaaattaccacactgcgtctccacgaagtattctggaacaggccttgcgtccgcaagcagattcccgcgcaaccggtccgatgccaacacgcgaaacatagaacgtcaagccagtctcggtcggggacttttgagcatttcgaggaagtgagggcgcttggttcgatacggctcgaagctacgaatctgcatctacccatcaggaaacccgctcttcgtcgtcaatgcgcaggatcttgcgacgtatcaaagaaaggcgtaaattgcagctgctgaccgttttcctacagtggcaagctcaagatgaccctcggtcttcccgtcggtgccatcatgaactgcgccgacaactctggcgcccgtaatctctacatcatctccgtcaagggtatcggtgcccgcctcaacagactgcccgccggcggtgtcggcgacatggtcatggccaccgtcaagaagggaaagcccgagctccgcaagaaggtccaccccgccgtcatcgtccgccagtccaagccctggaagcgcaccgacggcgtcttcctctacttcgaggacaacgctggtgtcatcgtcaaccccaagggtgagatgaagggatccgccatcaccggccccgtcggaaaggaggctgctgagttgtggccccgtattgccagcaactccggtgtcgtcatgtaaattgcgttttcgagcgattgaagagaagaaaaaggtggtgaaatggggtgaatgccattctcactaacgagtcacgatttgggggtatcaagaaccaaactcaagcggaccgggtatggtttgccagacagacgaaactatatgtgaatgagtctgatcggaaactggttgcttttgcatttcggctatggggcgtaaaggagactcaaccattgcgaacacttgacataccaactacactaaaatagtacacacccctgaattctgaaatgcaaaagaattcagttcccaaat

SEQ ID NO: 599 - DNA, 1635 bp, Muscodor strobelii
  misc_feature: SGI cDNA ID NO. 559775
  misc_feature: Elevated expression when VOC is produced
  misc_feature: Encodes the peptide sequence at SEQ ID NO 600
atgaccgaggtacttggagttcccatcacttgggatctggcctggaaagctgcagggtggctggctgctctcagcttggtcaacttcttcgtcaagctttacaatgttcgaatgcagttccgacgcgtacaaaaggaacatggtggacccatgttacctcattcttttcttttcggtcatttgattcaaaccgccaagcttgtcgcgaagcacaaactaccgagcgatttccacggccactggatgttccatctcatcaaacaagatttccctgaagtcacaaaggagggtgtgctgtatttggatatctggccgatcaactaccccttcgtcgctgtcttccatcctggaatcatcccgcaattcacccaggaacacagtctcccaaaatggtgggcacagggtggcagggcttttagaccgttctccggaggcgaagatttgctccatctcgagggccagcaatggaagactatgcgagccatcttcaaccccggtttctcagccaagaatttgatcgcacttgtgccggcgttcgttgaggagacattggtgttccaggagcgactccgcgaggctgcgaagagtggaaagacaatcaaactcgagaagctgaccaccgatgtgacggtcgacgttgtagctcgtgcggttctcggttcgcgtctacaccaccaaaagcagcatactgagctcatggaaaccatgcgaaagcagctgagcttgatcattctcaatctcgacatcttcaaggagctcagccctctgcgtcctatcaggcactggttctacaaccggaagattgccaacgaactgatgcctcatattcagaacacgatcgagcaccttaacgacgatggcccaaagaccattttggcactcgctttgaagtcttatcttaaggaccacccagaggagaagactgttccggatgcgtttttgcagaaagttattacacacatcaaggtctttatgttcgctggccatgacacaactgcttctaccctggcctatatcttgtactgcctagagaagcacccagaggcaatggctaaggcgcgtgctgagcttgatcaactacttggccccgatccctctcaggcaggcggattgatcagccaagatccaaccgtcttgaatagaatgtcctacatcattgcttgtatcaaggaatctctgcgcttgtacccaccagtcggtggtactgctcgaggatcgcctgagggacacatgctcgtacaccctgagaccggcaagcgatacccgacctacagattcatgcttcactcttccgtatcgacattacatcgtgatcccgagtactggccagatgcggacaaattcgttccggagcgttggcttgtgcgagacgacaaggatccttactacgttggaaagaacatgtggcgacctttcgagatcgggcctcgcacttgtatcggtcaggagctgaccaacttcgagctccgcctgatcgtggcgcttaccatccgcgacttctccttcgtggagcagtatgccgaagatgcgcctacgctctttggcgacaaggcttaccagagttgggacaacgacctgacagccacagcccactgtaaagactggctgcctgtaaaggtcattgcgagaacgtaa

SEQ ID NO: 600 - protein, 544 aa, Muscodor strobelii
  misc_feature: SGI Peptide ID NO. 559775
  misc_feature (74)..(528): Pfam Id: PF00067 Pfam Desc: Cytochrome P450
  misc_feature (323)..(404): Pfam Id: PF00067 Pfam Desc: Cytochrome P450
  misc_feature (431)..(502): Pfam Id: PF00067 Pfam Desc: Cytochrome P450
  misc_feature (142)..(223): Pfam Id: PF00067 Pfam Desc: Cytochrome P450
  misc_feature (13)..(543): NCBI GI: 46110969 Blast Desc: FG02366.1 [Gibberella zeae PH-1]
  misc_feature (52)..(543): NCBI GI: 170940186 Blast Desc: protein product [Podospora anserina]
  misc_feature (11)..(540): NCBI GI: 154320460 Blast Desc: BC1G_01702 [Botryotinia fuckeliana B05.10] gi|150853391|gb|EDN28583.1| BC1G_01702 [Botryotinia fuckeliana B05.10]
  misc_feature (26)..(542): NCBI GI: 156042896 Blast Desc: SS1G_11247 [Sclerotinia sclerotiorum 1980] gi|154695632|gb|EDN95370.1| SS1G_11247 [Sclerotinia sclerotiorum 1980]
  misc_feature (19)..(543): NCBI GI: 261354657 Blast Desc: cytochrome P450 4V3 [Verticillium albo-atrum VaMs.102]
  misc_feature (34)..(543): NCBI GI: 115402821 Blast Desc: conserved [Aspergillus terreus NIH2624] gi|114189333|gb|EAU31033.1| conserved [Aspergillus terreus NIH2624]
  misc_feature (5)..(543): NCBI GI: 189195772 Blast Desc: cytochrome P450 71B25 [Pyrenophora tritici-repentis Pt-1C-BFP] gi|187980103|gb|EDU46729.1| cytochrome P450 71B25 [Pyrenophora tritici-repentis Pt-1C-BFP]
  misc_feature (21)..(543): NCBI GI: 238497407 Blast Desc: aflN/ verA/ monooxygenase [Aspergillus flavus NRRL3357] gi|220694819|gb|EED51163.1| aflN/ verA/ monooxygenase [Aspergillus flavus NRRL3357]
  misc_feature (56)..(544): NCBI GI: 169774109 Blast Desc: [Aspergillus oryzae RIB40] gi|83769385|dbj|BAE59520.1| protein product [Aspergillus oryzae] gi|84468472|dbj|BAE71324.1| monooxygenase [Aspergillus oryzae]
  misc_feature (56)..(543): NCBI GI: 46370524 Blast Desc: VerA [Aspergillus nomius]
  misc_feature (152)..(518): SWISSPROT Homolog: EC 1.14.14.1 Unspecific monooxygenase
  misc_feature: Useful for introducing or modulating the production of volatile compounds
MTEVLGVPITWDLAWKAAGWLAALSLVNFFVKLYNVRMQFRRVQKEHGGPMLPHSFLFGHLIQTAKLVAKHKLPSDFHGHWMFHLIKQDFPEVTKEGVLYLDIWPINYPFVAVFHPGIIPQFTQEHSLPKWWAQGGRAFRPFSGGEDLLHLEGQQWKTMRAIFNPGFSAKNLIALVPAFVEETLVFQERLREAAKSGKTIKLEKLTTDVTVDVVARAVLGSRLHHQKQHTELMETMRKQLSLIILNLDIFKELSPLRPIRHWFYNRKIANELMPHIQNTIEHLNDDGPKTILALALKSYLKDHPEEKTVPDAFLQKVITHIKVFMFAGHDTTASTLAYILYCLEKHPEAMAKARAELDQLLGPDPSQAGGLISQDPTVLNRMSYIIACIKESLRLYPPVGGTARGSPEGHMLVHPETGKRYPTYRFMLHSSVSTLHRDPEYWPDADKFVPERWLVRDDKDPYYVGKNMWRPFEIGPRTCIGQELTNFELRLIVALTIRDFSFVEQYAEDAPTLFGDKAYQSWDNDLTATAHCKDWLPVKVIART

SEQ ID NO: 601 - DNA, 2308 bp, Muscodor strobelii
  misc_feature: SGI EST ID NO. CUFF.1719.0
  misc_feature: Variant of the nucleotide sequence at SEQ ID NO 599
ccggagtcagccgtacgtgaaatttggtaatcgcacacggccatcgttctgtacccactttgtatcgtccaagatcacttagtaagacgagtatttctaatggttttggtgatgcagccctggtctagcgccagccccatctctttgacgggggccaagcgggaagctgaccattgtcagcaaaattattttgacagtcccaatgtgttgtttgttctgcggaatgcagcatggaatgacatgtcgtattaagcagtctattattactgtcagggccagtcccattatggtacgacaggacatgcatagggaggtcttacaagcggaaaatgaagacacgacgtttgttttataaactgctgccggccacatctcttaggatttgagcaaccctcataattttcggccacataatcattctttcatagccaaaatgaccgaggtacttggagttcccatcacttgggatctggcctggaaagctgcagggtggctggctgctctcagcttggtcaacttcttcgtcaagctttacaatgttcgaatgcagttccgacgcgtacaaaaggaacatggtggacccatgttacctcattcttttcttttcggtcatttgattcaaaccgccaagcttgtcgcgaagcacaaactaccgagcgatttccacggccactggatgttccatctcatcaaacaagatttccctgaagtcacaaaggagggtgtgctgtatttggatatctggccgatcaactaccccttcgtcgctgtcttccatcctggaatcatcccgcaattcacccaggaacacagtctcccaaaatggtgggcacagggtggcagggcttttagaccgttctccggaggcgaagatttgctccatctcgagggccagcaatggaagactatgcgagccatcttcaaccccggtttctcagccaagaatttgatcgcacttgtgccggcgttcgttgaggagacattggtgttccaggagcgactccgcgaggctgcgaagagtggaaagacaatcaaactcgagaagctgaccaccgatgtgacggtcgacgttgtagctcgtgcggttctcggttcgcgtctacaccaccaaaagcagcatactgagctcatggaaaccatgcgaaagcagctgagcttgatcattctcaatctcgacatcttcaaggagctcagccctctgcgtcctatcaggcactggttctacaaccggaagattgccaacgaactgatgcctcatattcagaacacgatcgagcaccttaacgacgatggcccaaagaccattttggcactcgctttgaagtcttatcttaaggaccacccagaggagaagactgttccggatgcgtttttgcagaaagttattacacacatcaaggtctttatgttcgctggccatgacacaactgcttctaccctggcctatatcttgtactgcctagagaagcacccagaggcaatggctaaggcgcgtgctgagcttgatcaactacttggccccgatccctctcaggcaggcggattgatcagccaagatccaaccgtcttgaatagaatgtcctacatcattgcttgtatcaaggaatctctgcgcttgtacccaccagtcggtggtactgctcgaggatcgcctgagggacacatgctcgtacaccctgagaccggcaagcgatacccgacctacagattcatgcttcactcttccgtatcgacattacatcgtgatcccgagtactggccagatgcggacaaattcgttccggagcgttggcttgtgcgagacgacaaggatccttactacgttggaaagaacatgtggcgacctttcgagatcgggcctcgcacttgtatcggtcaggagctgaccaacttcgagctccgcctgatcgtggcgcttaccatccgcgacttctccttcgtggagcagtatgccgaagatgcgcctacgctctttggcgacaaggcttaccagagttgggacaacgacctgacagccacagcccactgtaaagactggctgcctgtaaaggtcattgcgagaacgtaaagagctccaagactcaaaaaatgggcagacatctagccggtgaggtgctatctgtccaaacacacacgtaaaatacatcttttttttcttgtcatttattagataatgccttattagcgatctcggggcgaggcatgtgcatattcgactggttagtcgatttcgttttgtatatacatttacgggctttttagcgagatatcctctatagacaacccaatgaacattgatcaaacttga

SEQ ID NO: 602 - DNA, 663 bp, Muscodor strobelii
  misc_feature: SGI cDNA ID NO. 559776
  misc_feature: Elevated expression when VOC is produced
  misc_feature: Encodes the peptide sequence at SEQ ID NO 603
atgttcgctggccatgacacaactgcttctaccctggcctatatcttgtactgcctagagaagcacccagaggcaatggctaaggcgcgtgctgagcttgatcaactacttggccccgatccctctcaggcaggcggattgatcagccaagatccaaccgtcttgaatagaatgtcctacatcattgcttgtatcaaggaatctctgcgcttgtacccaccagtcggtggtactgctcgaggatcgcctgagggacacatgctcgtacaccctgagaccggcaagcgatacccgacctacagattcatgcttcactcttccgtatcgacattacatcgtgatcccgagtactggccagatgcggacaaattcgttccggagcgttggcttgtgcgagacgacaaggatccttactacgttggaaagaacatgtggcgacctttcgagatcgggcctcgcacttgtatcggtcaggagctgaccaacttcgagctccgcctgatcgtggcgcttaccatccgcgacttctccttcgtggagcagtatgccgaagatgcgcctacgctctttggcgacaaggcttaccagagttgggacaacgacctgacagccacagcccactgtaaagactggctgcctgtaaaggtcattgcgagaacgtaa

SEQ ID NO: 603 - protein, 220 aa, Muscodor strobelii
  misc_feature: SGI Peptide ID NO. 559776
  misc_feature (1)..(80): Pfam Id: PF00067 Pfam Desc: Cytochrome P450
  misc_feature (107)..(178): Pfam Id: PF00067 Pfam Desc: Cytochrome P450
  misc_feature (1)..(219): NCBI GI: 46110969 Blast Desc: FG02366.1 [Gibberella zeae PH-1]
  misc_feature (1)..(219): NCBI GI: 170940186 Blast Desc: protein product [Podospora anserina]
  misc_feature (1)..(219): NCBI GI: 115402821 Blast Desc: conserved [Aspergillus terreus NIH2624] gi|114189333|gb|EAU31033.1| conserved [Aspergillus terreus NIH2624]
  misc_feature (1)..(219): NCBI GI: 45477392 Blast Desc: monooxygenase [Aspergillus parasiticus]
  misc_feature (1)..(219): NCBI GI: 169774109 Blast Desc: [Aspergillus oryzae RIB40] gi|83769385|dbj|BAE59520.1| protein product [Aspergillus oryzae] gi|84468472|dbj|BAE71324.1| monooxygenase [Aspergillus oryzae]
  misc_feature (1)..(220): NCBI GI: 238506527 Blast Desc: cytochrome P450, [Aspergillus flavus NRRL3357] gi|220689178|gb|EED45529.1| cytochrome P450, [Aspergillus flavus NRRL3357]
  misc_feature (1)..(220): NCBI GI: 208879566 Blast Desc: AflN [Aspergillus ochraceoroseus]
  misc_feature (1)..(220): NCBI GI: 154312567 Blast Desc: BC1G_05886 [Botryotinia fuckeliana B05.10] gi|150849987|gb|EDN25180.1| BC1G_05886 [Botryotinia fuckeliana B05.10]
  misc_feature (1)..(219): NCBI GI: 46370524 Blast Desc: VerA [Aspergillus nomius]
  misc_feature (1)..(219): NCBI GI: 238497407 Blast Desc: aflN/ verA/ monooxygenase [Aspergillus flavus NRRL3357] gi|220694819|gb|EED51163.1| aflN/ verA/ monooxygenase [Aspergillus flavus NRRL3357]
  misc_feature (1)..(178): SWISSPROT Homolog: EC 1.14.15.3 Alkane 1-monooxygenase
  misc_feature: Useful for introducing or modulating the production of volatile compounds
MFAGHDTTASTLAYILYCLEKHPEAMAKARAELDQLLGPDPSQAGGLISQDPTVLNRMSYIIACIKESLRLYPPVGGTARGSPEGHMLVHPETGKRYPTYRFMLHSSVSTLHRDPEYWPDADKFVPERWLVRDDKDPYYVGKNMWRPFEIGPRTCIGQELTNFELRLIVALTIRDFSFVEQYAEDAPTLFGDKAYQSWDNDLTATAHCKDWLPVKVIART

SEQ ID NO: 604 - DNA, 1783 bp, Muscodor strobelii
  misc_feature: SGI EST ID NO. CUFF.1719.1
  misc_feature: Variant of the nucleotide sequence at SEQ ID NO 602
agcccatgttacctcattcttttcttttcggtcatttgattcaaaccgccaagcttgtcgcgaagcacaaactaccgagcgatttccacggccactggatgttccatctcatcaaacaagatttccctgaagtcacaaaggagggtgtgctgtatttggatatctggccgatcaactaccccttcgtcgctgtcttccatcctggaatcatcccgcaattcacccaggaacacagtctcccaaaatggtgggcacagggtggcagggcttttagaccgttctccggaggcgaagatttgctccatctcgagggccagcaatggaagactatgcgagccatcttcaaccccggtttctcagccaagaatttgatcgcacttgtgccggcgttcgttgaggagacattggtgttccaggagcgactccgcgaggctgcgaagagtggaaagacaatcaaactcgagaagctgaccaccgatgtgacggtcgacgttgtagctcgtgcggttctgtaagtgtctttggtcccggctctctgatatacacattgctaatttgatgcagcggttcgcgtctacaccaccaaaagcagcatactgagctcatggaaaccatgcgaaagcagctgagcttgatcattctcaatctcgacatcttcaaggagctcagccctctgcgtcctatcaggcactggttctacaaccggaagattgccaacgaactgatgcctcatattcagaacacgatcgagcaccttaacgacgatggcccaaagaccattttggcactcgctttgaagtcttatcttaaggaccacccagaggagaagactgttccggatgcgtttttgcagaaagttattacacacatcaaggtctttatgttcgctggccatgacacaactgcttctaccctggcctatatcttgtactgcctagagaagcacccagaggcaatggctaaggcgcgtgctgagcttgatcaactacttggccccgatccctctcaggcaggcggattgatcagccaagatccaaccgtcttgaatagaatgtcctacatcattgcttgtatcaaggaatctctgcgcttgtacccaccagtcggtggtactgctcgaggatcgcctgagggacacatgctcgtacaccctgagaccggcaagcgatacccgacctacagattcatgcttcactcttccgtatcgacattacatcgtgatcccgagtactggccagatgcggacaaattcgttccggagcgttggcttgtgcgagacgacaaggatccttactacgttggaaagaacatgtggcgacctttcgagatcgggcctcgcacttgtatcggtcaggagctgaccaacttcgagctccgcctgatcgtggcgcttaccatccgcgacttctccttcgtggagcagtatgccgaagatgcgcctacgctctttggcgacaaggcttaccagagttgggacaacgacctgacagccacagcccactgtaaagactggctgcctgtaaaggtcattgcgagaacgtaaagagctccaagactcaaaaaatgggcagacatctagccggtgaggtgctatctgtccaaacacacacgtaaaatacatcttttttttcttgtcatttattagataatgccttattagcgatctcggggcgaggcatgtgcatattcgactggttagtcgatttcgttttgtatatacatttacgggctttttagcgagatatcctctatagacaacccaatgaacattgatcaaacttga

SEQ ID NO: 605 - DNA, 1146 bp, Muscodor strobelii
  misc_feature: SGI cDNA ID NO. 559777
  misc_feature: Encodes the peptide sequence at SEQ ID NO 606
atgatgagcctcagagctgtcgccgctcccgtgcggcgccaatgctacgcagccctcccccgagctgctgctgcccgctccattcagggccaaagattctattctgacagagtcgccaagttcaccggcaccaagaacacagatggccgctacaccgtctctatcatggagggtgacggcattggtcccgagatttcccaagctgtcaaggatatcttcgaggctgccaaggcccctattgcctgggagcctgtcgatgtcacccctatcctcaaggatggaaagactgccatcccagatgccaccatcgagagcatccagagaaacaaggtcgccctgaagggccccctcgctactcccattggcaagggccatgtctctctcaaccttaccctccgccgtaccttcaacctctttgccaacttgcgaccctgccgatccgtcgctggctacaagaccccctatgacggcgtcgacaccgtcctgatccgcgagaacaccgagggcgaatactcgggcatcgagcacatcgtcgtcgacggcgtcgtccagagcatcaagctcatcacccgcgaggccagcgagcgcgtcctgcgcttcgccttccagcacgcccaggagatcggccgcaagaaggtccgcgtcgtccacaaggccaccatcatgaagatgtctgacggtctcttcctgcgcgtcgcccaggacgtcgccaaggacttccccgacatcgagttcgacgccgagctcctcgacaacacctgcctcaagatggtcaccgaccccctgccctacaacgacaaggtcctcgtcatgcccaacctgtacggtgacattctctccgacatgtgcgccggtctgatcggtggtttgggtctgaccccctccggcaacatcggtgacgagtgctccatcttcgaggctgtccacggttcagcccccgacatcgccggcaagggcctcgccaaccccactgcccttctcctctcctccatgatgatgttgcgacacatgggtctgactgagtacgccgaccgcatcgagaaggccgccttctccaccttggccgagggcaaatacctgactggtgacctgggcggcaaggccaagacccacgagtatgccggtgccatcatttccaaattgtag

SEQ ID NO: 606 - protein, 381 aa, Muscodor strobelii
  misc_feature: SGI Peptide ID NO. 559777
  misc_feature (52)..(377): Pfam Id: PF00180 Pfam Desc: Isocitrate/isopropylmalate dehydrogenase
  misc_feature (1)..(381): NCBI GI: 116196030 Blast Desc: CHGG_04613 [Chaetomium globosum CBS 148.51] gi|88180526|gb|EAQ87994.1| CHGG_04613 [Chaetomium globosum CBS 148.51]
  misc_feature (1)..(381): NCBI GI: 261352303 Blast Desc: 3-isopropylmalate dehydrogenase [Verticillium albo-atrum VaMs.102]
  misc_feature (1)..(381): NCBI GI: 171690594 Blast Desc: protein product [Podospora anserina] gi|170945245|emb|CAP71356.1| protein product [Podospora anserina]
  misc_feature (31)..(381): NCBI GI: 145613359 Blast Desc: MGG_01712 [Magnaporthe grisea 70-15] gi|145020444|gb|EDK04573.1| MGG_01712 [Magnaporthe grisea 70-15]
  misc_feature (1)..(381): NCBI GI: 85106968 Blast Desc: isocitrate dehydrogenase subunit 2, mitochondrial precursor [Neurospora crassa OR74A] gi|28923885|gb|EAA33047.1| isocitrate dehydrogenase subunit 2, mitochondrial precursor
  misc_feature (1)..(381): NCBI GI: 242775038 Blast Desc: isocitrate dehydrogenase, NAD-dependent [Talaromyces stipitatus ATCC 10500] gi|218722183|gb|EED21601.1| isocitrate dehydrogenase, NAD-dependent [Talaromyces stipitatus ATCC 10500]
  misc_feature (1)..(381): NCBI GI: 46136129 Blast Desc: FG09580.1 [Gibberella zeae PH-1]
  misc_feature (1)..(381): NCBI GI: 156045535 Blast Desc: SS1G_09958 [Sclerotinia sclerotiorum 1980] gi|154694351|gb|EDN94089.1| SS1G_09958 [Sclerotinia sclerotiorum 1980]
  misc_feature (1)..(381): NCBI GI: 256727016 Blast Desc: [Nectria haematococca mpVI 77-13-4]
  misc_feature (1)..(381): NCBI GI: 212532217 Blast Desc: isocitrate dehydrogenase, NAD-dependent [Penicillium marneffei ATCC 18224] gi|210071629|gb|EEA25718.1| isocitrate dehydrogenase, NAD-dependent [Penicillium marneffei ATCC 18224]
  misc_feature (32)..(381): SWISSPROT Homolog: EC 1.1.1.41 Isocitrate dehydrogenase (NAD(+))
MMSLRAVAAPVRRQCYAALPRAAAARSIQGQRFYSDRVAKFTGTKNTDGRYTVSIMEGDGIGPEISQAVKDIFEAAKAPIAWEPVDVTPILKDGKTAIPDATIESIQRNKVALKGPLATPIGKGHVSLNLTLRRTFNLFANLRPCRSVAGYKTPYDGVDTVLIRENTEGEYSGIEHIVVDGVVQSIKLITREASERVLRFAFQHAQEIGRKKVRVVHKATIMKMSDGLFLRVAQDVAKDFPDIEFDAELLDNTCLKMVTDPLPYNDKVLVMPNLYGDILSDMCAGLIGGLGLTPSGNIGDECSIFEAVHGSAPDIAGKGLANPTALLLSSMMMLRHMGLTEYADRIEKAAFSTLAEGKYLTGDLGGKAKTHEYAGAIISKL

SEQ ID NO: 607 - DNA, 1727 bp, Muscodor strobelii
  misc_feature: SGI EST ID NO. CUFF.1679.0
  misc_feature: Variant of the nucleotide sequence at SEQ ID NO 605
gaaaagtgctcgtcggaactaaacacagctgtaaaccacgcagccgcattctgcacgcggctcatgtacacttatcattcttaattgcctctgttttcttgtgtcgccgactttctaccccaacattcaccctccatattcttagtccgcccgtcacccgctctgcccaccgccatcatgatgagcctcagagctgtcgccgctcccgtgcggcgccaatgctacgcagccctcccccgagctgctgctgcccgctccattcagggccaaagattctattctgacagagtcgccaagttcaccggcaccaagaacacagatggccgctacaccgtctctatcatggagggtgacggcattggtcccgagatttcccaagctgtcaaggatatcttcgaggctgccaaggcccctattgcctgggagcctgtcgatgtcacccctatcctcaaggatggaaagactgccatcccagatgccaccatcgagagcatccagagaaacaaggtcgccctgaagggccccctcgctactcccattggcaagggccatgtctctctcaaccttaccctccgccgtaccttcaacctctttgccaacttgcgaccctgccgatccgtcgctggctacaagaccccctatgacggcgtcgacaccgtcctgatccgcgagaacaccgagggcgaatactcgggcatcgagcacatcgtcgtcgacggcgtcgtccagagcatcaagctcatcacccgcgaggccagcgagcgcgtcctgcgcttcgccttccagcacgcccaggagatcggccgcaagaaggtccgcgtcgtccacaaggccaccatcatgaagatgtctgacggtctcttcctgcgcgtcgcccaggacgtcgccaaggacttccccgacatcgagttcgacgccgagctcctcgacaacacctgcctcaagatggtcaccgaccccctgccctacaacgacaaggtcctcgtcatgcccaacctgtacggtgacattctctccgacatgtgcgccggtctgatcggtggtttgggtctgaccccctccggcaacatcggtgacgagtgctccatcttcgaggctgtccacggttcagcccccgacatcgccggcaagggcctcgccaaccccactgcccttctcctctcctccatgatgatgttgcgacacatgggtctgactgagtacgccgaccgcatcgagaaggccgccttctccaccttggccgagggcaaatacctgactggtgacctgggcggcaaggccaagacccacgagtatgccggtgccatcatttccaaattgtagataccccacgaacactctcaaaaacttctatcccttacaaccgtatccaatcatccgatcatccatccacacactccataattttacaaacgatccgccttgaatagacttttcacatttggcaaacggggaactacgcgcaagaatacgaaagcaaagatgctgctacgattatcaaatgcgcaatgcatccttgaaacgtgggcaggcgcgagacctagggttccttagccgggccaggccgggccggttgtatgtagactgtacaacagtaacgagagaaggcatcaaatgaagaaaccatgaaattcattgttgctgttttttttgtaacatgacgtgtgaaatgatgtccatgaaataccacactcatgggctctagtcgattacttgtgatgttcccc

SEQ ID NO: 608 - DNA, 1992 bp, Muscodor strobelii
  misc_feature: SGI cDNA ID NO. 559778
  misc_feature: Encodes the peptide sequence at SEQ ID NO 609
atgaacgcttttgagcttcaagagcagtacatcttagaacatccgtccctacactatggtggtcagtcgggtcagaatcagaaggatgataatacacagaaatcttctgatcttgttcatggagatctgactctggagagactgcaggagcttatgcagtccgctgagtctccagctcagactgctgtctccgtcgccgcagccgccacagctcgattgacaacttcgttgctcgatccacagcttatatctgaggctgccatggccgagcagatagctcaggcggctgcgcaagcggcagcatctactgagatgttgattgaatatcctgaacccgagaaggaaccagccacaccagcccccacgacgactgctcatgaagcatcaaccccttggagcggcatgacatacatgtctgacgatattcatggtccagctaccgtgactgaccactcacagagtatgcctcccgtattgaatcggggaggttatcgcatggataccacatccagcccaaatggccctcggcatcgacatagccgtgcgaagttcgattccggtcgacgaagagaagtccaagaggtacggaggatcggtgcatgtattcgctgccgtattcttcggaagacctgttcgaagggtactccgtgcgatacctgcaagaaggtgctgtctcctcgcgtctggcgcactggttgtgtacgaactaagctatcagagtatatcgacctatacactgcaggtatacaagtcgtcattgcacagaaaaggatcaatgtgttcaagacagagtatcacctcgagaacaccggtgtcgtcgtggaagcttcacattttctcgagactggacatagtgtcacattccaggttctgcaaggttatccgaaagcagatgatgatacgaatgacaagactatgtctgaagcccctgtcatctttctcgacagcaataaggaagatgttcctggcaaactcgagggctatatgcgttgtattcttcctgagtatattgctcaggagccttcccaccacgttcgcgtgactctgcaggctgcagatcagatcgcaaaggacacgaacgatgagctcttgaaacgatccctcgagctttggggcattgtggagatgatggaccgcgagcgccagtggacgatgcttgccaagtctcccaatccagatatcgaagactacctgatcaaagacgatgccgaaagcgaggcgtatagtaacatctgtatgcagttcacagcggcagccgagcgcaaagcatctttggccagcaagcatctcctgaatttgattcaacgcagcctacaagatggcaaaaccaagcttggatttccgatgttcctgaccgtgttacttttccttaactgcttggagaagacaacctgggcgttcaaagcatgggaccaagagaatctccgtccgaagtggcccttggatcgagctccaggaagctacacaaatcaaggacatactctcactgaacttctcagaatgttgcttgccattcgtcatgccttgccgaagaccattcaggataaagccgacacgcccattgttgccactgattcagatcctgtcatcaagaagtattaccaggatctaaatgtgactccgcgatatttacgtatgcgatacgaaggcaacaacttcctgcccacggattctcgatcactggagtttctgttctgcgcgccactcttgctaaatattgtacctaacccatcagcgttccacgtgtcgcctcgagagacaccgacgacgccgccgccggacaaccctcagaacgagtctcaagaaatttctcaggacatgcctcaagtgacctcaccaagcgcccgcacaagcgtgcccgttgagcaacccagcgacaacaaacatgaagagttggaccacgaaattccgcagtcgtccttgccgaaggtgtctccgacgactactgaagacttgcaggaaagcactcaggacgtgtctcaagatgcctag

SEQ ID NO: 609 - protein, 663 aa, Muscodor strobelii
  misc_feature: SGI Peptide ID NO. 559778
  misc_feature (4)..(575): NCBI GI: 46136125 Blast Desc: FG09578.1 [Gibberella zeae PH-1]
  misc_feature (4)..(571): NCBI GI: 116196026 Blast Desc: CHGG_04611 [Chaetomium globosum CBS 148.51] gi|88180524|gb|EAQ87992.1| CHGG_04611 [Chaetomium globosum CBS 148.51]
  misc_feature (4)..(575): NCBI GI: 256727015 Blast Desc: [Nectria haematococca mpVI 77-13-4]
  misc_feature (46)..(571): NCBI GI: 145612467 Blast Desc: MGG_07149 [Magnaporthe grisea 70-15] gi|145019624|gb|EDK03852.1| MGG_07149 [Magnaporthe grisea 70-15]
  misc_feature (161)..(571): NCBI GI: 171690598 Blast Desc: protein product [Podospora anserina] gi|170945247|emb|CAP71358.1| protein product [Podospora anserina]
  misc_feature (46)..(539): NCBI GI: 164423825 Blast Desc: NCU07692 [Neurospora crassa OR74A] gi|157070247|gb|EAA33042.2| conserved [Neurospora crassa OR74A]
  misc_feature (4)..(576): NCBI GI: 154309617 Blast Desc: BC1G_07279 [Botryotinia fuckeliana B05.10] gi|150852302|gb|EDN27494.1| BC1G_07279 [Botryotinia fuckeliana B05.10]
  misc_feature (4)..(576): NCBI GI: 156045547 Blast Desc: SS1G_09964 [Sclerotinia sclerotiorum 1980] gi|154694357|gb|EDN94095.1| SS1G_09964 [Sclerotinia sclerotiorum 1980]
  misc_feature (154)..(571): NCBI GI: 261352305 Blast Desc: conserved [Verticillium albo-atrum VaMs.102]
  misc_feature (181)..(570): NCBI GI: 145239423 Blast Desc: An08g02420 [Aspergillus niger] gi|134076869|emb|CAK45278.1| [Aspergillus niger]
MNAFELQEQYILEHPSLHYGGQSGQNQKDDNTQKSSDLVHGDLTLERLQELMQSAESPAQTAVSVAAAATARLTTSLLDPQLISEAAMAEQIAQAAAQAAASTEMLIEYPEPEKEPATPAPTTTAHEASTPWSGMTYMSDDIHGPATVTDHSQSMPPVLNRGGYRMDTTSSPNGPRHRHSRAKFDSGRRREVQEVRRIGACIRCRILRKTCSKGTPCDTCKKVLSPRVWRTGCVRTKLSEYIDLYTAGIQVVIAQKRINVFKTEYHLENTGVVVEASHFLETGHSVTFQVLQGYPKADDDTNDKTMSEAPVIFLDSNKEDVPGKLEGYMRCILPEYIAQEPSHHVRVTLQAADQIAKDTNDELLKRSLELWGIVEMMDRERQWTMLAKSPNPDIEDYLIKDDAESEAYSNICMQFTAAAERKASLASKHLLNLIQRSLQDGKTKLGFPMFLTVLLFLNCLEKTTWAFKAWDQENLRPKWPLDRAPGSYTNQGHTLTELLRMLLAIRHALPKTIQDKADTPIVATDSDPVIKKYYQDLNVTPRYLRMRYEGNNFLPTDSRSLEFLFCAPLLLNIVPNPSAFHVSPRETPTTPPPDNPQNESQEISQDMPQVTSPSARTSVPVEQPSDNKHEELDHEIPQSSLPKVSPTTTEDLQESTQDVSQDA

SEQ ID NO: 610 - DNA, 2358 bp, Muscodor strobelii
  misc_feature: SGI cDNA ID NO. 559779
  misc_feature: Encodes the peptide sequence at SEQ ID NO 611
atgcgtccttacgtgggtttgagcttggcattgagctcttcagtctgccaagtccaagctcaactgtcacaatatgtgctaccttctatgggcgatgccaatggaggaaacacgttccctggtgtatcactcccacttggcgtgacaaaactcgggccagatctatatacgggatctgatagttattccggctatcagcctagtggcaatgtcattggatttagtatgctgcatgaatcaggcacgggaggcgcaccgaagtatggcgttgtctcgcagatgccagctcccggtgacatagacaaccctctaaatcttgcaaatgttacccgaagccaaaacgatgtagcgagccttggatattacaaaacgagccttgccaacggcatctctgtagagttgaccgctacagaaagggccggcttatggtatgtatccaagatcctgtgcgagtcttgtttggaaggcatcatactgattttttgtaatcagtacacgttcccagacaatggaactgtaaatgtcgttgtcgatgtatctcatacactattctcgtaccgaggccaaggcctcggtcagaactatcttggtggtaacatctctgtctcaaaaacagatagtggtttaaaatatgagggagctggttcttacgataatggctggaataaagcaccaaaatggacagtgtatttctgtgggtactttgaccaaaccgctaccttcaagacgttcttgggaaaggacgctactgggactacattggccagttacgacgactcagagagtcagaactcaacagcccgtcttggtgctatcttcacatttgacaacaccaatgttacctcaagggtcggagtttcgttcatctcgtctagccaagcttgtagcaatgtcgacaacgaattgccggagggaactgcttttgatacagtggtagacaatgtccaaacgacatggaatgacaaagttctctcgaaaattacgacgacagatacatccaacactaccaagttgcaaatgttgtactcctcgctgtaccacttccagatgatcccaacgaataagaccagagagaacccgctatggatatcatcagaaccttattacgatgatatcttcacgttctgggatactttccgatgcggcacatccctgttccaagtcattcaacctgctgcgtacgaagagttcatccgatctttgattgacatctggagatgggagggttatatgcccgatgctcgatcctcgttgtggacgggagttactcagggtggttcaaacgctgacacggtccttgctgacgcttacgtcaagggagttcgcggcgctgtggactgggatgagggatttatggccatgatcacggatgctgaagttacaccagacaacaacaacgattccagagatacttcatcttcaacaaaatggggtcgtggcgcattgccagactggcaggagcacggttatatcactaccaagtacggccgttcagtgagtcgtgctattgaatatgccggcaacgactttggtctctatcaagtagctaagggcatgggggccgacatggcagaaacatacctaaaccgctcccgcaactggagaaatcaatggaatccagatctcgaagcactaaacttcaccggtttcctcggacccatcaacgaagccggcgacttccaagaccaagatccattatcctgcggtggatgttactggggcgacgactactacgaagccctccccttcgaatactccttcaacgcacaccacgacttcgcccacctcatcgacctcatgggcggcacagagtccagtatagcccgcctggaagccatgttcacgcccgggttatacgacggaaacgatcaattccataacaccatcaacaacccaggcaacgagccctccttcacaacatcctacctcttcaacttcgtcggccgtcaggatctgagcgtgaagtactcccggcaaatcgcgcgagagttctacgggcccggcgcaagtggcctaccaggtaattccgacgccggcgccatggaatcctggctgttatggaatatgatcggtctatatcccctaactgggcaaaccaccttcctgatccactccccgtggttcagcgacctcactatcgacctagaaaacggcaacaagctcgccatcacggcggaaaatttcgccgaagactcgatttatgtccagagtctgaaggtcaacggtgaagattgggacaaatcctgggtaacttgggacgacgtattcgcgagcggcggaaccatggatttcgtcctgggaaccgagcccaaggactgggctaccggcgatgtcccgccaagtcctgcttcggattaa

SEQ ID NO: 611 - protein, 785 aa, Muscodor strobelii
  misc_feature: SGI Peptide ID NO. 559779
  misc_feature (264)..(770): Pfam Id: PF07971 Pfam Desc: Glycosyl hydrolase family 92
  misc_feature (372)..(770): Pfam Id: PF07971 Pfam Desc: Glycosyl hydrolase family 92
  misc_feature (264)..(347): Pfam Id: PF07971 Pfam Desc: Glycosyl hydrolase family 92
  misc_feature (5)..(784): NCBI GI: 145608138 Blast Desc: MGG_03351 [Magnaporthe grisea 70-15] gi|145015638|gb|EDK00128.1| MGG_03351 [Magnaporthe grisea 70-15]
  misc_feature (5)..(784): NCBI GI: 156062436 Blast Desc: SS1G_01334 [Sclerotinia sclerotiorum 1980] gi|154696670|gb|EDN96408.1| SS1G_01334 [Sclerotinia sclerotiorum 1980]
  misc_feature (5)..(773): NCBI GI: 39971661 Blast Desc: MGG_07146 [Magnaporthe grisea 70-15] gi|145019621|gb|EDK03849.1| MGG_07146 [Magnaporthe grisea 70-15]
  misc_feature (31)..(785): NCBI GI: 261352306 Blast Desc: glycosyl hydrolase [Verticillium albo-atrum VaMs.102]
  misc_feature (7)..(784): NCBI GI: 169786019 Blast Desc: [Aspergillus oryzae RIB40] gi|83776218|dbj|BAE66337.1| protein product [Aspergillus oryzae]
  misc_feature (7)..(784): NCBI GI: 238506951 Blast Desc: alpha-1,2-mannosidase family protein [Aspergillus flavus NRRL3357] gi|220689390|gb|EED45741.1| alpha-1,2-mannosidase family protein [Aspergillus flavus
  misc_feature (22)..(784): NCBI GI: 212532297 Blast Desc: alpha-1,2-mannosidase family protein [Penicillium marneffei ATCC 18224] gi|210071669|gb|EEA25758.1| alpha-1,2-mannosidase family protein [Penicillium marneffei ATCC
  misc_feature (22)..(784): NCBI GI: 119479217 Blast Desc: glycosyl hydrolase, family 92 protein [Neosartorya fischeri NRRL 181] gi|119407791|gb|EAW17740.1| glycosyl hydrolase, family 92 protein [Neosartorya fischeri NRRL 181]
  misc_feature (7)..(784): NCBI GI: 121713464 Blast Desc: glycosyl hydrolase, family 92 protein [Aspergillus clavatus NRRL 1] gi|119402496|gb|EAW12917.1| glycosyl hydrolase, family 92 protein [Aspergillus clavatus NRRL 1]
  misc_feature (9)..(784): NCBI GI: 115401276 Blast Desc: conserved [Aspergillus terreus NIH2624] gi|114190167|gb|EAU31867.1| conserved [Aspergillus terreus NIH2624]
MRPYVGLSLALSSSVCQVQAQLSQYVLPSMGDANGGNTFPGVSLPLGVTKLGPDLYTGSDSYSGYQPSGNVIGFSMLHESGTGGAPKYGVVSQMPAPGDIDNPLNLANVTRSQNDVASLGYYKTSLANGISVELTATERAGLWYVSKILCESCLEGIILIFCNQYTFPDNGTVNVVVDVSHTLFSYRGQGLGQNYLGGNISVSKTDSGLKYEGAGSYDNGWNKAPKWTVYFCGYFDQTATFKTFLGKDATGTTLASYDDSESQNSTARLGAIFTFDNTNVTSRVGVSFISSSQACSNVDNELPEGTAFDTVVDNVQTTWNDKVLSKITTTDTSNTTKLQMLYSSLYHFQMIPTNKTRENPLWISSEPYYDDIFTFWDTFRCGTSLFQVIQPAAYEEFIRSLIDIWRWEGYMPDARSSLWTGVTQGGSNADTVLADAYVKGVRGAVDWDEGFMAMITDAEVTPDNNNDSRDTSSSTKWGRGALPDWQEHGYITTKYGRSVSRAIEYAGNDFGLYQVAKGMGADMAETYLNRSRNWRNQWNPDLEALNFTGFLGPINEAGDFQDQDPLSCGGCYWGDDYYEALPFEYSFNAHHDFAHLIDLMGGTESSIARLEAMFTPGLYDGNDQFHNTINNPGNEPSFTTSYLFNFVGRQDLSVKYSRQIAREFYGPGASGLPGNSDAGAMESWLLWNMIGLYPLTGQTTFLIHSPWFSDLTIDLENGNKLAITAENFAEDSIYVQSLKVNGEDWDKSWVTWDDVFASGGTMDFVLGTEPKDWATGDVPPSPASD

SEQ ID NO: 612 - DNA, 4617 bp, Muscodor strobelii
  misc_feature: SGI EST ID NO. CUFF.1712.0
  misc_feature: Variant of the nucleotide sequence at SEQ ID NO 610
gatcagtacacgttcccagacaatggaactgtaaatgtcgttgtcgatgtatctcatacactattctcgtaccgaggccaaggcctcggtcagaactatcttggtggtaacatctctgtctcaaaaacagatagtggtttaaaatatgagggagctggttcttacgataatggctggaataaagcaccaaaatggacagtgtatttctgtgggtactttgaccaaaccgctaccttcaagacgttcttgggaaaggacgctactgggactacattggccagttacgacgactcagagagtcagaactcaacagcccgtcttggtgctatcttcacatttgacaacaccaatgttacctcaagggtcggagtttcgttcatctcgtctagccaagcttgtagcaatgtcgacaacgaattgccggagggaactgcttttgatacagtggtagacaatgtccaaacgacatggaatgacaaagttctctcgaaaattacgacgacagatacatccaacactaccaagttgcaaatgttgtactcctcgctgtaccacttccagatgatcccaacgaataagaccagagagaacccgctatggatatcatcagaaccttattacgatgatatcttcacgttctgggatactttccgatgcggcacatccctgttccaagtcattcaacctgctgcgtacgaagagttcatccgatctttgattgacatctggagatgggagggttatatgcccgatgctcgatcctcgttgtggacgggagttactcagggtggttcaaacgctgacacggtccttgctgacgcttacgtcaagggagttcgcggcgctgtggactgggatgagggatttatggccatgatcacggatgctgaagttacaccagacaacaacaacgattccagagatacttcatcttcaacaaaatggggtcgtggcgcattgccagactggcaggagcacggttatatcactaccaagtacggccgttcagtgagtcgtgctattgaatatgccggcaacgactttggtctctatcaagtagctaagggcatgggggccgacatggcagaaacatacctaaaccgctcccgcaactggagaaatcaatggaatccagatctcgaagcactaaacttcaccggtttcctcggacccatcaacgaagccggcgacttccaagaccaagatccattatcctgcggtggatgttactggggcgacgactactacgaagccctccccttcgaatactccttcaacgcacaccacgacttcgcccacctcatcgacctcatgggcggcacagagtccagtatagcccgcctggaagccatgttcacgcccgggttatacgacggaaacgatcaattccataacaccatcaacaacccaggcaacgagccctccttcacaacatcctacctcttcaacttcgtcggccgtcaggatctgagcgtgaagtactcccggcaaatcgcgcgagagttctacgggcccggcgcaagtggcctaccaggtaattccgacgccggcgccatggaatcctggctgttatggaatatgatcggtctatatcccctaactgggcaaaccaccttcctgatccactccccgtggttcagcgacctcactatcgacctagaaaacggcaacaagctcgccatcacggcggaaaatttcgccgaagactcgatttatgtccagagtctgaaggtcaacggtgaagattgggacaaatcctgggtaacttgggacgacgtattcgcgagcggcggaaccatggatttcgtcctgggaaccgagcccaaggactgggctaccggcgatgtcccgccaagtcctgcttcggattaatcccgatattgcgaagcatttctgatatagaacgatttcgaatctgtgtatatagctcccgcacttgtacataagttcaaagcgatgcgtctatcaatataccctggcgaattggacaaccgagtagatgcttgtgtaatcatttgcttcaattgtaggcttagaaggaccggaggtaaaatccttatatgaagcagtgccattcatgagaaatatgaattgaatcaccagacaacaccatcgctatgcctagaaaatgtgcgccagcctatctgaatataaacaaaaagccctaagggtgaccagtaccagggtatctaaaaactgagagcgcaagaaaaaaaaggcaaaaaatttcgatggcctacaaccgatcattaccccaaacatttcgaaactcatcttcattgccggtagcgtaaagaggacttgtttcgtctgcagaaggcgactctggatctgacaagtcatcctcctcctccgcctcttctagtagaatctgaggatcagctgtgttgaggaccggagcgcctagtggcccttgactctgttcctcctctgcagcttgcgcagcgggtttcggaggcgagtgttgcgcgtgcacttctctctgcttgcctttttgaatttcggtctccaaccagcctttcttggctggttggttctcaggtgcttccggtctattggagacactcgtctcagacagagaccgctgtgcattccaagtgccgtcgcgtgactggtgaacgcggggctcaggcgaacgccaaatttctcttgacgggatattcgcagtgatgacgggatactggctaagattagcagggcatcgagttgtacatactagtctctactcacattccaatccccaaactccaattctctggccttaccaaacaagttttcgtcgtcggggtctaatgccgtctcagatgtagaaccttctgtgtatttaggcgtcctcgtgctcggccctccgtttccgttcaacaagggcgtatttgcgctcatctcgcctctgacttcctcaggcttgggaatccaatatttggcttctccgccccgcttgtaccgcatgccgtctttgagccgagcgaagcgcgaggctgagtcttcgtgtgcaataaccttgccactggaatcaaagactctgtagctgtatttgtcgccgcggaaggtctccttggaatcctcgatgagatcaacaataccgaatgcatctctcacggcatatttgaccggcattctcgcagaggagacagtgttgtcggcataatcgtgccaggagaaggcataccaatgggctatggcaaaagcaggcatttcgatacagatcaaggcgtcttgaatggcggctgcaagattatcgggcgtgtactcgggaacatcatctgggatagcacccagccagaccaggatagagagaaaaaagccttgccaataagaggcaaaaatgatgagcttgatgcagaggaacttggggacaggccggaaggggatcaaatcatcgtgcatgcagacccagaaaagaccaagcgagtacagactgacggtgacgctgatattgtagatgatgccgctccataagtagcccgaggtgacgccgagatagccctccttatacacgccagtggctttcatgataatggcggcgaaggcgaggatgggcttgagccaagcatactgaaggatgcctctcttgatggcgaggaaagtgtaagggtcggagatgtcaaccttggacaggacgtggttgaggggccacaggtggtggacaggggcacggccgtgggtcatgatgatgagggctcgttcaccatcgacatagttgatgagaagctggaagaaggtatagatggtgaaagccttggtggttcggcgtcagtctggcaccggggtcaaagcaggtcgggtgggatagctacctcgtatatatctctgatggggtcgaggaatgcggcagccgtgagagagaccatgctcacccacgagctgatggagtagatggggaccctgtaaggcaggcgttcagagacagatcgagttaggagtgaagagtgaagaatctaagcgtacatgagcagtatgcggacgacatagcgttggaggagaggttttcgatagttcttgctggggtgggattaatacagctcctcaagcttggaggcacgcgacgtacacttgaaaccatatggaactgcagtcggtgcgttagcaagcgttttctcgtctatgtagcctggggacaccactgacatgatggacaaaaaagtggcagcgagggaaaagacgccggcgacgatggtcgtggcgacggtaaacttctctcccgtgcctccagccatgatttcgacacttgtatactgatccagcagtgggcggtgggtggatcaaatgcgagaggaacaaaggtcagaaagcggcatgatagaagaactcgccgcgaagcagatcaagtcgagctctctggacgtagacaggcagtggaggagtgggttgccgatacagcaagtgtgcaaagctgtctgcctgaatcctgatggtgacgcgggcgacaagtcaagtctgtcggtgatgtgatggcggagggtttgttcccaactccggcagagagagcccctacgactggtcagtggtcacgacccgccgtagcacgctgcattccactacctaggtacctatatgcaatcttagctacccacctcagatattgtggggagctccagcgatttggagacatcttta

SEQ ID NO: 613 - DNA, 1701 bp, Muscodor strobelii
  misc_feature: SGI cDNA ID NO. 559780
  misc_feature: Encodes the peptide sequence at SEQ ID NO 614
atggctggaggcacgggagagaagtttaccgtcgccacgaccatcgtcgccggcgtcttttccctcgctgccacttttttgtccatcatttccatatggtttcaagtcaagaactatcgaaaacctctcctccaacgctatgtcgtccgcatactgctcatggtccccatctactccatcagctcgtgggtgagcatggtctctctcacggctgccgcattcctcgaccccatcagagatatatacgaggctttcaccatctataccttcttccagcttctcatcaactatgtcgatggtgaacgagccctcatcatcatgacccacggccgtgcccctgtccaccacctgtggcccctcaaccacgtcctgtccaaggttgacatctccgacccttacactttcctcgccatcaagagaggcatccttcagtatgcttggctcaagcccatcctcgccttcgccgccattatcatgaaagccactggcgtgtataaggagggctatctcggcgtcacctcgggctacttatggagcggcatcatctacaatatcagcgtcaccgtcagtctgtactcgcttggtcttttctgggtctgcatgcacgatgatttgatccccttccggcctgtccccaagttcctctgcatcaagctcatcatttttgcctcttattggcaaggcttttttctctctatcctggtctggctgggtgctatcccagatgatgttcccgagtacacgcccgataatcttgcagccgccattcaagacgccttgatctgtatcgaaatgcctgcttttgccatagcccattggtatgccttctcctggcacgattatgccgacaacactgtctcctctgcgagaatgccggtcaaatatgccgtgagagatgcattcggtattgttgatctcatcgaggattccaaggagaccttccgcggcgacaaatacagctacagagtctttgattccagtggcaaggttattgcacacgaagactcagcctcgcgcttcgctcggctcaaagacggcatgcggtacaagcggggcggagaagccaaatattggattcccaagcctgaggaagtcagaggcgagatgagcgcaaatacgcccttgttgaacggaaacggagggccgagcacgaggacgcctaaatacacagaaggttctacatctgagacggcattagaccccgacgacgaaaacttgtttggtaaggccagagaattggagtttggggattggaattatcccgtcatcactgcgaatatcccgtcaagagaaatttggcgttcgcctgagccccgcgttcaccagtcacgcgacggcacttggaatgcacagcggtctctgtctgagacgagtgtctccaatagaccggaagcacctgagaaccaaccagccaagaaaggctggttggagaccgaaattcaaaaaggcaagcagagagaagtgcacgcgcaacactcgcctccgaaacccgctgcgcaagctgcagaggaggaacagagtcaagggccactaggcgctccggtcctcaacacagctgatcctcagattctactagaagaggcggaggaggaggatgacttgtcagatccagagtcgccttctgcagacgaaacaagtcctctttacgctaccggcaatgaagatgagtttcgaaatgtttggggtaatgatcggttgtag

SEQ ID NO: 614 - protein, 566 aa, Muscodor strobelii
  misc_feature: SGI Peptide ID NO. 559780
  misc_feature (10)..(293): Pfam Id: PF03619 Pfam Desc: Domain of function
  misc_feature (3)..(564): NCBI GI: 46136121 Blast Desc: FG09576.1 [Gibberella zeae PH-1]
  misc_feature (3)..(564): NCBI GI: 256727014 Blast Desc: [Nectria haematococca mpVI 77-13-4]
  misc_feature (2)..(563): NCBI GI: 242819430 Blast Desc: DUF300 domain protein [Talaromyces stipitatus ATCC 10500] gi|218713783|gb|EED13207.1| DUF300 domain protein [Talaromyces stipitatus ATCC 10500]
  misc_feature (2)..(563): NCBI GI: 212530164 Blast Desc: DUF300 domain protein [Penicillium marneffei ATCC 18224] gi|210074637|gb|EEA28724.1| DUF300 domain protein [Penicillium marneffei ATCC 18224]
  misc_feature (3)..(562): NCBI GI: 171690606 Blast Desc: protein product [Podospora anserina] gi|170945251|emb|CAP71362.1| protein product [Podospora anserina]
  misc_feature (13)..(507): NCBI GI: 226280709 Blast Desc: DUF300 family protein [Paracoccidioides brasiliensis Pb01]
  misc_feature (1)..(426): NCBI GI: 119189969 Blast Desc: CIMG_05032 [Coccidioides immitis RS]
  misc_feature (1)..(511): NCBI GI: 156062454 Blast Desc: SS1G_01343 [Sclerotinia sclerotiorum 1980] gi|154696679|gb|EDN96417.1| SS1G_01343 [Sclerotinia sclerotiorum 1980]
  misc_feature (3)..(562): NCBI GI: 85106985 Blast Desc: NCU07701 [Neurospora crassa OR74A] gi|28923889|gb|EAA33051.1| conserved [Neurospora crassa OR74A]
  misc_feature (1)..(430): NCBI GI: 240111028 Blast Desc: CPC735_068630 [Coccidioides posadasii C735 delta SOWgp]
MAGGTGEKFTVATTIVAGVFSLAATFLSIISIWFQVKNYRKPLLQRYVVRILLMVPIYSISSWVSMVSLTAAAFLDPIRDIYEAFTIYTFFQLLINYVDGERALIIMTHGRAPVHHLWPLNHVLSKVDISDPYTFLAIKRGILQYAWLKPILAFAAIIMKATGVYKEGYLGVTSGYLWSGIIYNISVTVSLYSLGLFWVCMHDDLIPFRPVPKFLCIKLIIFASYWQGFFLSILVWLGAIPDDVPEYTPDNLAAAIQDALICIEMPAFAIAHWYAFSWHDYADNTVSSARMPVKYAVRDAFGIVDLIEDSKETFRGDKYSYRVFDSSGKVIAHEDSASRFARLKDGMRYKRGGEAKYWIPKPEEVRGEMSANTPLLNGNGGPSTRTPKYTEGSTSETALDPDDENLFGKARELEFGDWNYPVITANIPSREIWRSPEPRVHQSRDGTWNAQRSLSETSVSNRPEAPENQPAKKGWLETEIQKGKQREVHAQHSPPKPAAQAAEEEQSQGPLGAPVLNTADPQILLEEAEEEDDLSDPESPSADETSPLYATGNEDEFRNVWGNDRL

SEQ ID NO: 615 - DNA, 3464 bp, Muscodor strobelii
  misc_feature: SGI EST ID NO. CUFF.1713.1
  misc_feature: Variant of the nucleotide sequence at SEQ ID NO 613
aaagatgtctccaaatcgctggagctccccacaatatctgaggtgggtagctaagattgcatataggtacctaggtagtggaatgcagcgtgctacggcgggtcgtgaccactgaccagtcgtaggggctctctctgccggagttgggaacaaaccctccgccatcacatcaccgacagacttgacttgtcgcccgcgtcaccatcaggattcaggcagacagctttgcacacttgctgtatcggcaacccactcctccactgcctgtctacgtccagagagctcgacttgatctgcttcgcggcgagttcttctatcatgccgctttctgacctttgttcctctcgcatttgatccacccaccgcccactgctggatcagtatacaagtgtcgaaatcatggctggaggcacgggagagaagtttaccgtcgccacgaccatcgtcgccggcgtcttttccctcgctgccacttttttgtccatcatttccatatggtttcaagtcaagaactatcgaaaacctctcctccaacgctatgtcgtccgcatactgctcatggtccccatctactccatcagctcgtgggtgagcatggtctctctcacggctgccgcattcctcgaccccatcagagatatatacgaggctttcaccatctataccttcttccagcttctcatcaactatgtcgatggtgaacgagccctcatcatcatgacccacggccgtgcccctgtccaccacctgtggcccctcaaccacgtcctgtccaaggttgacatctccgacccttacactttcctcgccatcaagagaggcatccttcagtatgcttggctcaagcccatcctcgccttcgccgccattatcatgaaagccactggcgtgtataaggagggctatctcggcgtcacctcgggctacttatggagcggcatcatctacaatatcagcgtcaccgtcagtctgtactcgcttggtcttttctgggtctgcatgcacgatgatttgatccccttccggcctgtccccaagttcctctgcatcaagctcatcatttttgcctcttattggcaaggcttttttctctctatcctggtctggctgggtgctatcccagatgatgttcccgagtacacgcccgataatcttgcagccgccattcaagacgccttgatctgtatcgaaatgcctgcttttgccatagcccattggtatgccttctcctggcacgattatgccgacaacactgtctcctctgcgagaatgccggtcaaatatgccgtgagagatgcattcggtattgttgatctcatcgaggattccaaggagaccttccgcggcgacaaatacagctacagagtctttgattccagtggcaaggttattgcacacgaagactcagcctcgcgcttcgctcggctcaaagacggcatgcggtacaagcggggcggagaagccaaatattggattcccaagcctgaggaagtcagaggcgagatgagcgcaaatacgcccttgttgaacggaaacggagggccgagcacgaggacgcctaaatacacagaaggttctacatctgagacggcattagaccccgacgacgaaaacttgtttggtaaggccagagaattggagtttggggattggaattatcccgtcatcactgcgaatatcccgtcaagagaaatttggcgttcgcctgagccccgcgttcaccagtcacgcgacggcacttggaatgcacagcggtctctgtctgagacgagtgtctccaatagaccggaagcacctgagaaccaaccagccaagaaaggctggttggagaccgaaattcaaaaaggcaagcagagagaagtgcacgcgcaacactcgcctccgaaacccgctgcgcaagctgcagaggaggaacagagtcaagggccactaggcgctccggtcctcaacacagctgatcctcagattctactagaagaggcggaggaggaggatgacttgtcagatccagagtcgccttctgcagacgaaacaagtcctctttacgctaccggcaatgaagatgagtttcgaaatgtttggggtaatgatcggttgtaggccatcgaaattttttgccttttttttcttgcgctctcagtttttagataccctggtactggtcacccttagggctttttgtttatattcagataggctggcgcacattttctaggcatagcgatggtgttgtctggtgattcaattcatatttctcatgaatggcactgcttcatataaggattttacctccggtccttctaagcctacaattgaagcaaatgattacacaagcatctactcggttgtccaattcgccagggtatattgatagacgcatcgctttgaacttatgtacaagtgcgggagctatatacacagattcgaaatcgttctatatcagaaatgcttcgcaatatcgggattaatccgaagcaggacttggcgggacatcgccggtagcccagtccttgggctcggttcccaggacgaaatccatggttccgccgctcgcgaatacgtcgtcccaagttacccaggatttgtcccaatcttcaccgttgaccttcagactctggacataaatcgagtcttcggcgaaattttccgccgtgatggcgagcttgttgccgttttctaggtcgatagtgaggtcgctgaaccacggggagtggatcaggaaggtggtttgcccagttaggggatatagaccgatcatattccataacagccaggattccatggcgccggcgtcggaattacctggtaggccacttgcgccgggcccgtagaactctcgcgcgatttgccgggagtacttcacgctcagatcctgacggccgacgaagttgaagaggtaggatgttgtgaaggagggctcgttgcctgggttgttgatggtgttatggaattgatcgtttccgtcgtataacccgggcgtgaacatggcttccaggcgggctatactggactctgtgccgcccatgaggtcgatgaggtgggcgaagtcgtggtgtgcgttgaaggagtattcgaaggggagggcttcgtagtagtcgtcgccccagtaacatccaccgcaggataatggatcttggtcttggaagtcgccggcttcgttgatgggtccgaggaaaccggtgaagtttagtgcttcctgggagatatcagggaattgagttttaagggttgggatgaatatttgggattgaattgagtttggagatggtttgaggctgcacatacgagatctggattccattgatttctccagttgcgggagcggtttaggtatgtttctgccatgtcggcccccatgcccttagctacttgatagagaccaaagtcgttgccggcactaggttggcacttggtcagtatctcacgctaataagtaatacggagaaacaaagaaacaatgggca

SEQ ID NO: 616 - DNA, 1710 bp, Muscodor strobelii
  misc_feature: SGI cDNA ID NO. 559781
  misc_feature: Encodes the peptide sequence at SEQ ID NO 617
atggctggaggcacgggagagaagtttaccgtcgccacgaccatcgtcgccggcgtcttttccctcgctgccacttttttgtccatcatgtcagtggtttccatatggtttcaagtcaagaactatcgaaaacctctcctccaacgctatgtcgtccgcatactgctcatggtccccatctactccatcagctcgtgggtgagcatggtctctctcacggctgccgcattcctcgaccccatcagagatatatacgaggctttcaccatctataccttcttccagcttctcatcaactatgtcgatggtgaacgagccctcatcatcatgacccacggccgtgcccctgtccaccacctgtggcccctcaaccacgtcctgtccaaggttgacatctccgacccttacactttcctcgccatcaagagaggcatccttcagtatgcttggctcaagcccatcctcgccttcgccgccattatcatgaaagccactggcgtgtataaggagggctatctcggcgtcacctcgggctacttatggagcggcatcatctacaatatcagcgtcaccgtcagtctgtactcgcttggtcttttctgggtctgcatgcacgatgatttgatccccttccggcctgtccccaagttcctctgcatcaagctcatcatttttgcctcttattggcaaggcttttttctctctatcctggtctggctgggtgctatcccagatgatgttcccgagtacacgcccgataatcttgcagccgccattcaagacgccttgatctgtatcgaaatgcctgcttttgccatagcccattggtatgccttctcctggcacgattatgccgacaacactgtctcctctgcgagaatgccggtcaaatatgccgtgagagatgcattcggtattgttgatctcatcgaggattccaaggagaccttccgcggcgacaaatacagctacagagtctttgattccagtggcaaggttattgcacacgaagactcagcctcgcgcttcgctcggctcaaagacggcatgcggtacaagcggggcggagaagccaaatattggattcccaagcctgaggaagtcagaggcgagatgagcgcaaatacgcccttgttgaacggaaacggagggccgagcacgaggacgcctaaatacacagaaggttctacatctgagacggcattagaccccgacgacgaaaacttgtttggtaaggccagagaattggagtttggggattggaattatcccgtcatcactgcgaatatcccgtcaagagaaatttggcgttcgcctgagccccgcgttcaccagtcacgcgacggcacttggaatgcacagcggtctctgtctgagacgagtgtctccaatagaccggaagcacctgagaaccaaccagccaagaaaggctggttggagaccgaaattcaaaaaggcaagcagagagaagtgcacgcgcaacactcgcctccgaaacccgctgcgcaagctgcagaggaggaacagagtcaagggccactaggcgctccggtcctcaacacagctgatcctcagattctactagaagaggcggaggaggaggatgacttgtcagatccagagtcgccttctgcagacgaaacaagtcctctttacgctaccggcaatgaagatgagtttcgaaatgtttggggtaatgatcggttgtag

SEQ ID NO: 617 - protein, 569 aa, Muscodor strobelii
  misc_feature: SGI Peptide ID NO. 559781
  misc_feature (10)..(296): Pfam Id: PF03619 Pfam Desc: Domain of function
  misc_feature (3)..(567): NCBI GI: 46136121 Blast Desc: FG09576.1 [Gibberella zeae PH-1]
  misc_feature (3)..(567): NCBI GI: 256727014 Blast Desc: [Nectria haematococca mpVI 77-13-4]
  misc_feature (2)..(566): NCBI GI: 242819430 Blast Desc: DUF300 domain protein [Talaromyces stipitatus ATCC 10500] gi|218713783|gb|EED13207.1| DUF300 domain protein [Talaromyces stipitatus ATCC 10500]
  misc_feature (2)..(566): NCBI GI: 212530164 Blast Desc: DUF300 domain protein [Penicillium marneffei ATCC 18224] gi|210074637|gb|EEA28724.1| DUF300 domain protein [Penicillium marneffei ATCC 18224]
  misc_feature (3)..(565): NCBI GI: 171690606 Blast Desc: protein product [Podospora anserina] gi|170945251|emb|CAP71362.1| protein product [Podospora anserina]
  misc_feature (13)..(510): NCBI GI: 226280709 Blast Desc: DUF300 family protein [Paracoccidioides brasiliensis Pb01]
  misc_feature (1)..(433): NCBI GI: 119189969 Blast Desc: CIMG_05032 [Coccidioides immitis RS]
  misc_feature (1)..(514): NCBI GI: 156062454 Blast Desc: SS1G_01343 [Sclerotinia sclerotiorum 1980] gi|154696679|gb|EDN96417.1| SS1G_01343 [Sclerotinia sclerotiorum 1980]
  misc_feature (1)..(433): NCBI GI: 240111028 Blast Desc: CPC735_068630 [Coccidioides posadasii C735 delta SOWgp]
  misc_feature (3)..(565): NCBI GI: 85106985 Blast Desc: NCU07701 [Neurospora crassa OR74A] gi|28923889|gb|EAA33051.1| conserved [Neurospora crassa OR74A]
MAGGTGEKFTVATTIVAGVFSLAATFLSIMSVVSIWFQVKNYRKPLLQRYVVRILLMVPIYSISSWVSMVSLTAAAFLDPIRDIYEAFTIYTFFQLLINYVDGERALIIMTHGRAPVHHLWPLNHVLSKVDISDPYTFLAIKRGILQYAWLKPILAFAAIIMKATGVYKEGYLGVTSGYLWSGIIYNISVTVSLYSLGLFWVCMHDDLIPFRPVPKFLCIKLIIFASYWQGFFLSILVWLGAIPDDVPEYTPDNLAAAIQDALICIEMPAFAIAHWYAFSWHDYADNTVSSARMPVKYAVRDAFGIVDLIEDSKETFRGDKYSYRVFDSSGKVIAHEDSASRFARLKDGMRYKRGGEAKYWIPKPEEVRGEMSANTPLLNGNGGPSTRTPKYTEGSTSETALDPDDENLFGKARELEFGDWNYPVITANIPSREIWRSPEPRVHQSRDGTWNAQRSLSETSVSNRPEAPENQPAKKGWLETEIQKGKQREVHAQHSPPKPAAQAAEEEQSQGPLGAPVLNTADPQILLEEAEEEDDLSDPESPSADETSPLYATGNEDEFRNVWGNDRL

SEQ ID NO: 618 - DNA, 3464 bp, Muscodor strobelii; identical to SEQ ID NO: 615
  misc_feature: SGI EST ID NO. CUFF.1713.1
  misc_feature: Variant of the nucleotide sequence at SEQ ID NO 616

SEQ ID NO: 619 - DNA, 5853 bp, Muscodor strobelii
  misc_feature: SGI cDNA ID NO. 559782
  misc_feature: Encodes the peptide sequence at SEQ ID NO 620
atggctttcactagccaattttttgcgccatactttccattggaagcggttcggccggacctgaaagacgcagccaaacctcaaaccgaagcatataaaacaaatgggatgcccgatgtctcatctttcggactcgaggatattgatcccgaccaattctctcaagactatgcccagcaaaccttgctcttcgagatgcctacgggcgtcactactgttctcaatgacgcgtcgctccgttgcctaggagctttaatgcggacgtttcaaccaaccgaggcagacgatatactggacacacttcaaatgggtgcgatttctgacatttttggtatccaaaaacaggaaaaactacacggctcaatcacagatgtcgttgttcgactaccgcgagccagcatcagctttctcaacgagtgtgatactgatgccggttctcagacacaagaaatcgatcatttcaaggtctccatggaagatcttgtatttgctctccggacggaaaagcgtggtggcttggcccaaatcgacgcagaccatcaatcaccgccacgaccatcatttcacttccgcctcaactcactcgacgtgaccattgctgaaagtgcttctgcagtgggaagcacaaaatcaacagcactggtcagtatcgaaaaagtgatgtcatctatgggatcaaaagagattagctatacagatgctgatgtgggggcaattcatatcaaatcttcatcaacccgagttgagcatcttgctaggtttgcacaacgaacgaaagagctcgtgtctgaactagaagatattttcaccaagccatcggcagcagcagacgaacgtttgaaatacttcacacatcgcatcatcaccgaagggcagcaagcaagtgacccatctttcgtcatccggccctctgctattctcagagctgcgaccaggcacctgaggacatatgattcatggaagctcataacccgcttacgctacatgtggacaactttagggccgcaaaagcaagaaaatctgatgcgagaatgcctgagccattctatgcaagttccgaaagatgtgcggaatcaagttgtggctgcttttgatcgctggagaagttgggatctggaagatactggtcatgcggtgcttctagacaatatttttggcaagagtccaagtgtgaacattgagtccgaacatgttccatggatggtagtctgcagagtgcgtaagatcgagattagtctcgatagagggccgaaaaataacaacgtcctgatatacgatatcactgcgaggattcacgacaaacaagttcgcgaacacgattccgatcaaaaagtcatgattgatggtcctctaacgattgtcaatgtctattgcgggcagttcgcgatgaatctaaactgggagctctgcgagctcttggatcgtgtctcttctctatatcctactgcaagtcctcaaaatccgccacaggttgaagatcctgtcgtgaaatatgagctacaggacagtggtcgaccaccgcgttcaattcatttcgtattagtcactgcacagggaagcatatcacttgatagcatcaatctgagtatcaaaccccactgcaataatctaaggttgtcagtgttgagccgatctgtgggacacggcgaaatggacaccaatatcacgctcaattgcgatgctgcagaactcaatgctctcagccacgcacagactctggcaagtcttcatcttacaaaaccaagtgtcatcgtgacgcacgaggtgctgtctgtcaaccagacgcctggtcatataatcagagcagcagccagcagtcacaaccttgcaatcaacatcaaacaagatcccctcgttcttgctgaagtggtggatctattagtcaaagatgaggctgctcagcttcatgagttacaacaaaaaatacagaggcgtcagccagaccagcaaaattatcagcccatgaaacgccaatttggcaccttgtccctcgatctggctacgtttttggactcttatacagttacagtacctcttctacgctctttgacatatcatatcaagggcactgtagcacgcgcaactttagccgctatcacgaacaaacagatcatctttgactttgatgtgaaagaaaactcgcatgatattaaagtccgatccagcaaggcatctcgaagcatttctttgctccaaattcctcccatcaatggccgagtcacggctcaaacgacaagcaaagagacttcggtcaatgtcttcgcttctcttgaacttgtgcaactcgatgcatccgcggtgtacagcttgcttagcgccttgaaccggcccgaaatttccaatgcgatcaacgatcttcagcagcaagtcaaggtcattcaggagcatgtcgatagtgtgttcggctcggccaatacgagtgtagtatctacatcggaggtcaaagagtcggttttcacatataacgtccatgcaactatggctggtattaagatttccggccatgcgcccatcaaatcgaacacagaaacgaaggcgcttctatccttctgtcttgatcgaatacattttcaagttgcaaacaaagttgatgggacaccggtgcttgacaaccctgaagtccacctcaacattcgcaagattagtttcgatgttatgaaaggttccgacgcgggcatgaggtcgtgtggtaatctcgcttttggcgtcttggtcactgcttccacacgaactatagacggcggaacagaatcgagatgtttcgatttcaaatcagatggattcatagtcaatctttcgtcggatactatctctaccttcgtagatgtcctcgggtatatgggagataagttcaagggcctcgacacctcaagagagcttgaatacttgcgcaagttacggcagtccaaaccgcgtatagcaatcaatgacgaggcgcccgaagttgagaccgacatattcgactcattcctcgcctccatcatgtattctctagagattcgcgacattcaaatcggctggcttgttgcaagtgctgcaggccaacctctagcaggccaggaggacttgttcctatctgtcaagatgatagagttcgcgtctcgaaagaagaactcagcgagattaactattgaagatttccaactccagatggtaccccctgatgaaataaagacgcaacgttcgcaaaattcagcgctgttaccagaaatggtcttcaacgtggcatttgtatcaactccaaatgcacgccgcctagcattccaagcggtaggaaaatccttggacgtttgtctgacatctgccttcattattcccacggcccatttaaaagattccatcaccttatcaatcggaaacgttcaacgagcatcgcagcattggagaccaattgccaccagcgacagtcaagaggataagcatgagaagaacaaccaggtgaaggaagaccccactccgaggtccacactattcggcaacaagcgtcttgaatcgatcctcgtcgacgcagactttgctggtgctgttgtgcacctatccgggagaagagccgacgatgacgatactgatgccaagacatcgaaatacaaccgtcctgcaatgactgggaaatatggccagttcagcgccgatgagaccggaagcaacattgcactacgtacacccggtctggcttggaagacagagtatagagatgatggccaagataacgcgactctgcatggagaagtcaaaatcgaaccctcccgcaacgtgctttttccctctgttgttcctcttgtcatggaaatatcttcaagcatcaaagaagccgttagcaacacttcctccaaaccagcagttcctgttgaaaaagtgcctccgaagcaaaagacaaccgaagaggaaaatgagaatatccttacagccgatcctagcaccgtcttggggcatctcaaactcaacttaggtctccgtatctgcaagcaggagtttacaatgagctgtcagccaataggcagagttgccgctacggcgcgatttgacgacatttatctcactatgaacaccgtccactctaaggaccatggcaacttctttgccatttctggtatattaagcaacatgaatttggctgtgcagcatgtttactctcgggagtcgaccggaagcttccacgtcgactctgttgtcatctcattgatgaacagtaaacatgtgagtggcaccactggtctctcggccatcacaaagatgagtccaatgaaggttacaatcaatgcgaaacaagtacatgactttctcctctttcgcgagatttggctaccaagagagatccgacaagcttctgcggcgcccgtgcctgaaactactgcagaaaatgcggcccaggcccatctcgtacagagatatcagcaagtagcagccaccgcggcatttccatggacagtaactatttccatcagcgcgctagatgttgcagtcgacctcggtcagtccctgggcagacctgagtttatgatcaagaatttctgggtatcgtcgaagaagacgtcggactgggagcagaatctgtgcttgggattcgaagaaattggcatagactgcgatgctcgaatgagcgggttcgtcacgctccaaaactttcagctacgcacctctatagaatggccggcacggaaacaagctctaaacgagacacccagggttcaagcatccatcagcttcagtcaattcaagatgaaagccgccttcgattaccaagccttttttgtggcagacatcacgtctatgcaattcttgatgtataatgttcgacaacacaaaggagctaccggtgatcgtttagtagctatttttgatggcgaagccgtccaagtcttcggcatcactgggtctgcggcccagggcgcagcattatggaaggcaatacaaaaattcatacaggagcgtaaggcaaattacgagacatcacttcgagatattgagaagtatatgaaacgaagatccattgtcgctcatccgagcccacaagcagtgcgacctagcaagtcgaacctagacagcaaaggcagcaagtctcttatatctcttgatactgatgttgtagtaactctaagagcactgaatctcggggttttcccaagcagtttctctgaccatcaggtgttcaagctggaggctctcaatgcacgtgcacgattcgcagcaagtatggaagaccagcgtatacacagcattctggggcttacccttggccaattacggatcggtctcgcgagcgttagaggacctgaaacgcctaggctcgttaaagatattgaggttgagcacgtagtacggaacgcaacgggctcacgcggcggtacaatcctcaaagtgcccaaagtggaagccgtcatggagacatggcaacggcacaaatctcgggtcataacatacaagttcaagagtaccttcgaaggcaaggtagaagtggggtggaactactcacgcattagttatatccgcggtatgtgggctaatcactcgaaaatgctggccgcggtctggggccgtgaaatcccggccatgtcggcgatcaaagtcacgggcgtaccggaaccggaacaagaacaaaaagcaggggaacagcagaagattacggcggaagtcaatgtcccacagagtaaatatgaatatgagccgctggagcccccgatcattgagaccccgcagctcagggatatgggagaggcgacgccacctctagaatggatcggtttgcatcgagacagattaccgaatctgacgcatcagattgtcattgtgtccctcctggaactagcgggcgaggttgaggatgcgtatgccaaaattttaggaagttcgtga

SEQ ID NO: 620 - protein, 1950 aa, Muscodor strobelii
  misc_feature: SGI Peptide ID NO. 559782
  misc_feature (1)..(1950): NCBI GI: 116196052 Blast Desc: CHGG_04624 [Chaetomium globosum CBS 148.51] gi|88180537|gb|EAQ88005.1| CHGG_04624 [Chaetomium globosum CBS 148.51]
  misc_feature (1)..(1950): NCBI GI: 256727589 Blast Desc: [Nectria haematococca mpVI 77-13-4]
  misc_feature (1)..(1950): NCBI GI: 46136119 Blast Desc: FG09575.1 [Gibberella zeae PH-1]
  misc_feature (1)..(1950): NCBI GI: 39952197 Blast Desc: MGG_01741 [Magnaporthe grisea 70-15] gi|145020409|gb|EDK04538.1| MGG_01741 [Magnaporthe grisea 70-15]
  misc_feature (1)..(1950): NCBI GI: 85106989 Blast Desc: NCU07702 [Neurospora crassa OR74A] gi|28923890|gb|EAA33052.1| conserved [Neurospora crassa OR74A]
  misc_feature (1)..(1950): NCBI GI: 171690604 Blast Desc: protein product [Podospora anserina] gi|170945250|emb|CAP71361.1| protein product [Podospora anserina]
  misc_feature (1)..(1950): NCBI GI: 154302099 Blast Desc: BC1G_09730 [Botryotinia fuckeliana B05.10] gi|150855504|gb|EDN30696.1| BC1G_09730 [Botryotinia fuckeliana B05.10]
  misc_feature (1)..(1950): NCBI GI: 156062452 Blast Desc: SS1G_01342 [Sclerotinia sclerotiorum 1980] gi|154696678|gb|EDN96416.1| SS1G_01342 [Sclerotinia sclerotiorum 1980]
  misc_feature (2)..(1950): NCBI GI: 239615454 Blast Desc: fermentation associated protein [Ajellomyces dermatitidis ER-3]
  misc_feature (2)..(1950): NCBI GI: 261199364 Blast Desc: fermentation associated protein [Ajellomyces dermatitidis SLH14081] gi|239594291|gb|EEQ76872.1| fermentation associated protein [Ajellomyces dermatitidis SLH14081]
MAFTSQFFAPYFPLEAVRPDLKDAAKPQTEAYKTNGMPDVSSFGLEDIDPDQFSQDYAQQTLLFEMPTGVTTVLNDASLRCLGALMRTFQPTEADDILDTLQMGAISDIFGIQKQEKLHGSITDVVVRLPRASISFLNECDTDAGSQTQEIDHFKVSMEDLVFALRTEKRGGLAQIDADHQSPPRPSFHFRLNSLDVTIAESASAVGSTKSTALVSIEKVMSSMGSKEISYTDADVGAIHIKSSSTRVEHLARFAQRTKELVSELEDIFTKPSAAADERLKYFTHRIITEGQQASDPSFVIRPSAILRAATRHLRTYDSWKLITRLRYMWTTLGPQKQENLMRECLSHSMQVPKDVRNQVVAAFDRWRSWDLEDTGHAVLLDNIFGKSPSVNIESEHVPWMVVCRVRKIEISLDRGPKNNNVLIYDITARIHDKQVREHDSDQKVMIDGPLTIVNVYCGQFAMNLNWELCELLDRVSSLYPTASPQNPPQVEDPVVKYELQDSGRPPRSIHFVLVTAQGSISLDSINLSIKPHCNNLRLSVLSRSVGHGEMDTNITLNCDAAELNALSHAQTLASLHLTKPSVIVTHEVLSVNQTPGHIIRAAASSHNLAINIKQDPLVLAEVVDLLVKDEAAQLHELQQKIQRRQPDQQNYQPMKRQFGTLSLDLATFLDSYTVTVPLLRSLTYHIKGTVARATLAAITNKQIIFDFDVKENSHDIKVRSSKASRSISLLQIPPINGRVTAQTTSKETSVNVFASLELVQLDASAVYSLLSALNRPEISNAINDLQQQVKVIQEHVDSVFGSANTSVVSTSEVKESVFTYNVHATMAGIKISGHAPIKSNTETKALLSFCLDRIHFQVANKVDGTPVLDNPEVHLNIRKISFDVMKGSDAGMRSCGNLAFGVLVTASTRTIDGGTESRCFDFKSDGFIVNLSSDTISTFVDVLGYMGDKFKGLDTSRELEYLRKLRQSKPRIAINDEAPEVETDIFDSFLASIMYSLEIRDIQIGWLVASAAGQPLAGQEDLFLSVKMIEFASRKKNSARLTIEDFQLQMVPPDEIKTQRSQNSALLPEMVFNVAFVSTPNARRLAFQAVGKSLDVCLTSAFIIPTAHLKDSITLSIGNVQRASQHWRPIATSDSQEDKHEKNNQVKEDPTPRSTLFGNKRLESILVDADFAGAVVHLSGRRADDDDTDAKTSKYNRPAMTGKYGQFSADETGSNIALRTPGLAWKTEYRDDGQDNATLHGEVKIEPSRNVLFPSVVPLVMEISSSIKEAVSNTSSKPAVPVEKVPPKQKTTEEENENILTADPSTVLGHLKLNLGLRICKQEFTMSCQPIGRVAATARFDDIYLTMNTVHSKDHGNFFAISGILSNMNLAVQHVYSRESTGSFHVDSVVISLMNSKHVSGTTGLSAITKMSPMKVTINAKQVHDFLLFREIWLPREIRQASAAPVPETTAENAAQAHLVQRYQQVAATAAFPWTVTISISALDVAVDLGQSLGRPEFMIKNFWVSSKKTSDWEQNLCLGFEEIGIDCDARMSGFVTLQNFQLRTSIEWPARKQALNETPRVQASISFSQFKMKAAFDYQAFFVADITSMQFLMYNVRQHKGATGDRLVAIFDGEAVQVFGITGSAAQGAALWKAIQKFIQERKANYETSLRDIEKYMKRRSIVAHPSPQAVRPSKSNLDSKGSKSLISLDTDVVVTLRALNLGVFPSSFSDHQVFKLEALNARARFAASMEDQRIHSILGLTLGQLRIGLASVRGPETPRLVKDIEVEHVVRNATGSRGGTILKVPKVEAVMETWQRHKSRVITYKFKSTFEGKVEVGWNYSRISYIRGMWANHSKMLAAVWGREIPAMSAIKVTGVPEPEQEQKAGEQQKITAEVNVPQSKYEYEPLEPPIIETPQLRDMGEATPPLEWIGLHRDRLPNLTHQIVIVSLLELAGEVEDAYAKILGSS

SEQ ID NO: 621 - DNA, 6154 bp, Muscodor strobelii
  misc_feature: SGI EST ID NO. CUFF.1703.0
  misc_feature: Variant of the nucleotide sequence at SEQ ID NO 619
tttcaaccaaccgaggcagacgatatactggacacacttcaaatgggtgcgatttctgacatttttggtatccaaaaacaggaaaaactacacggctcaatcacagatgtcgttgttcgactaccgcgagccagcatcagctttctcaacgagtgtgatactgatgccggttctcagacacaagaaatcgatcatttcaaggtctccatggaagatcttgtatttgctctccggacggaaaagcgtggtggcttggcccaaatcgacgcagaccatcaatcaccgccacgaccatcatttcacttccgcctcaactcactcgacgtgaccattgctgaaagtgcttctgcagtgggaagcacaaaatcaacagcactggtcagtatcgaaaaagtgatgtcatctatgggatcaaaagagattagctatacagatgctgatgtgggggcaattcatatcaaatcttcatcaacccgagttgagcatcttgctaggtttgcacaacgaacgaaagagctcgtgtctgaactagaagatattttcaccaagccatcggcagcagcagacgaacgtttgaaatacttcacacatcgcatcatcaccgaagggcagcaagcaagtgacccatctttcgtcatccggccctctgctattctcagagctgcgaccaggcacctgaggacatatgattcatggaagctcataacccgcttacgctacatgtggacaactttagggccgcaaaagcaagaaaatctgatgcgagaatgcctgagccattctatgcaagttccgaaagatgtgcggaatcaagttgtggctgcttttgatcgctggagaagttgggatctggaagatactggtcatgcggtgcttctagacaatatttttggcaagagtccaagtgtgaacattgagtccgaacatgttccatggatggtagtctgcagagtgcgtaagatcgagattagtctcgatagagggccgaaaaataacaacgtcctgatatacgatatcactgcgaggattcacgacaaacaagttcgcgaacacgattccgatcaaaaagtcatgattgatggtcctctaacgattgtcaatgtctattgcgggcagttcgcgatgaatctaaactgggagctctgcgagctcttggatcgtgtctcttctctatatcctactgcaagtcctcaaaatccgccacaggttgaagatcctgtcgtgaaatatgagctacaggacagtggtcgaccaccgcgttcaattcatttcgtattagtcactgcacagggaagcatatcacttgatagcatcaatctgagtatcaaaccccactgcaataatctaaggttgtcagtgttgagccgatctgtgggacacggcgaaatggacaccaatatcacgctcaattgcgatgctgcagaactcaatgctctcagccacgcacagactctggcaagtcttcatcttacaaaaccaagtgtcatcgtgacgcacgaggtgctgtctgtcaaccagacgcctggtcatataatcagagcagcagccagcagtcacaaccttgcaatcaacatcaaacaagatcccctcgttcttgctgaagtggtggatctattagtcaaagatgaggctgctcagcttcatgagttacaacaaaaaatacagaggcgtcagccagaccagcaaaattatcagcccatgaaacgccaatttggcaccttgtccctcgatctggctacgtttttggactcttatacagttacagtacctcttctacgctctttgacatatcatatcaagggcactgtagcacgcgcaactttagccgctatcacgaacaaacagatcatctttgactttgatgtgaaagaaaactcgcatgatattaaagtccgatccagcaaggcatctcgaagcatttctttgctccaaattcctcccatcaatggccgagtcacggctcaaacgacaagcaaagagacttcggtcaatgtcttcgcttctcttgaacttgtgcaactcgatgcatccgcggtgtacagcttgcttagcgccttgaaccggcccgaaatttccaatgcgatcaacgatcttcagcagcaagtcaaggtcattcaggagcatgtcgatagtgtgttcggctcggccaatacgagtgtagtatctacatcggaggtcaaagagtcggttttcacatataacgtccatgcaactatggctggtattaagatttccggccatgcgcccatcaaatcgaacacagaaacgaaggcgcttctatccttctgtcttgatcgaatacattttcaagttgcaaacaaagttgatgggacaccggtgcttgacaaccctgaagtccacctcaacattcgcaagattagtttcgatgttatgaaaggttccgacgcgggcatgaggtcgtgtggtaatctcgcttttggcgtcttggtcactgcttccacacgaactatagacggcggaacagaatcgagatgtttcgatttcaaatcagatggattcatagtcaatctttcgtcggatactatctctaccttcgtagatgtcctcgggtatatgggagataagttcaagggcctcgacacctcaagagagcttgaatacttgcgcaagttacggcagtccaaaccgcgtatagcaatcaatgacgaggcgcccgaagttgagaccgacatattcgactcattcctcgcctccatcatgtattctctagagattcgcgacattcaaatcggctggcttgttgcaagtgctgcaggccaacctctagcaggccaggaggacttgttcctatctgtcaagatgatagagttcgcgtctcgaaagaagaactcagcgagattaactattgaagatttccaactccagatggtaccccctgatgaaataaagacgcaacgttcgcaaaattcagcgctgttaccagaaatggtcttcaacgtggcatttgtatcaactccaaatgcacgccgcctagcattccaagcggtaggaaaatccttggacgtttgtctgacatctgccttcattattcccacggcccatttaaaagattccatcaccttatcaatcggaaacgttcaacgagcatcgcagcattggagaccaattgccaccagcgacagtcaagaggataagcatgagaagaacaaccaggtgaaggaagaccccactccgaggtccacactattcggcaacaagcgtcttgaatcgatcctcgtcgacgcagactttgctggtgctgttgtgcacctatccgggagaagagccgacgatgacgatactgatgccaagacatcgaaatacaaccgtcctgcaatgactgggaaatatggccagttcagcgccgatgagaccggaagcaacattgcactacgtacacccggtctggcttggaagacagagtatagagatgatggccaagataacgcgactctgcatggagaagtcaaaatcgaaccctcccgcaacgtgctttttccctctgttgttcctcttgtcatggaaatatcttcaagcatcaaagaagccgttagcaacacttcctccaaaccagcagttcctgttgaaaaagtgcctccgaagcaaaagacaaccgaagaggaaaatgagaatatccttacagccgatcctagcaccgtcttggggcatctcaaactcaacttaggtctccgtatctgcaagcaggagtttacaatgagctgtcagccaataggcagagttgccgctacggcgcgatttgacgacatttatctcactatgaacaccgtccactctaaggaccatggcaacttctttgccatttctggtatattaagcaacatgaatttggctgtgcagcatgtttactctcgggagtcgaccggaagcttccacgtcgactctgttgtcatctcattgatgaacagtaaacatgtgagtggcaccactggtctctcggccatcacaaagatgagtccaatgaaggttacaatcaatgcgaaacaagtacatgactttctcctctttcgcgagatttggctaccaagagagatccgacaagcttctgcggcgcccgtgcctgaaactactgcagaaaatgcggcccaggcccatctcgtacagagatatcagcaagtagcagccaccgcggcatttccatggacagtaactatttccatcagcgcgctagatgttgcagtcgacctcggtcagtccctgggcagacctgagtttatgatcaagaatttctgggtatcgtcgaagaagacgtcggactgggagcagaatctgtgcttgggattcgaagaaattggcatagactgcgatgctcgaatgagcgggttcgtcacgctccaaaactttcagctacgcacctctatagaatggccggcacggaaacaagctctaaacgagacacccagggttcaagcatccatcagcttcagtcaattcaagatgaaagccgccttcgattaccaagccttttttgtggcagacatcacgtctatgcaattcttgatgtataatgttcgacaacacaaaggagctaccggtgatcgtttagtagctatttttgatggcgaagccgtccaagtcttcggcatcactgggtctgcggcccagggcgcagcattatggaaggcaatacaaaaattcatacaggagcgtaaggcaaattacgagacatcacttcgagatattgagaagtatatgaaacgaagatccattgtcgctcatccgagcccacaagcagtgcgacctagcaagtcgaacctagacagcaaaggcagcaagtctcttatatctcttgatactgatgttgtagtaactctaagagcactgaatctcggggttttcccaagcagtttctctgaccatcaggtgttcaagctggaggctctcaatgcacgtgcacgattcgcagcaagtatggaagaccagcgtatacacagcattctggggcttacccttggccaattacggatcggtctcgcgagcgttagaggacctgaaacgcctaggctcgttaaagatattgaggttgagcacgtagtacggaacgcaacgggctcacgcggcggtacaatcctcaaagtgcccaaagtggaagccgtcatggagacatggcaacggcacaaatctcgggtcataacatacaagttcaagagtaccttcgaaggcaaggtagaagtggggtggaactactcacgcattagttatatccgcggtatgtgggctaatcactcgaaaatgctggccgcggtctggggccgtgaaatcccggccatgtcggcgatcaaagtcacgggcgtaccggaaccggaacaagaacaaaaagcaggggaacagcagaagattacggcggaagtcaatgtcccacagagtaaatatgaatatgagccgctggagcccccgatcattgagaccccgcagctcagggatatgggagaggcgacgccacctctagaatggatcggtttgcatcgagacagattaccgaatctgacgcatcagattgtcattgtgtccctcctggaactagcgggcgaggttgaggatgcgtatgccaaaattttaggaagttcgtgagaggagagtgagatggactgttgcatagcacggcgtttgaggcgttgaacctccaaggattcctatgaggcatacagcattaattacatgagtagctaatcctcgttcggtctatgttgaatacaaatcattttccacttcatcatgacacagaatacatatctttcttagtttcgcctatctgaaagccttctcattgcaatagcagtgttcaaggcctgactgttggtcgaatcattcggctggtgaggatgagtcagtcgggggaggctacaagcatttaagacgcaagcaccctcctcacgatgactgttatcaaggctgagtttaccctggggactttgcaagagagattgacatgtctgtatcatgggaaagcttaggctagtcttgtaaaacatttgcgtctatcaacagagctcgatagaatcacgaggcgcatacttggttcatctcgagactcaatagctcctggcatagatttggataaaagtgataaaggccaaccaatgaatgaacggtatgagacaagctcaacttgtgaagtcatgccgcaactcgatac

SEQ ID NO: 622 - DNA, 5904 bp, Muscodor strobelii
  misc_feature: SGI cDNA ID NO. 559783
  misc_feature: Encodes the peptide sequence at SEQ ID NO 623
atggctgggcctggcaatgggagccccggcaacacctcgatatcgatatggaagaacttcaacggtgaattcctcggctacagcgtcttgacgggcatcttagccgtattcttgttgctatactttaacagagtattggcctcgatattgtcctacctccttcgcacctacacctggcatcgctaccgcatctacatcgacgtccaggcccttcagttctccttgctcggtggacgtgtcttcttcaccgggctgagctaccacgggaacaacgagaccatcctcatccagaatggccatatcacttggtcgtactggctgcgccgtgttcgcgatgccgacatttatcttcccaagcaaacgtccggcggcgacgaagacgcaggctcccctagtgccagagacagacaacagaaactgccatgtcgcatcaatgtttgtgtctcgggcctcgagtggtttgtctacaaccgcagcgccgcatacgactcgattctcgatgctatgagggacgccgtagatgtgcacgaccgtaatggaacccaggatctctcacgtggcgatgatcttccaaacggggacgaaaagcaagcagctgataatccaaggcctagacaacggcttcacaaacccgcaaagccatcggcctctcacgatgacaaggcagaacccggatctagtctggaggacgaacagaaagctagtctcgatggcgagcgcgtcggggccgaaagtctaatctctggctctgatggcgactatgtctctgatcacagcgagctccctttgttgctaagactgtacccaatctacttcgaatgtgacagagctgccatggtcatgggaaacgataacaccaaggccctcctcattgtcaaaaccaagtcattgactggtcacatcgatgcttctgattgtaaagcacccgacccctatcggcaactatacgaaatcaaattcgaacaccccgtcatggagatgagagagcatgacggctacaaggaggaccagcttacacgcgctgtcagggataagcaagcagccttggattcggatcctgtgcaacagcgatctttcatcaggaggcatcggcgcagagcgcttggacagttacgaaacctcgtgccatattggagaaaatctgtcgagtccttctccgtggattcaaggataggaacggccccggaagagcctcctattcccggccttaatcattggaaagggttatcccgctacttgaatgccgatgatgatgatgacaaactcagatggtcgactgttgagtacggcgccgtgcccaccgtggtggacagtccggagggcattctgacgatcctttgggacgtcccaggaaaggtatcgcagcaaagtacggcatcacgtccacccgccaaagagaaaaaccgctcccatcatgttaatggcacggcgcctcctgcctgggcgatcaaaatctctcttaagggaggctcggtcaactacgggccgtgggcggacagacaacgcgctgaacttcaaagagtcttctttcctggcctttgcaaagatgcagtgcccgcccatcgattgcccgtaggctctgatcgtgttccgaccgtattcaatttgtatttagagttcactgaagaaactactctcaggatacccacacgagaagactccaagaactggaaatggaaaaaggaagcgtccactttgaagcagcaaacacaacaaggccgtcgtcgcgaacgtgatcgtaaccagaaatctcccactacttctgcagctgagcagagaccttatggctggctcgatgtcaagataggggcaaatgctactgtctcgtaccaaatggatatgctggcaggaccatctgggtatgccaacggcgtggagattgatcttccctcaacagaagtatccactagtgtcaaccacggcacgctttggaggtctggcgcacaacacatttcctgcgatctctcgactcctgtcaagtggaatagtctgcgcacttggagtttcaacatcgacagtgaagccatggagctctttatcttgcgcgaacatatcttcctaatactcgacttaatcgacgattggggaagcggcccccctcccgagtatctcctcttcacacctttcaagtacctactgaagttgtgccttcgcaacctgaagctttatgtcaatgtcaatgatgtgaacatcattaataaccctatcagtctggaagaaaatacatatttgattctgtctagtccgtgcctaaacacagagacctctatcaacaccgatacataccgccctacaacgagttttgtaccgttcaaaattgacactgatactctacacctcggcctgcacatcccaccttggaatacacaagcgaccttcctgacttcaaaagatataggacatctggagaacttagttgtggatggaaagtactgctcgaacgccacagtatctcctgccaacaccgatacgctagtccttgatatcactggtcaatccccgacattccaattacatgggtttctggttcgttattttctccaactgaaagataattatttcggcgaccacatccacttcaagactctggatgaatatcaacaaagtttgcggctcaacgagcaggatccagacgctaaattgtcgaacaaaccgccaccaaagaaatccaatgacctggatgtcatgctcagcattcgtacggacgatcccaaagtcattctgccagcgaatctgtatacagcgaagcgtaatgtgcctgtagaggctgcgtcgttagcgattgatcttcgtttcaccaattattacatggaccttgacctctgcttcagtccactcagcttatcgttgactgatagcgaggatgagaacatgagccccacgagcgttacttctcggacccaaatgttcatcgatggacttgctatatatgggcatcgtctttttggattgcctccatcagaaccgacgtacctttgcaactgggatttaaatatcggagctgtcacgggagaaatatcgactgctttcctgactgctcttgctcagggcggcaaagccttcggcttctcgctcgacgatgatgagaatgccttgattccgtattcgtctatagtgtcaaacgacgtcacctttctgcgtgtatatgttgactcaatccaactgtgggtacacgtcgaagaatccgccttcctatgttccattagttcattagaggtgaattacaacgactgggcgagaactcattactcgaggcgagctgatataaaaatacctcacctcgaactttcctgtgttgaatcagaggctacggcgagataccaatcccggcttaagccatcagtacaggcagatttactcttccggactagccttcactttgcactgattgggaggaaatatgactttgcgaaagagagggaggttcaacaaaggctcgtgcaacgtcacgaccaacgaacgcatcgaactgagttccttctaatcccaggcctccttgataatgtgaagccagatgtagtagacccgaccgcccaaagtatacccacagtaccagagcccattatttcgaccatcaacgatgacaagagatcaacttcatctcgacactcagcctatcgctctcgaggtcttcgtcacaaaagctcatttctgtctattgctagttcaactgatgcagagagtattcggcgaggcaaaagcagatctggacttaggacaggtgataggacatcgctttccacttccaaatcaatccgtgcaaatagatctagttcgagacagaacggcagcgaccaacattacgtaaataccgggttgaatggccctgaccgacaaacacagcttcataccaccatggctttcactagccaattttttgcgccatactttccattggaagcggttcggccggacctgaaagacgcagccaaacctcaaaccgaagcatataaaacaaatgggatgcccgatgtctcatctttcggactcgaggatattgatcccgaccaattctctcaagactatgcccagcaaaccttgctcttcgagatgcctacgggcgtcactactgttctcaatgacgcgtcgctccgttgcctaggagctttaatgcggacgtttcaaccaaccgaggcagacgatatactggacacacttcaaatgggtgcgatttctgacatttttggtatccaaaaacaggaaaaactacacggctcaatcacagatgtcgttgttcgactaccgcgagccagcatcagctttctcaacgagtgtgatactgatgccggttctcagacacaagaaatcgatcatttcaaggtctccatggaagatcttgtatttgctctccggacggaaaagcgtggtggcttggcccaaatcgacgcagaccatcaatcaccgccacgaccatcatttcacttccgcctcaactcactcgacgtgaccattgctgaaagtgcttctgcagtgggaagcacaaaatcaacagcactggtcagtatcgaaaaagtgatgtcatctatgggatcaaaagagattagctatacagatgctgatgtgggggcaattcatatcaaatcttcatcaacccgagttgagcatcttgctaggtttgcacaacgaacgaaagagctcgtgtctgaactagaagatattttcaccaagccatcggcagcagcagacgaacgtttgaaatacttcacacatcgcatcatcaccgaagggcagcaagcaagtgacccatctttcgtcatccggccctctgctattctcagagctgcgaccaggcacctgaggacatatgattcatggaagctcataacccgcttacgctacatgtggacaactttagggccgcaaaagcaagaaaatctgatgcgagaatgcctgagccattctatgcaagttccgaaagatgtgcggaatcaagttgtggctgcttttgatcgctggagaagttgggatctggaagatactggtcatgcggtgcttctagacaatatttttggcaagagtccaagtgtgaacattgagtccgaacatgttccatggatggtagtctgcagagtgcgtaagatcgagattagtctcgatagagggccgaaaaataacaacgtcctgatatacgatatcactgcgaggattcacgacaaacaagttcgcgaacacgattccgatcaaaaagtcatgattgatggtcctctaacgattgtcaatgtctattgcgggcagttcgcgatgaatctaaactgggagctctgcgagctcttggatcgtgtctcttctctatatcctactgcaagtcctcaaaatccgccacaggttgaagatcctgtcgtgaaatatgagctacaggacagtggtcgaccaccgcgttcaattcatttcgtattagtcactgcacagggaagcatatcacttgatagcatcaatctgagtatcaaaccccactgcaataatctaaggttgtcagtgttgagccgatctgtgggacacggcgaaatggacaccaatatcacgctcaattgcgatgctgcagaactcaatgctctcagccacgcacagactctggcaagtcttcatcttacaaaaccaagtgtcatcgtgacgcacgaggtgctgtctgtcaaccagacgcctggtcatataatcagagcagcagccagcagtcacaaccttgcaatcaacatcaaacaagatcccctcgttcttgctgaagtggtggatctattagtcaaagatgaggctgctcagcttcatgagttacaacaaaaaatacagaggcgtcagccagaccagcaaaattatcagcccatgaaacgccaatttggcaccttgtccctcgatctggctaccacgcgcaactttagccgctatcacgaacaaacagatcatctttga

SEQ ID NO: 623 - protein, 1967 aa, Muscodor strobelii
  misc_feature: SGI Peptide ID NO. 559783
  misc_feature (42)..(1927): NCBI GI: 85106989 Blast Desc: NCU07702 [Neurospora crassa OR74A] gi|28923890|gb|EAA33052.1| conserved [Neurospora crassa OR74A]
  misc_feature (20)..(1935): NCBI GI: 256727589 Blast Desc: [Nectria haematococca mpVI 77-13-4]
  misc_feature (20)..(1935): NCBI GI: 46136119 Blast Desc: FG09575.1 [Gibberella zeae PH-1]
  misc_feature (20)..(1927): NCBI GI: 154302099 Blast Desc: BC1G_09730 [Botryotinia fuckeliana B05.10] gi|150855504|gb|EDN30696.1| BC1G_09730 [Botryotinia fuckeliana B05.10]
  misc_feature (20)..(1951): NCBI GI: 156062452 Blast Desc: SS1G_01342 [Sclerotinia sclerotiorum 1980] gi|154696678|gb|EDN96416.1| SS1G_01342 [Sclerotinia sclerotiorum 1980]
  misc_feature (20)..(1928): NCBI GI: 225684839 Blast Desc: conserved [Paracoccidioides brasiliensis Pb03]
  misc_feature (34)..(1928): NCBI GI: 226287793 Blast Desc: conserved [Paracoccidioides brasiliensis Pb18]
  misc_feature (24)..(1935): NCBI GI: 225557615 Blast Desc: conserved [Ajellomyces capsulatus G186AR]
  misc_feature (36)..(1942): NCBI GI: 239615454 Blast Desc: fermentation associated protein [Ajellomyces dermatitidis ER-3]
  misc_feature (36)..(1942): NCBI GI: 261199364 Blast Desc: fermentation associated protein [Ajellomyces dermatitidis SLH14081] gi|239594291|gb|EEQ76872.1| fermentation associated protein [Ajellomyces dermatitidis SLH14081]
MAGPGNGSPGNTSISIWKNFNGEFLGYSVLTGILAVFLLLYFNRVLASILSYLLRTYTWHRYRIYIDVQALQFSLLGGRVFFTGLSYHGNNETILIQNGHITWSYWLRRVRDADIYLPKQTSGGDEDAGSPSARDRQQKLPCRINVCVSGLEWFVYNRSAAYDSILDAMRDAVDVHDRNGTQDLSRGDDLPNGDEKQAADNPRPRQRLHKPAKPSASHDDKAEPGSSLEDEQKASLDGERVGAESLISGSDGDYVSDHSELPLLLRLYPIYFECDRAAMVMGNDNTKALLIVKTKSLTGHIDASDCKAPDPYRQLYEIKFEHPVMEMREHDGYKEDQLTRAVRDKQAALDSDPVQQRSFIRRHRRRALGQLRNLVPYWRKSVESFSVDSRIGTAPEEPPIPGLNHWKGLSRYLNADDDDDKLRWSTVEYGAVPTVVDSPEGILTILWDVPGKVSQQSTASRPPAKEKNRSHHVNGTAPPAWAIKISLKGGSVNYGPWADRQRAELQRVFFPGLCKDAVPAHRLPVGSDRVPTVFNLYLEFTEETTLRIPTREDSKNWKWKKEASTLKQQTQQGRRRERDRNQKSPTTSAAEQRPYGWLDVKIGANATVSYQMDMLAGPSGYANGVEIDLPSTEVSTSVNHGTLWRSGAQHISCDLSTPVKWNSLRTWSFNIDSEAMELFILREHIFLILDLIDDWGSGPPPEYLLFTPFKYLLKLCLRNLKLYVNVNDVNIINNPISLEENTYLILSSPCLNTETSINTDTYRPTTSFVPFKIDTDTLHLGLHIPPWNTQATFLTSKDIGHLENLVVDGKYCSNATVSPANTDTLVLDITGQSPTFQLHGFLVRYFLQLKDNYFGDHIHFKTLDEYQQSLRLNEQDPDAKLSNKPPPKKSNDLDVMLSIRTDDPKVILPANLYTAKRNVPVEAASLAIDLRFTNYYMDLDLCFSPLSLSLTDSEDENMSPTSVTSRTQMFIDGLAIYGHRLFGLPPSEPTYLCNWDLNIGAVTGEISTAFLTALAQGGKAFGFSLDDDENALIPYSSIVSNDVTFLRVYVDSIQLWVHVEESAFLCSISSLEVNYNDWARTHYSRRADIKIPHLELSCVESEATARYQSRLKPSVQADLLFRTSLHFALIGRKYDFAKEREVQQRLVQRHDQRTHRTEFLLIPGLLDNVKPDVVDPTAQSIPTVPEPIISTINDDKRSTSSRHSAYRSRGLRHKSSFLSIASSTDAESIRRGKSRSGLRTGDRTSLSTSKSIRANRSSSRQNGSDQHYVNTGLNGPDRQTQLHTTMAFTSQFFAPYFPLEAVRPDLKDAAKPQTEAYKTNGMPDVSSFGLEDIDPDQFSQDYAQQTLLFEMPTGVTTVLNDASLRCLGALMRTFQPTEADDILDTLQMGAISDIFGIQKQEKLHGSITDVVVRLPRASISFLNECDTDAGSQTQEIDHFKVSMEDLVFALRTEKRGGLAQIDADHQSPPRPSFHFRLNSLDVTIAESASAVGSTKSTALVSIEKVMSSMGSKEISYTDADVGAIHIKSSSTRVEHLARFAQRTKELVSELEDIFTKPSAAADERLKYFTHRIITEGQQASDPSFVIRPSAILRAATRHLRTYDSWKLITRLRYMWTTLGPQKQENLMRECLSHSMQVPKDVRNQVVAAFDRWRSWDLEDTGHAVLLDNIFGKSPSVNIESEHVPWMVVCRVRKIEISLDRGPKNNNVLIYDITARIHDKQVREHDSDQKVMIDGPLTIVNVYCGQFAMNLNWELCELLDRVSSLYPTASPQNPPQVEDPVVKYELQDSGRPPRSIHFVLVTAQGSISLDSINLSIKPHCNNLRLSVLSRSVGHGEMDTNITLNCDAAELNALSHAQTLASLHLTKPSVIVTHEVLSVNQTPGHIIRAAASSHNLAINIKQDPLVLAEVVDLLVKDEAAQLHELQQKIQRRQPDQQNYQPMKRQFGTLSLDLATTRNFSRYHEQTDHL

SEQ ID NO: 624 - DNA, 4389 bp, Muscodor strobelii
  misc_feature: SGI EST ID NO. CUFF.1700.0
  misc_feature: Variant of the nucleotide sequence at SEQ ID NO 622
cggtaggtgagctgaggtatgccagtcggtgtcacgggttagtcagaggacaacggcatttgacgtatggaagctccatgaacaaatatttggggccaactgcgaacctcactctcgtcttcaaacgacagcacatcgcccccaatcgcccgtctttcgagatatgcacggcctctttggacagtccgcttcccgggcactatcacagtacgattgaacacgaaacacgtcgcgcgcctcagcctagatgctaccactccggagccacacgcccatagacgagggaaaagggcactgcgcagggcaccgcgcagggcactggccgacggtaaagagtcatggctgggcctggcaatgggagccccggcaacacctcgatatcgatatggaagaacttcaacggtgaattcctcggctacagcgtcttgacgggcatcttagccgtattcttgttgctatactttaacagagtattggcctcgatattgtcctacctccttcgcacctacacctggcatcgctaccgcatctacatcgacgtccaggcccttcagttctccttgctcggtggacgtgtcttcttcaccgggctgagctaccacgggaacaacgagaccatcctcatccagaatggccatatcacttggtcgtactggctgcgccgtgttcgcgatgccgacatttatcttcccaagcaaacgtccggcggcgacgaagacgcaggctcccctagtgccagagacagacaacagaaactgccatgtcgcatcaatgtttgtgtctcgggcctcgagtggtttgtctacaaccgcagcgccgcatacgactcgattctcgatgctatgagggacgccgtagatgtgcacgaccgtaatggaacccaggatctctcacgtggcgatgatcttccaaacggggacgaaaagcaagcagctgataatccaaggcctagacaacggcttcacaaacccgcaaagccatcggcctctcacgatgacaaggcagaacccggatctagtctggaggacgaacagaaagctagtctcgatggcgagcgcgtcggggccgaaagtctaatctctggctctgatggcgactatgtctctgatcacagcgagctccctttgttgctaagactgtacccaatctacttcgaatgtgacagagctgccatggtcatgggaaacgataacaccaaggccctcctcattgtcaaaaccaagtcattgactggtcacatcgatgcttctgattgtaaagcacccgacccctatcggcaactatacgaaatcaaattcgaacaccccgtcatggagatgagagagcatgacggctacaaggaggaccagcttacacgcgctgtcagggataagcaagcagccttggattcggatcctgtgcaacagcgatctttcatcaggaggcatcggcgcagagcgcttggacagttacgaaacctcgtgccatattggagaaaatctgtcgagtccttctccgtggattcaaggataggaacggccccggaagagcctcctattcccggccttaatcattggaaagggttatcccgctacttgaatgccgatgatgatgatgacaaactcagatggtcgactgttgagtacggcgccgtgcccaccgtggtggacagtccggagggcattctgacgatcctttgggacgtcccaggaaaggtatcgcagcaaagtacggcatcacgtccacccgccaaagagaaaaaccgctcccatcatgttaatggcacggcgcctcctgcctgggcgatcaaaatctctcttaagggaggctcggtcaactacgggccgtgggcggacagacaacgcgctgaacttcaaagagtcttctttcctggcctttgcaaagatgcagtgcccgcccatcgattgcccgtaggctctgatcgtgttccgaccgtattcaatttgtatttagagttcactgaagaaactactctcaggatacccacacgagaagactccaagaactggaaatggaaaaaggaagcgtccactttgaagcagcaaacacaacaaggccgtcgtcgcgaacgtgatcgtaaccagaaatctcccactacttctgcagctgagcagagaccttatggctggctcgatgtcaagataggggcaaatgctactgtctcgtaccaaatggatatgctggcaggaccatctgggtatgccaacggcgtggagattgatcttccctcaacagaagtatccactagtgtcaaccacggcacgctttggaggtctggcgcacaacacatttcctgcgatctctcgactcctgtcaagtggaatagtctgcgcacttggagtttcaacatcgacagtgaagccatggagctctttatcttgcgcgaacatatcttcctaatactcgacttaatcgacgattggggaagcggcccccctcccgagtatctcctcttcacacctttcaagtacctactgaagttgtgccttcgcaacctgaagctttatgtcaatgtcaatgatgtgaacatcattaataaccctatcagtctggaagaaaatacatatttgattctgtctagtccgtgcctaaacacagagacctctatcaacaccgatacataccgccctacaacgagttttgtaccgttcaaaattgacactgatactctacacctcggcctgcacatcccaccttggaatacacaagcgaccttcctgacttcaaaagatataggacatctggagaacttagttgtggatggaaagtactgctcgaacgccacagtatctcctgccaacaccgatacgctagtccttgatatcactggtcaatccccgacattccaattacatgggtttctggttcgttattttctccaactgaaagataattatttcggcgaccacatccacttcaagactctggatgaatatcaacaaagtttgcggctcaacgagcaggatccagacgctaaattgtcgaacaaaccgccaccaaagaaatccaatgacctggatgtcatgctcagcattcgtacggacgatcccaaagtcattctgccagcgaatctgtatacagcgaagcgtaatgtgcctgtagaggctgcgtcgttagcgattgatcttcgtttcaccaattattacatggaccttgacctctgcttcagtccactcagcttatcgttgactgatagcgaggatgagaacatgagccccacgagcgttacttctcggacccaaatgttcatcgatggacttgctatatatgggcatcgtctttttggattgcctccatcagaaccgacgtacctttgcaactgggatttaaatatcggagctgtcacgggagaaatatcgactgctttcctgactgctcttgctcagggcggcaaagccttcggcttctcgctcgacgatgatgagaatgccttgattccgtattcgtctatagtgtcaaacgacgtcacctttctgcgtgtatatgttgactcaatccaactgtgggtacacgtcgaagaatccgccttcctatgttccattagttcattagaggtgaattacaacgactgggcgagaactcattactcgaggcgagctgatataaaaatacctcacctcgaactttcctgtgttgaatcagaggctacggcgagataccaatcccggcttaagccatcagtacaggcagatttactcttccggactagccttcactttgcactgattgggaggaaatatgactttgcgaaagagagggaggttcaacaaaggctcgtgcaacgtcacgaccaacgaacgcatcgaactgagttccttctaatcccaggcctccttgataatgtgaagccagatgtagtagacccgaccgcccaaagtatacccacagtaccagagcccattatttcgaccatcaacgatgacaagagatcaacttcatctcgacactcagcctatcgctctcgaggtcttcgtcacaaaagctcatttctgtctattgctagttcaactgatgcagagagtattcggcgaggcaaaagcagatctggacttaggacaggtgataggacatcgctttccacttccaaatcaatccgtgcaaatagatctagttcgagacagaacggcagcgaccaacattacgtaaataccgggttgaatggccctgaccgacaaacacagcttcataccaccatggctttcactagccaattttttgcgccatactttccattggaagcggttcggccggacctgaaagacgcagccaaacctcaaaccgaagcatataaaacaaatgggatgcccgatgtctcatctttcggactcgaggatattgatcccgaccaattctctcaagactatgcccagcaaaccttgctcttcgaga

SEQ ID NO: 625 - DNA, 3198 bp, Muscodor strobelii
  misc_feature: SGI cDNA ID NO. 559784
  misc_feature: Encodes the peptide sequence at SEQ ID NO 626
atggctgggcctggcaatgggagccccggcaacacctcgatatcgatatggaagaacttcaacggtgaattcctcggctacagcgtcttgacgggcatcttagccgtattcttgttgctatactttaacagagtattggcctcgatattgtcctacctccttcgcacctacacctggcatcgctaccgcatctacatcgacgtccaggcccttcagttctccttgctcggtggacgtgtcttcttcaccgggctgagctaccacgggaacaacgagaccatcctcatccagaatggccatatcacttggtcgtactggctgcgccgtgttcgcgatgccgacatttatcttcccaagcaaacgtccggcggcgacgaagacgcaggctcccctagtgccagagacagacaacagaaactgccatgtcgcatcaatgtttgtgtctcgggcctcgagtggtttgtctacaaccgcagcgccgcatacgactcgattctcgatgctatgagggacgccgtagatgtgcacgaccgtaatggaacccaggatctctcacgtggcgatgatcttccaaacggggacgaaaagcaagcagctgataatccaaggcctagacaacggcttcacaaacccgcaaagccatcggcctctcacgatgacaaggcagaacccggatctagtctggaggacgaacagaaagctagtctcgatggcgagcgcgtcggggccgaaagtctaatctctggctctgatggcgactatgtctctgatcacagcgagctccctttgttgctaagactgtacccaatctacttcgaatgtgacagagctgccatggtcatgggaaacgataacaccaaggccctcctcattgtcaaaaccaagtcattgactggtcacatcgatgcttctgattgtaaagcacccgacccctatcggcaactatacgaaatcaaattcgaacaccccgtcatggagatgagagagcatgacggctacaaggaggaccagcttacacgcgctgtcagggataagcaagcagccttggattcggatcctgtgcaacagcgatctttcatcaggaggcatcggcgcagagcgcttggacagttacgaaacctcgtgccatattggagaaaatctgtcgagtccttctccgtggattcaaggataggaacggccccggaagagcctcctattcccggccttaatcattggaaagggttatcccgctacttgaatgccgatgatgatgatgacaaactcagatggtcgactgttgagtacggcgccgtgcccaccgtggtggacagtccggagggcattctgacgatcctttgggacgtcccaggaaaggtatcgcagcaaagtacggcatcacgtccacccgccaaagagaaaaaccgctcccatcatgttaatggcacggcgcctcctgcctgggcgatcaaaatctctcttaagggaggctcggtcaactacgggccgtgggcggacagacaacgcgctgaacttcaaagagtcttctttcctggcctttgcaaagatgcagtgcccgcccatcgattgcccgtaggctctgatcgtgttccgaccgtattcaatttgtatttagagttcactgaagaaactactctcaggatacccacacgagaagactccaagaactggaaatggaaaaaggaagcgtccactttgaagcagcaaacacaacaaggccgtcgtcgcgaacgtgatcgtaaccagaaatctcccactacttctgcagctgagcagagaccttatggctggctcgatgtcaagataggggcaaatgctactgtctcgtaccaaatggatatgctggcaggaccatctgggtatgccaacggcgtggagattgatcttccctcaacagaagtatccactagtgtcaaccacggcacgctttggaggtctggcgcacaacacatttcctgcgatctctcgactcctgtcaagtggaatagtctgcgcacttggagtttcaacatcgacagtgaagccatggagctctttatcttgcgcgaacatatcttcctaatactcgacttaatcgacgattggggaagcggcccccctcccgagtatctcctcttcacacctttcaagtacctactgaagttgtgccttcgcaacctgaagctttatgtcaatgtcaatgatgtgaacatcattaataaccctatcagtctggaagaaaatacatatttgattctgtctagtccgtgcctaaacacagagacctctatcaacaccgatacataccgccctacaacgagttttgtaccgttcaaaattgacactgatactctacacctcggcctgcacatcccaccttggaatacacaagcgaccttcctgacttcaaaagatataggacatctggagaacttagttgtggatggaaagtactgctcgaacgccacagtatctcctgccaacaccgatacgctagtccttgatatcactggtcaatccccgacattccaattacatgggtttctggttcgttattttctccaactgaaagataattatttcggcgaccacatccacttcaagactctggatgaatatcaacaaagtttgcggctcaacgagcaggatccagacgctaaattgtcgaacaaaccgccaccaaagaaatccaatgacctggatgtcatgctcagcattcgtacggacgatcccaaagtcattctgccagcgaatctgtatacagcgaagcgtaatgtgcctgtagaggctgcgtcgttagcgattgatcttcgtttcaccaattattacatggaccttgacctctgcttcagtccactcagcttatcgttgactgatagcgaggatgagaacatgagccccacgagcgttacttctcggacccaaatgttcatcgatggacttgctatatatgggcatcgtctttttggattgcctccatcagaaccgacgtacctttgcaactgggatttaaatatcggagctgtcacgggagaaatatcgactgctttcctgactgctcttgctcagggcggcaaagccttcggcttctcgctcgacgatgatgagaatgccttgattccgtattcgtctatagtgtcaaacgacgtcacctttctgcgtttcattagaggtgaattacaacgactgggcgagaactcattactcgaggcgagctga

SEQ ID NO: 626 - protein, 1065 aa, Muscodor strobelii
  misc_feature: SGI Peptide ID NO. 559784
  misc_feature (25)..(1047): NCBI GI: 116196052 Blast Desc: CHGG_04624 [Chaetomium globosum CBS 148.51] gi|88180537|gb|EAQ88005.1| CHGG_04624 [Chaetomium globosum CBS 148.51]
  misc_feature (23)..(1047): NCBI GI: 171690604 Blast Desc: protein product [Podospora anserina] gi|170945250|emb|CAP71361.1| protein product [Podospora anserina]
  misc_feature (24)..(1047): NCBI GI: 39952197 Blast Desc: MGG_01741 [Magnaporthe grisea 70-15] gi|145020409|gb|EDK04538.1| MGG_01741 [Magnaporthe grisea 70-15]
  misc_feature (19)..(1054): NCBI GI: 46136119 Blast Desc: FG09575.1 [Gibberella zeae PH-1]
  misc_feature (42)..(1048): NCBI GI: 85106989 Blast Desc: NCU07702 [Neurospora crassa OR74A] gi|28923890|gb|EAA33052.1| conserved [Neurospora crassa OR74A]
  misc_feature (20)..(1054): NCBI GI: 256727589 Blast Desc: [Nectria haematococca mpVI 77-13-4]
  misc_feature (20)..(1047): NCBI GI: 154302099 Blast Desc: BC1G_09730 [Botryotinia fuckeliana B05.10] gi|150855504|gb|EDN30696.1| BC1G_09730 [Botryotinia fuckeliana B05.10]
  misc_feature (20)..(950): NCBI GI: 261352309 Blast Desc: conserved [Verticillium albo-atrum VaMs.102]
  misc_feature (20)..(1047): NCBI GI: 156062452 Blast Desc: SS1G_01342 [Sclerotinia sclerotiorum 1980] gi|154696678|gb|EDN96416.1| SS1G_01342 [Sclerotinia sclerotiorum 1980]
  misc_feature (20)..(1047): NCBI GI: 225684839 Blast Desc: conserved [Paracoccidioides brasiliensis Pb03]
MAGPGNGSPGNTSISIWKNFNGEFLGYSVLTGILAVFLLLYFNRVLASILSYLLRTYTWHRYRIYIDVQALQFSLLGGRVFFTGLSYHGNNETILIQNGHITWSYWLRRVRDADIYLPKQTSGGDEDAGSPSARDRQQKLPCRINVCVSGLEWFVYNRSAAYDSILDAMRDAVDVHDRNGTQDLSRGDDLPNGDEKQAADNPRPRQRLHKPAKPSASHDDKAEPGSSLEDEQKASLDGERVGAESLISGSDGDYVSDHSELPLLLRLYPIYFECDRAAMVMGNDNTKALLIVKTKSLTGHIDASDCKAPDPYRQLYEIKFEHPVMEMREHDGYKEDQLTRAVRDKQAALDSDPVQQRSFIRRHRRRALGQLRNLVPYWRKSVESFSVDSRIGTAPEEPPIPGLNHWKGLSRYLNADDDDDKLRWSTVEYGAVPTVVDSPEGILTILWDVPGKVSQQSTASRPPAKEKNRSHHVNGTAPPAWAIKISLKGGSVNYGPWADRQRAELQRVFFPGLCKDAVPAHRLPVGSDRVPTVFNLYLEFTEETTLRIPTREDSKNWKWKKEASTLKQQTQQGRRRERDRNQKSPTTSAAEQRPYGWLDVKIGANATVSYQMDMLAGPSGYANGVEIDLPSTEVSTSVNHGTLWRSGAQHISCDLSTPVKWNSLRTWSFNIDSEAMELFILREHIFLILDLIDDWGSGPPPEYLLFTPFKYLLKLCLRNLKLYVNVNDVNIINNPISLEENTYLILSSPCLNTETSINTDTYRPTTSFVPFKIDTDTLHLGLHIPPWNTQATFLTSKDIGHLENLVVDGKYCSNATVSPANTDTLVLDITGQSPTFQLHGFLVRYFLQLKDNYFGDHIHFKTLDEYQQSLRLNEQDPDAKLSNKPPPKKSNDLDVMLSIRTDDPKVILPANLYTAKRNVPVEAASLAIDLRFTNYYMDLDLCFSPLSLSLTDSEDENMSPTSVTSRTQMFIDGLAIYGHRLFGLPPSEPTYLCNWDLNIGAVTGEISTAFLTALAQGGKAFGFSLDDDENALIPYSSIVSNDVTFLRFIRGELQRLGENSLLEAS

SEQ ID NO: 627 - DNA, 4389 bp, Muscodor strobelii; identical to SEQ ID NO: 624
  misc_feature: SGI EST ID NO. CUFF.1700.0
  misc_feature: Variant of the nucleotide sequence at SEQ ID NO 625

SEQ ID NO: 628 - DNA, 2535 bp, Muscodor strobelii
  misc_feature: SGI cDNA ID NO. 559785
  misc_feature: Encodes the peptide sequence at SEQ ID NO 629
atggttaacttcacgatcgacgagatccgtcagttgatggacaagccgaccaatgtccgtaacatgtcggtcattgcccacgtcgaccacggaaagtccaccctgaccgactccctgctggccaaagccggtatcatctccaccgcaaaggctggcgatgccagagccacagacacgagagccgacgaacaggagcgtggcatcaccatcaagtctaccgccatctccttgtacggtactctgcccagcccggacgacctgaaggacattgttggccagaagtccgacggtaccgatttcttgatcaacctcatcgactcgcccggtcacgtcgatttctcttccgaagtcactgccgctctccgtgtcactgatggtgccctcgtcgtcgtcgacaccattgagggtgtctgtgtccagaccgagaccgtcttgcgtcagtctctggctgagcgcatcaagcccgtcgtcgtcatcaacaaggtcgaccgtgccctgctcgaactccaggtttccaaggaggatctgtaccagaccttcctgcgtaccatcgagtccgtcaacgtcgtcattgccacataccttgacaaggccgttggcgacctccaggtctaccccgagaagggtaccgtcgctttcggttccggtctccacggctgggccttcaccatccgccagttcgccatccgatacgccaagaagttcggtgtcgaccgcaacaagatgatggagcgtctctggggagacagctacttcaacccacacaccaagaagtggaccaacaagggcacccacgagggcaagacgctcgagcgtgccttcaaccagttcatcttggacccgatctttaagatcttctctgctgtcatgaacttcaagaaggacgagattgccactctcctgaccaagttggagctcaagctccccactgaggacaaggacaaggagggcaagcagctcctcaaggccgtcatgcgtactttcttgcccgccgccgactctctcttggagatgatgattcttcaccttccttctcccgtcaccgcccagaagtaccgttgcgagactctgtacgagggtccccctgatgatgaggctgccattggtatccgtgactgcgaccccaagggtcccctcatgctttacgtctccaagatggtgcccacttccgataagggtcgtttctacgctttcggtcgtgtcttctctggtaccgtcaagtctggtatcaaggtccgcattcagggccccaactacactcctggcaagaaggaggatctcttcatcaaggccatccagcgtactgttctgatgatgggtggcaaggtcgagcccatcgacgacatgcctgccggaaacattgttggtctggtcggtattgaccagttcttgctcaagtctggtaccctcagcaccctcgagactgcccacaacctgaaggtcatgaagttctccgtctcacccgtcgtcacccgatccgtccaggtcaagaacgcccaggatctgcccaagctcgttgaaggtctcaagcgtctgtccaagtccgacccttgtgtcttgacttccacctccccctccggtgagcacgtcgttgctggtgccggtgagttgcatcttgagatttgcttgaaggatctcgaggaggaccacgctggtgttcctctcatcttctccgaccccgtcgtccagtaccgtgagaccgtcggcgccaagtcgagcatgactgccctgtccaagtcgcccaacaagcacaaccgtctgtacatggttgctgagcctatggaggaggagctctccattgccattgagggtggcaagatcactccccgtgacgatttcaaggcccgtgcccgtacgctcgccgacgacttcggctgggatgtcacagatgcccgtaagatttggtgcttcggtcccgacaccaatggtgccaacttgttggttgaccagaccaaggctgttcaatacttgaacgaaatcaaggattccgtcgtctccggtttccagtgggccacccgtgagggtcccattgctgaggagcccatgcgtggtgtccgatggaacatcctcgatgttacccttcacgctgatgctatccaccgtggtggtggtcagcttatccccacagctagacgtgtcctgtacgctgctgctctgcttgctgagcctgcgcttcaagaacccgtcttcttgtgcgagattcaggtgcctgagaacgccatgggtggcgtctacggtgtcttgacccgcagaagaggtcacgtcttcgctgaggagcagcgccctggtactcctctcttcaccatcaaggcctacctgcctatcatggagtctttcggcttcaacggtgatctccgtgccgccacctccggccaggccttcccccagaacgtcatggaccactggcaactcctgcctggtggttctcctctcgacaagacctccaaggttggtggaattgtcgagactatgcggaagcgtaagggtatcaaggtcgaggtaccggatgtcagcaattactacgacaaattgtaa

SEQ ID NO: 629 - protein, 844 aa, Muscodor strobelii
  misc_feature: SGI Peptide ID NO. 559785
  misc_feature (394)..(471): Pfam Id: PF03144 Pfam Desc: Elongation factor Tu domain 2
  misc_feature (724)..(813): Pfam Id: PF00679 Pfam Desc: Elongation factor G C-terminus
  misc_feature (605)..(722): Pfam Id: PF03764 Pfam Desc: Elongation factor G, domain IV
  misc_feature (17)..(345): Pfam Id: PF00009 Pfam Desc: Elongation factor Tu GTP binding domain
  misc_feature (1)..(844): NCBI GI: 164423815 Blast Desc: elongation factor 2 [Neurospora crassa OR74A] gi|189045117|sp|Q96X45.3|EF2_NEUCR RecName: Full=Elongation factor 2; Short=EF-2; AltName: Full=Colonial 3 elongation factor
  misc_feature (1)..(844): NCBI GI: 171690608 Blast Desc: protein product [Podospora anserina] gi|170945252|emb|CAP71363.1| protein product [Podospora anserina]
  misc_feature (1)..(844): NCBI GI: 256727588 Blast Desc: [Nectria haematococca mpVI 77-13-4]
  misc_feature (1)..(844): NCBI GI: 13925370 Blast Desc: elongation factor 2 [Neurospora crassa]
  misc_feature (13)..(844): NCBI GI: 46136117 Blast Desc: EF2_NEUCR Elongation factor 2 (EF-2) (Colonial temperature-sensitive 3) [Gibberella zeae PH-1]
  misc_feature (13)..(844): NCBI GI: 145613301 Blast Desc: conserved [Magnaporthe grisea 70-15] gi|145020408|gb|EDK04537.1| conserved [Magnaporthe grisea 70-15]
  misc_feature (1)..(844): NCBI GI: 119189973 Blast Desc: elongation factor 2 [Coccidioides immitis RS]
  misc_feature (1)..(844): NCBI GI: 240111026 Blast Desc: Elongation factor 2, [Coccidioides posadasii C735 delta SOWgp]
  misc_feature (1)..(844): NCBI GI: 169606011 Blast Desc: SNOG_06038 [Phaeosphaeria nodorum SN15] gi|160706893|gb|EAT87102.2| SNOG_06038 [Phaeosphaeria nodorum SN15]
  misc_feature (1)..(844): NCBI GI: 212530160 Blast Desc: translation elongation factor EF-2 subunit, [Penicillium marneffei ATCC 18224] gi|210074635|gb|EEA28722.1| translation elongation factor EF-2 subunit, [Penicillium ATCC
MVNFTIDEIRQLMDKPTNVRNMSVIAHVDHGKSTLTDSLLAKAGIISTAKAGDARATDTRADEQERGITIKSTAISLYGTLPSPDDLKDIVGQKSDGTDFLINLIDSPGHVDFSSEVTAALRVTDGALVVVDTIEGVCVQTETVLRQSLAERIKPVVVINKVDRALLELQVSKEDLYQTFLRTIESVNVVIATYLDKAVGDLQVYPEKGTVAFGSGLHGWAFTIRQFAIRYAKKFGVDRNKMMERLWGDSYFNPHTKKWTNKGTHEGKTLERAFNQFILDPIFKIFSAVMNFKKDEIATLLTKLELKLPTEDKDKEGKQLLKAVMRTFLPAADSLLEMMILHLPSPVTAQKYRCETLYEGPPDDEAAIGIRDCDPKGPLMLYVSKMVPTSDKGRFYAFGRVFSGTVKSGIKVRIQGPNYTPGKKEDLFIKAIQRTVLMMGGKVEPIDDMPAGNIVGLVGIDQFLLKSGTLSTLETAHNLKVMKFSVSPVVTRSVQVKNAQDLPKLVEGLKRLSKSDPCVLTSTSPSGEHVVAGAGELHLEICLKDLEEDHAGVPLIFSDPVVQYRETVGAKSSMTALSKSPNKHNRLYMVAEPMEEELSIAIEGGKITPRDDFKARARTLADDFGWDVTDARKIWCFGPDTNGANLLVDQTKAVQYLNEIKDSVVSGFQWATREGPIAEEPMRGVRWNILDVTLHADAIHRGGGQLIPTARRVLYAAALLAEPALQEPVFLCEIQVPENAMGGVYGVLTRRRGHVFAEEQRPGTPLFTIKAYLPIMESFGFNGDLRAATSGQAFPQNVMDHWQLLPGGSPLDKTSKVGGIVETMRKRKGIKVEVPDVSNYYDKL

SEQ ID NO: 630 - DNA, 3160 bp, Muscodor strobelii
  misc_feature: SGI EST ID NO. CUFF.2072.1
  misc_feature: Variant of the nucleotide sequence at SEQ ID NO 628
cacacacccgccataataacgcttacctactcgtacaaattttccttttttcctcgctgccctgcacccgccctctgtctttcccgcaacaacccacagctggtcggtggttgcttgcgactgctcttcctatttactcttcacttttctcggtttctagtagtaaagttatcatcaaaacaccgccaagatggttaacttcacgatcgacgagatccgtcagttgatggacaagccgaccaatgtccgtaacatgtcggtcattgcccacgtcgaccacggaaagtccaccctgaccgactccctgctggccaaagccggtatcatctccaccgcaaaggctggcgatgccagagccacagacacgagagccgacgaacaggagcgtggcatcaccatcaagtctaccgccatctccttgtacggtactctgcccagcccggacgacctgaaggacattgttggccagaagtccgacggtaccgatttcttgatcaacctcatcgactcgcccggtcacgtcgatttctcttccgaagtcactgccgctctccgtgtcactgatggtgccctcgtcgtcgtcgacaccattgagggtgtctgtgtccagaccgagaccgtcttgcgtcagtctctggctgagcgcatcaagcccgtcgtcgtcatcaacaaggtcgaccgtgccctgctcgaactccaggtttccaaggaggatctgtaccagaccttcctgcgtaccatcgagtccgtcaacgtcgtcattgccacataccttgacaaggccgttggcgacctccaggtctaccccgagaagggtaccgtcgctttcggttccggtctccacggctgggccttcaccatccgccagttcgccatccgatacgccaagaagttcggtgtcgaccgcaacaagatgatggagcgtctctggggagacagctacttcaacccacacaccaagaagtggaccaacaagggcacccacgagggcaagacgctcgagcgtgccttcaaccagttcatcttggacccgatctttaagatcttctctgctgtcatgaacttcaagaaggacgagattgccactctcctgaccaagttggagctcaagctccccactgaggacaaggacaaggagggcaagcagctcctcaaggccgtcatgcgtactttcttgcccgccgccgactctctcttggagatgatgattcttcaccttccttctcccgtcaccgcccagaagtaccgttgcgagactctgtacgagggtccccctgatgatgaggctgccattggtatccgtgactgcgaccccaagggtcccctcatgctttacgtctccaagatggtgcccacttccgataagggtcgtttctacgctttcggtcgtgtcttctctggtaccgtcaagtctggtatcaaggtccgcattcagggccccaactacactcctggcaagaaggaggatctcttcatcaaggccatccagcgtactgttctgatgatgggtggcaaggtcgagcccatcgacgacatgcctgccggaaacattgttggtctggtcggtattgaccagttcttgctcaagtctggtaccctcagcaccctcgagactgcccacaacctgaaggtcatgaagttctccgtctcacccgtcgtcacccgatccgtccaggtcaagaacgcccaggatctgcccaagctcgttgaaggtctcaagcgtctgtccaagtccgacccttgtgtcttgacttccacctccccctccggtgagcacgtcgttgctggtgccggtgagttgcatcttgagatttgcttgaaggatctcgaggaggaccacgctggtgttcctctcatcttctccgaccccgtcgtccagtaccgtgagaccgtcggcgccaagtcgagcatgactgccctgtccaagtcgcccaacaagcacaaccgtctgtacatggttgctgagcctatggaggaggagctctccattgccattgagggtggcaagatcactccccgtgacgatttcaaggcccgtgcccgtacgctcgccgacgacttcggctgggatgtcacagatgcccgtaagatttggtgcttcggtcccgacaccaatggtgccaacttgttggttgaccagaccaaggctgttcaatacttgaacgaaatcaaggattccgtcgtctccggtttccagtgggccacccgtgagggtcccattgctgaggagcccatgcgtggtgtccgatggaacatcctcgatgttacccttcacgctgatgctatccaccgtggtggtggtcagcttatccccacagctagacgtgtcctgtacgctgctgctctgcttgctgagcctgcgcttcaagaacccgtcttcttgtgcgagattcaggtgcctgagaacgccatgggtggcgtctacggtgtcttgacccgcagaagaggtcacgtcttcgctgaggagcagcgccctggtactcctctcttcaccatcaaggcctacctgcctatcatggagtctttcggcttcaacggtgatctccgtgccgccacctccggccaggccttcccccagaacgtcatggaccactggcaactcctgcctggtggttctcctctcgacaagacctccaaggttggtggaattgtcgagactatgcggaagcgtaagggtatcaaggtcgaggtaccggatgtcagcaattactacgacaaattgtaaacgattccccactctgtctatagactacgccctcgtgccaattatggcggaaacaaagaatcgactcggcgcattgaccaaaacgattggggatgtatggagtttaagaggtcaaccaggactaaaatgcggccgtggatgcggaaaagctgtatgaaggcatatgcgtggaattgagtggttgctgtccatccaccatccgatttacatgtagtttcaacgcaattgataatgacttagatgatcacgctaaattggtgccacgtgaaaaacttcaacttgttcattaatttactatgacaaagagcaattagatgatgagaatagagaaatctcagtgttctttccatgagtccctcttacatcagacacgtcccttctctcgttgtgcaaggtgtacagtgtgtggcagtctcgcctctcgttgctctttcc

SEQ ID NO: 631 - DNA, 831 bp, Muscodor strobelii
  misc_feature: SGI cDNA ID NO. 559786
  misc_feature: Encodes the peptide sequence at SEQ ID NO 632
atgtcgacgaccatctttgacgcctcaaagaacagttccgtgtcacgcctatctggccatcacgtacatatggccaaccctgttcggcctgcgccagcaacaccgtctaagacacctccgccgattctgcaagtccctgacccacaaccttcaagtaaggggagtcctgactccacgccagcaccaaatgggcattatcggaagatgaccaaggacgagtggactcaattctgccatggcattggcgttctcaaggacgaggagagcgatgtagtcttgcgtgccagcagcagggtctggccgccttcggggtttaaagacggtctgtatggggatatcctgtttgagaaatcgaaatttacgtattggtttcacatcctatctacagttcgctgggttttgatgttggcccagattgcgctcagtgcggtattgactgcgttcggggctacgtctagcaagacctttggtctcgttattactatcctcgccgccaccaacacagccattgccggtattctcgcgttgatgcacaatagcgggttaccagatcgttaccgctcagatcgaaatgagttctacaagctcgaggaacacatcaaggctattgttgacacgggcttgataccagcggacagtgatgtgaacgacgtgctagccgaatgttgggtctgcttccagacggcgcttcagtctgttcagaataacgtaccggctgcctatatacccgctacggctgctagtgctatgccagctggtatgggcggcagcggttcgggagggaatacggcctcggagccaaagaaaggtgctgggactactaagaagtag

SEQ ID NO: 632 - protein, 276 aa, Muscodor strobelii
  misc_feature: SGI Peptide ID NO. 559786
  misc_feature (29)..(241): NCBI GI: 171683317 Blast Desc: protein product [Podospora anserina] gi|170941618|emb|CAP67272.1| protein product [Podospora anserina]
  misc_feature (47)..(248): NCBI GI: 85107432 Blast Desc: NCU06335 [Neurospora crassa OR74A] gi|28923974|gb|EAA33133.1| [Neurospora crassa OR74A]
  misc_feature (25)..(267): NCBI GI: 46121287 Blast Desc: FG05022.1 [Gibberella zeae PH-1]
  misc_feature (65)..(246): NCBI GI: 256727493 Blast Desc: NECHADRAFT_28117 [Nectria haematococca mpVI 77-13-4]
  misc_feature (65)..(268): NCBI GI: 116194594 Blast Desc: CHGG_03895 [Chaetomium globosum CBS 148.51] gi|88179808|gb|EAQ87276.1| CHGG_03895 [Chaetomium globosum CBS 148.51]
  misc_feature (33)..(248): NCBI GI: 154321193 Blast Desc: BC1G_01471 [Botryotinia fuckeliana B05.10] gi|150852009|gb|EDN27201.1| BC1G_01471 [Botryotinia fuckeliana B05.10]
  misc_feature (60)..(241): NCBI GI: 261352434 Blast Desc: conserved [Verticillium albo-atrum VaMs.102]
  misc_feature (69)..(241): NCBI GI: 156054410 Blast Desc: SS1G_06053 [Sclerotinia sclerotiorum 1980] gi|154703833|gb|EDO03572.1| SS1G_06053 [Sclerotinia sclerotiorum 1980]
  misc_feature (108)..(276): NCBI GI: 85085271 Blast Desc: NCU04392 [Neurospora crassa OR74A] gi|28918561|gb|EAA28233.1| [Neurospora crassa OR74A] gi|40882231|emb|CAF06056.1| [Neurospora crassa]
  misc_feature (99)..(241): NCBI GI: 154293238 Blast Desc: BC1G_14417 [Botryotinia fuckeliana B05.10] gi|150845562|gb|EDN20755.1| BC1G_14417 [Botryotinia fuckeliana B05.10]
MSTTIFDASKNSSVSRLSGHHVHMANPVRPAPATPSKTPPPILQVPDPQPSSKGSPDSTPAPNGHYRKMTKDEWTQFCHGIGVLKDEESDVVLRASSRVWPPSGFKDGLYGDILFEKSKFTYWFHILSTVRWVLMLAQIALSAVLTAFGATSSKTFGLVITILAATNTAIAGILALMHNSGLPDRYRSDRNEFYKLEEHIKAIVDTGLIPADSDVNDVLAECWVCFQTALQSVQNNVPAAYIPATAASAMPAGMGGSGSGGNTASEPKKGAGTTKK

SEQ ID NO: 633 - DNA, 1101 bp, Muscodor strobelii
  misc_feature: SGI cDNA ID NO. 559787
  misc_feature: Elevated expression when VOC is produced
  misc_feature: Encodes the peptide sequence at SEQ ID NO 634
atgtctgccaaatcagtcatgggacggtcgatcttgccaccaacccctgacttagaccccgatgagagggcaagggaagcagcatactcgtcagcatcgagcggaaccaagacgcaggatcacccattgcaagtgacatttgaactgcctccttcagcaattaccaataaagacaatccgcgtgccatctcgggccattccccagtttcgcccaccgcaaaagtgacatatctacaacccagcgagagtgtgaaagcacgcagacgcacatctactacacagcaacagaaagataccttcacgctgcccccaccgccaacgaggacacgaagaatcatacagatgaaacctcgcccacaggaagatgccgaagaggcgactacggctacgaagggttcatccactaatagcaaaagtgggagtggcagtggaggtgtctcgaagcccccagctaagaagcaaccctctcaaaccagcgcagcgggtcgcaagatggcgcggaagacggcgcatagtctgattgagaggcggcggagatcgaagatgaatgaggagtttgctgtgctgaagggtctgataccagcttgtgaaggggagatgcacaaattggctattctgcaggcgtcgatcgaatacgtccgatatcttgaagactgcctcgcgaaactcaaagcgcagcaaggtcaaaattctatggtaaccccggaattccgcctagggcagcgagaagaagacgaaacatacgacgaaaatcaagacgtcgatatgaccgacacggagacaccgtcttcaaaccagacacagcaggcgtccccgccgtctggccggtctagacagcattcatattcgtctgcgtccactgagcaccatcggcattatagtttcagcacctcgacgaatacgtcaccggctattttgcctcagggatacgcatactccgagtcgagctctcactcagtgctcacgagccctgcgttgaggcctcaggttgagttggaccatgaggcgtctgctgcactgttgatgcttaattctgatcgaaggactgtgccttctgggcctggacgcggtatgagcgttagggaccttcttagttcatag

SEQ ID NO: 634 - protein, 366 aa, Muscodor strobelii
  misc_feature: SGI Peptide ID NO. 559787
  misc_feature (167)..(217): Pfam Id: PF00010 Pfam Desc: Helix-loop-helix DNA-binding domain
  misc_feature (7)..(366): NCBI GI: 116180386 Blast Desc: CHGG_00821 [Chaetomium globosum CBS 148.51] gi|88185118|gb|EAQ92586.1| CHGG_00821 [Chaetomium globosum CBS 148.51]
  misc_feature (7)..(366): NCBI GI: 46108514 Blast Desc: FG01139.1 [Gibberella zeae PH-1]
  misc_feature (31)..(366): NCBI GI: 156062882 Blast Desc: SS1G_01557 [Sclerotinia sclerotiorum 1980] gi|154696893|gb|EDN96631.1| SS1G_01557 [Sclerotinia sclerotiorum 1980]
  misc_feature (7)..(366): NCBI GI: 154299982 Blast Desc: BC1G_11180 [Botryotinia fuckeliana B05.10] gi|150856793|gb|EDN31985.1| BC1G_11180 [Botryotinia fuckeliana B05.10]
  misc_feature (43)..(365): NCBI GI: 169607505 Blast Desc: SNOG_06810 [Phaeosphaeria nodorum SN15] gi|160701427|gb|EAT85461.2| SNOG_06810 [Phaeosphaeria nodorum SN15]
  misc_feature (7)..(231): NCBI GI: 171687825 Blast Desc: protein product [Podospora anserina] gi|170943874|emb|CAP69526.1| protein product [Podospora anserina]
  misc_feature (43)..(227): NCBI GI: 39975327 Blast Desc: MGG_00190 [Magnaporthe grisea 70-15] gi|145018955|gb|EDK03234.1| MGG_00190 [Magnaporthe grisea 70-15]
  misc_feature (7)..(348): NCBI GI: 121701659 Blast Desc: HLH transcription factor, [Aspergillus clavatus NRRL 1] gi|119397237|gb|EAW07668.1| HLH transcription factor, [Aspergillus clavatus NRRL 1]
  misc_feature (7)..(348): NCBI GI: 159131301 Blast Desc: HLH transcription factor, [Aspergillus fumigatus A1163]
  misc_feature (7)..(348): NCBI GI: 70995582 Blast Desc: HLH transcription factor [Aspergillus fumigatus Af293] gi|41581255|emb|CAE47904.1| bhlh transcription factor [Aspergillus fumigatus] gi|66850181|gb|EAL90508.1| HLH factor,
  misc_feature: Useful for introducing or modulating the production of volatile compounds
MSAKSVMGRSILPPTPDLDPDERAREAAYSSASSGTKTQDHPLQVTFELPPSAITNKDNPRAISGHSPVSPTAKVTYLQPSESVKARRRTSTTQQQKDTFTLPPPPTRTRRIIQMKPRPQEDAEEATTATKGSSTNSKSGSGSGGVSKPPAKKQPSQTSAAGRKMARKTAHSLIERRRRSKMNEEFAVLKGLIPACEGEMHKLAILQASIEYVRYLEDCLAKLKAQQGQNSMVTPEFRLGQREEDETYDENQDVDMTDTETPSSNQTQQASPPSGRSRQHSYSSASTEHHRHYSFSTSTNTSPAILPQGYAYSESSSHSVLTSPALRPQVELDHEASAALLMLNSDRRTVPSGPGRGMSVRDLLSS

SEQ ID NO: 635 - DNA, 1777 bp, Muscodor strobelii
  misc_feature: SGI EST ID NO. CUFF.1755.1
  misc_feature: Variant of the nucleotide sequence at SEQ ID NO 633
ctcgaattggtcgcgtgctctctctccgacactgactctcgagtttcgacgagaaaaggaagacgtttccaagcatcatgaattcctccaatatgcagtcgcgcaccctcccatgtgctcgccatcccgcgtgaaaaacagaccagctgtctccaattcgacttccatcatgtgaagatatcctgctttttggaactgttgaacaatccagcttctcgtttcatttctgccatctttcttttcacttggagcctcttggaacccaaagtaattgtacagctcgtcgttcccacttatcatcgctgcctgtcgcgtgacactatatcctgcgctcacatatcatatttattctcgcaaccgactcatcaagctgtcgcgcttcaatacctagttttcacatcagtctagaagcaatcatcattctcgtttctcgatatctatacttcttttcaagaccaatgtctgccaaatcagtcatgggacggtcgatcttgccaccaacccctgacttagaccccgatgagagggcaagggaagcagcatactcgtcagcatcgagcggaaccaagacgcaggatcacccattgcaagtgacatttgaactgcctccttcagcaattaccaataaagacaatccgcgtgccatctcgggccattccccagtttcgcccaccgcaaaagtgacatatctacaacccagcgagagtgtgaaagcacgcagacgcacatctactacacagcaacagaaagataccttcacgctgcccccaccgccaacgaggacacgaagaatcatacagatgaaacctcgcccacaggaagatgccgaagaggcgactacggctacgaagggttcatccactaatagcaaaagtgggagtggcagtggaggtgtctcgaagcccccagctaagaagcaaccctctcaaaccagcgcagcgggtcgcaagatggcgcggaagacggcgcatagtctgattgagaggcggcggagatcgaagatgaatgaggagtttgctgtgctgaagggtctgataccagcttgtgaaggggagatgcacaaattggctattctgcaggcgtcgatcgaatacgtccgatatcttgaagactgcctcgcgaaactcaaagcgcagcaaggtcaaaattctatggtaaccccggaattccgcctagggcagcgagaagaagacgaaacatacgacgaaaatcaagacgtcgatatgaccgacacggagacaccgtcttcaaaccagacacagcaggcgtccccgccgtctggccggtctagacagcattcatattcgtctgcgtccactgagcaccatcggcattatagtttcagcacctcgacgaatacgtcaccggctattttgcctcagggatacgcatactccgagtcgagctctcactcagtgctcacgagccctgcgttgaggcctcaggttgagttggaccatgaggcgtctgctgcactgttgatgcttaattctgatcgaaggactgtgccttctgggcctggacgcggtatgagcgttagggaccttcttagttcataggaaggagtaacggtgcaaatgttatgattgtgatgaaggttattgcgtattcagctgtgcgggtggatgagcgtgtgcggtaattggcgttttttcgggaccctttgcatgagcgtcaggtttatgatgggtttcatgagcttgctgtagacgttatttccgatctgagaacgattctcgtacggaataaaataatcatttttgctcctaacattttg

SEQ ID NO: 636 - DNA, 906 bp, Muscodor strobelii
  misc_feature: SGI cDNA ID NO. 559788
  misc_feature: Reduced expression when VOC is produced
  misc_feature: Encodes the peptide sequence at SEQ ID NO 637
atgccacccaggaagacagacgcggccagcagaggcgacgtatccatggcccagttcgtctacgacggcgacgagagcgatctcgctgctcctgccgcgccctctcagtccacgcctaccgccaccaacaccgccttcacccccagctctgcttcggcacctccacagacagatccgaataatgcagacgagtcaagtctggcggcagacaaggacaaagaccgggaaaagaaagaacacgtcaccatcgaggacctcactctccccaagtccataataacgcgactggctaaaggtgtccttcctcccaacacgcaaatacagggcaatgccatcctagccatgagcaagagtgcaaccgtcttcatcagtcacctggccaatgccgccaatgagcataccctagataataacaagaagactatcatgcccggcgatgtattcgccgccctagaagatatagaattccccttcctacgcgaacgcctcgaggccgagttcaagaaattcaatgagatccaaacaacgaagcgtaacacgtatcgacgcagggtcgccgcggccaagaaggcagaaaagaccggcgggcccctgaaccccgatgcatcgattctatccaccgcaagcggtatatccgatgcgccgcgctccaagaaacagaagcccaacgcggcgcacgaggactcagcaatggatgtagacgagggcgatacgcaggacctgcaagacgcgagcgatgctgacacggagccggacgccgagcaggaggaagaagaggaagaagacgatgaggatgaggaagaagagaatgatgaaaacgaagaagaggaacatgataggctggaggaacgagaggacgaaccagatgatgacgatgcgctggataatggtggtgagagtgactag

SEQ ID NO: 637 - protein, 301 aa, Muscodor strobelii
  misc_feature: SGI Peptide ID NO. 559788
  misc_feature (86)..(151): Pfam Id: PF00808 Pfam Desc: Histone-like transcription factor (CBF/NF-Y) and archaeal histone
  misc_feature (38)..(182): NCBI GI: 171687861 Blast Desc: protein product [Podospora anserina] gi|170943892|emb|CAP69544.1| protein product [Podospora anserina]
  misc_feature (81)..(182): NCBI GI: 164427319 Blast Desc: NCU03073 [Neurospora crassa OR74A] gi|157071693|gb|EAA34930.2| [Neurospora crassa OR74A]
  misc_feature (1)..(189): NCBI GI: 46108600 Blast Desc: FG01182.1 [Gibberella zeae PH-1]
  misc_feature (78)..(208): NCBI GI: 39975369 Blast Desc: MGG_00169 [Magnaporthe grisea 70-15] gi|145018980|gb|EDK03259.1| MGG_00169 [Magnaporthe grisea 70-15]
  misc_feature (78)..(199): NCBI GI: 156052847 Blast Desc: SS1G_06591 [Sclerotinia sclerotiorum 1980] gi|154704369|gb|EDO04108.1| SS1G_06591 [Sclerotinia sclerotiorum 1980]
  misc_feature (78)..(189): NCBI GI: 154315114 Blast Desc: [Botryotinia fuckeliana B05.10] gi|150847559|gb|EDN22752.1| [Botryotinia fuckeliana B05.10]
  misc_feature (79)..(238): NCBI GI: 189189782 Blast Desc: conserved [Pyrenophora tritici-repentis Pt-1C-BFP] gi|187972836|gb|EDU40335.1| conserved [Pyrenophora tritici-repentis Pt-1C-BFP]
  misc_feature (55)..(179): NCBI GI: 119495878 Blast Desc: CBF/NF-Y family transcription factor, [Neosartorya fischeri NRRL 181] gi|119412877|gb|EAW22818.1| CBF/NF-Y family transcription factor, [Neosartorya fischeri NRRL 181]
  misc_feature (1)..(173): NCBI GI: 238498474 Blast Desc: CBF/NF-Y family transcription factor, [Aspergillus flavus NRRL3357] gi|220693746|gb|EED50091.1| CBF/NF-Y family transcription factor, [Aspergillus flavus NRRL3357]
  misc_feature (81)..(237): NCBI GI: 115491409 Blast Desc: conserved [Aspergillus terreus NIH2624] gi|114197192|gb|EAU38892.1| conserved [Aspergillus terreus NIH2624]
  misc_feature: Useful for introducing or modulating the production of volatile compounds
MPPRKTDAASRGDVSMAQFVYDGDESDLAAPAAPSQSTPTATNTAFTPSSASAPPQTDPNNADESSLAADKDKDREKKEHVTIEDLTLPKSIITRLAKGVLPPNTQIQGNAILAMSKSATVFISHLANAANEHTLDNNKKTIMPGDVFAALEDIEFPFLRERLEAEFKKFNEIQTTKRNTYRRRVAAAKKAEKTGGPLNPDASILSTASGISDAPRSKKQKPNAAHEDSAMDVDEGDTQDLQDASDADTEPDAEQEEEEEEDDEDEEEENDENEEEEHDRLEEREDEPDDDDALDNGGESD

SEQ ID NO: 638 - DNA, 4173 bp, Muscodor strobelii
  misc_feature: SGI EST ID NO. CUFF.1860.1
  misc_feature: Variant of the nucleotide sequence at SEQ ID NO 636
tttcgttcgtttcatgcaggtgtgcaccgaggtgtatacttctcctgttctgaaggcggatactgcatacagtcgtgtcttgttatctgcaagcccagcaaagccaagggtccactcgctcgtcgaataggcaccacgagactttcctatccaccatctgcttgcttcagagtcgcagcagatacgtcgttgtgggctgttgccactgcagtgttgccgttcttcgagctttgctagctagcctagtccaagtctcgatgaagtagcgggagttgttcttcccaacctacctattctacccaccacgacccctcccacactacttacgctgtccctctttgcctttcctagctgaggaggtggcttacctacatccgcttgtagtgtttgatcatatatctgccggtgcaggcccattttacctcgcttctctgttctattccctcaagtctttgttccctagaggacagagcccctcattttgtgcgaatgagcaggctcatgtagacgaagcttgccttgctcatacatcctagactgtcactcgttatacatattttgtaactagcccttgccggcattggaagccgatggccttggaagaagagcgaactcaagggccggtgctagctcctcggtgcatatagaaccctaaacagccattgagagccatcaaggcgattggcgtactcgaggagccggctatacgtcgcagctcttcttgagtttaggaattcgagaactggaaagagtcagctcctgtcaagcttctcatcaatatcgaccttcagtgagaagcaccgtcctcaacgatctggccctggttggtttcgaacgtacctgatcatgctcaacctcccgaacatgtcgatcaaggtcgcacgggacgatggtaatctatctggtcatgagaccctggttatcgtgttgagtgcggtatttggcttcatcggcttggctttgatcgtgattggaggtatatggtgtgtgcgagcccggcggagaaagctgtttaaccgaggcattactcctatcggcgatgaagagatagcgagctggaaagtaccacaaggttatgaaaaagagcttgaggtcgagagatacacagcacgacctagccatacgtcgaaaggttcaacgagttcgacgaagagagctaccacgatccaatactccggtcgtccctctgcagacgtcgctgcatcgtcacgatctttcgttagtcacaaatatagcatggaattcccactgtcaccaccagaagccgctgtagtagcgagagcgccgaatgcccgatctggtctcacggacgagtctgttccaggtgacgatccattcataactcttccccgacggcagccttcacgtctacagaagataccaccaaccacagcaggcacgcctagatcgcgaagtaacagcatgaaaagccacaccggagcctggccggggaccaatacggaatacggagccggacactcacgcatgtactcgacgtcctcaatgccaccagtgccttcgagaggcgagaacgaggtctacactgacttgtcgccaccgccctcccacatcatcgggcaggcgatcggataaaccaggatcgcctgttcagatttttctttcttgcagtaacccagccttcgagacccgcgacgagtcggcactacacctttcatccacgcagcacggcgttgagtcatcacgggatcggatggtcgacttcgcttcgactatgccggcccggacgctgttcaagtagagtgtcagcttcagcatgagctgatcgacgcgatacaattcatatatatttctctgctccgcaccttatatcagtcggatgcgccacggtttaacagctactggattccttattcttggtcttttcatttggaggagttttgggactagagcccagagaattttgatggatatacccactcggattgcatgaagcggcctcgggtcgccttcgcttttcattttgcgctcgacctttgtcgaggacgaggagcagcatttatagtgcctctattgccaggcgaggttgtattatgtcacatataaagctatgagggttcggagcagatgcgtacatggaggaggggcgctctgtagcactcgacggctagatgcgtcgagctgtatcaggatttcggaaatgacgccactcaataagaagatagggcaagtacgaagatgacgtacaaacacaatttcaattgaatatacaatctgcacattatagttgggacacgtcaaatcaaagcagatggcaagaatgtgagtgtcaagtgatgactggcaggaagaagaggcaacggaatggtatatgtaaaaggacttaacgcgtctcgaccgcgtctcaggcggggggaccaatcgctaaaccaaccccatggacatggttcgccagtgtaataatgctgggtagctctgacagctaaagcctcttatcactcacgctgtgtatgaggtctattagagtgtagacatttcaacttactatttgcagatagctctcttgccagctttgatataatcgatgagaccaacaattcattctcgggagcatcactgtgatccttgtcattcactaatttctaggccactagctggcacacccccaccaccattcccttttctatctggcctatgagcactctcctgctctgacttcctgagcatgccacccaggaagacagacgcggccagcagaggcgacgtatccatggcccagttcgtctacgacggcgacgagagcgatctcgctgctcctgccgcgccctctcagtccacgcctaccgccaccaacaccgccttcacccccagctctgcttcggcacctccacagacagatccgaataatgcagacgagtcaagtctggcggcagacaaggacaaagaccgggaaaagaaagaacacgtcaccatcgaggacctcactctccccaagtccataataacgcgactggctaaaggtgtccttcctcccaacacgcaaatacagggcaatgccatcctagccatgagcaagagtgcaaccgtcttcatcagtcacctggccaatgccgccaatgagcataccctagataataacaagaagactatcatgcccggcgatgtattcgccgccctagaagatatagaattccccttcctacgcgaacgcctcgaggccgagttcaagaaattcaatgagatccaaacaacgaagcgtaacacgtatcgacgcagggtcgccgcggccaagaaggcagaaaagaccggcgggcccctgaaccccgatgcatcgattctatccaccgcaagcggtatatccgatgcgccgcgctccaagaaacagaagcccaacgcggcgcacgaggactcagcaatggatgtagacgagggcgatacgcaggacctgcaagacgcgagcgatgctgacacggagccggacgccgagcaggaggaagaagaggaagaagacgatgaggatgaggaagaagagaatgatgaaaacgaagaagaggaacatgataggctggaggaacgagaggacgaaccagatgatgacgatgcgctggataatggtggtgagagtgactagtacacactcccctattaccagcgtttcgaccccgatgagacgagacatcccattctgaacagaagacacggtctgcgatagggccgaagttgcacagaggatgcaatatcttatgacatgcatgccatcgattcgtccacaaggatatggagtaatggcggatggcaacgttgcgtagagcaggaaagtgcgaaatcctgtggcattgcattcccgtcctgacgaagatacataatacgaaatcatgacctaactctgaattcaaacgaccaactatctgctcttcgtctagaaaatcatgtgaaaataagtcgaagacgatgcttcagaagacgaagcgggagcaatcatacaactgagacgaatatcgtcaagaggagctccatttgccccttcatggaggttcgacatgccttatgtcaaagctgctgacaacaatgaacaaagtgacaaggaatcagttaaaggagccaaaagtcgatgcaagggctgattttatgtatcaccaagtctggacaagaatacagtaataatgctgagttcgggaatggcattgtaaacatgcgtcggtccgatgaaacgcg

SEQ ID NO: 639 - DNA, 747 bp, Muscodor strobelii
  misc_feature: SGI cDNA ID NO. 559789
  misc_feature: Elevated expression when VOC is produced
  misc_feature: Encodes the peptide sequence at SEQ ID NO 640
atgctcaacctcccgaacatgtcgatcaaggtcgcacgggacgatggtaatctatctggtcatgagaccctggttatcgtgttgagtgcggtatttggcttcatcggcttggctttgatcgtgattggaggtatatggtgtgtgcgagcccggcggagaaagctgtttaaccgaggcattactcctatcggcgatgaagagatagcgagctggaaagtaccacaaggttatgaaaaagagcttgaggtcgagagatacacagcacgacctagccatacgtcgaaaggttcaacgagttcgacgaagagagctaccacgatccaatactccggtcgtccctctgcagacgtcgctgcatcgtcacgatctttcgttagtcacaaatatagcatggaattcccactgtcaccaccagaagccgctgtagtagcgagagcgccgaatgcccgatctggtctcacggacgagtctgttccaggtgacgatccattcataactcttccccgacggcagccttcacgtctacagaagataccaccaaccacagcaggcacgcctagatcgcgaagtaacagcatgaaaagccacaccggagcctggccggggaccaatacggaatacggagccggacactcacgcatgtactcgacgtcctcaatgccaccagtgccttcgagaggcgagaacgaggtctacactgacttgtcgccaccgccctcccacatcatcgggcaggcgatcggataa

SEQ ID NO: 640 - protein, 248 aa, Muscodor strobelii
  misc_feature: SGI Peptide ID NO. 559789
  misc_feature (14)..(248): NCBI GI: 171687859 Blast Desc: protein product [Podospora anserina] gi|170943891|emb|CAP69543.1| protein product [Podospora anserina]
  misc_feature (15)..(183): NCBI GI: 116180380 Blast Desc: CHGG_00818 [Chaetomium globosum CBS 148.51] gi|88185115|gb|EAQ92583.1| CHGG_00818 [Chaetomium globosum CBS 148.51]
  misc_feature (22)..(248): NCBI GI: 261355899 Blast Desc: conserved [Verticillium albo-atrum VaMs.102]
  misc_feature (19)..(180): NCBI GI: 85111918 Blast Desc: NCU03074 [Neurospora crassa OR74A] gi|28925937|gb|EAA34931.1| [Neurospora crassa OR74A]
  misc_feature (19)..(179): NCBI GI: 39945112 Blast Desc: MGG_04538 [Magnaporthe grisea 70-15] gi|145021486|gb|EDK05615.1| MGG_04538 [Magnaporthe grisea 70-15]
  misc_feature (17)..(181): NCBI GI: 256735097 Blast Desc: NECHADRAFT_98719 [Nectria haematococca mpVI 77-13-4]
  misc_feature (22)..(180): NCBI GI: 46108598 Blast Desc: FG01181.1 [Gibberella zeae PH-1]
  misc_feature (23)..(177): NCBI GI: 156052845 Blast Desc: SS1G_06590 [Sclerotinia sclerotiorum 1980] gi|154704368|gb|EDO04107.1| SS1G_06590 [Sclerotinia sclerotiorum 1980]
  misc_feature: Useful for introducing or modulating the production of volatile compounds
MLNLPNMSIKVARDDGNLSGHETLVIVLSAVFGFIGLALIVIGGIWCVRARRRKLFNRGITPIGDEEIASWKVPQGYEKELEVERYTARPSHTSKGSTSSTKRATTIQYSGRPSADVAASSRSFVSHKYSMEFPLSPPEAAVVARAPNARSGLTDESVPGDDPFITLPRRQPSRLQKIPPTTAGTPRSRSNSMKSHTGAWPGTNTEYGAGHSRMYSTSSMPPVPSRGENEVYTDLSPPPSHIIGQAIG

SEQ ID NO: 641 - DNA, 4173 bp, Muscodor strobelii; identical to SEQ ID NO: 638
  misc_feature: SGI EST ID NO. CUFF.1860.1
  misc_feature: Variant of the nucleotide sequence at SEQ ID NO 639

SEQ ID NO: 642 - DNA, 1677 bp, Muscodor strobelii
  misc_feature: SGI cDNA ID NO. 559790
  misc_feature: Encodes the peptide sequence at SEQ ID NO 643
atgtggctaatcaacacgcatagcctcgaactcgaggaattcatcggtatagaccggccagattacgtgatactctcacatacatggggtatagacgaattatcgttttcgcaagtccgagcgggatatttacacttcgatgaaggcagaggatcaaaaaagattagaaagacttgcgaactagccagaaatgcaggcttcaactacgcatgggtcgatacatgctgcatcgacaaatcgagcagtgtagagctttctgaggcaatcaattcgatgttccaatactacgcctcagcagcggtctgctatgtatacctcgaagatcttgcggcagtagcaccaattgaaagcttcgacagttgccgctggttcactcgggggtggacgctccaagagcttcttgcgccagatcacctgatcttctttgaccagagctggaacgagcgtggaacgaagctagcgctcgctaaattgatcgaggaagcaacttccattagtcaacatgtgcttcgaaacaaaaatcttttatatataacacctgtcgcgcagaagatgtcgtgggctgcgtcacgtgttacgactcgcccagaggatatcgcatattgcctgcttgggatattcgacgttaatatgattcccatctatggggagggtcgcaagaaagctttcttccgcctccaagaggagatcataaaacaatcaccggatcccagtatatttctgtggcgagcactgcctagcgaagagaagtatcgaggtatgctagctcgtgggcctgaagaattcagtgccgactctctcaccagatcatttcacatcgaggcatacaatcaggaatttttgatgactaacaaaggacttcgtatcaacactccattgtcatatacaaataccggagatcttatgttatgtctgtttcactgttggcctggatgcgaagcagttagtcagattggtatttatcttcaacctcaaggtgatagaacatacgtcagaatgcgacctatggagctggccgcggccaaaaattccactctaggcccggttgaaaagagatatataagtaaagaagttctcgcactggagtttgaaaacgatcttgattcgatgcaaaagaatgccgtcgttttcaccggagatctcaacacacggtattatcaatatgagtcgacttatccatcttcatgttgggatcaagaccgtaacatgtacctaagatgtggcaacacgtctctcgtcgcttttcataccttccacggtcggtggggtaatgagaaaaaagacgagcagttcatcatcgcatttggggtctcaaaggacggccttgcctggttctcacatgctcatgagaaaacagatgatctgttcatgtcagcgaaacttggcgacttgaacgcagtacagttatatgggaagagagagttccacagaagggggaacaacggcctactggtgttgcaccccgctaagaaccgatactggctccaggtttttctgtctgaggttacggtcaatggctcgccaatgtattgcattgacatgaaggcaagcaatgatgtagatggtacaatattttggacttcttgggcactactacttggtggtatcagcatcttttggtactttctacgatgcagcctgtatcgaaaacgacgaaagaaacgcaacgatccgtga

SEQ ID NO: 643 - protein, 558 aa, Muscodor strobelii
  misc_feature: SGI Peptide ID NO. 559790
  misc_feature (22)..(132): Pfam Id: PF06985 Pfam Desc: Heterokaryon incompatibility protein (HET)
  misc_feature (22)..(106): Pfam Id: PF06985 Pfam Desc: Heterokaryon incompatibility protein (HET)
  misc_feature (114)..(132): Pfam Id: PF06985 Pfam Desc: Heterokaryon incompatibility protein (HET)
  misc_feature (1)..(297): NCBI GI: 256721662 Blast Desc: NECHADRAFT_18017 [Nectria haematococca mpVI 77-13-4]
  misc_feature (1)..(306): NCBI GI: 164425178 Blast Desc: NCU06304 [Neurospora crassa OR74A] gi|157070820|gb|EAA33330.2| conserved [Neurospora crassa OR74A]
  misc_feature (1)..(419): NCBI GI: 256720984 Blast Desc: NECHADRAFT_82249 [Nectria haematococca mpVI 77-13-4]
  misc_feature (1)..(418): NCBI GI: 46126619 Blast Desc: FG07687.1 [Gibberella zeae PH-1]
  misc_feature (1)..(323): NCBI GI: 46139867 Blast Desc: FG11448.1 [Gibberella zeae PH-1]
  misc_feature (1)..(294): NCBI GI: 145605569 Blast Desc: MGG_09177 [Magnaporthe grisea 70-15] gi|145013388|gb|EDJ98029.1| MGG_09177 [Magnaporthe grisea 70-15]
  misc_feature (1)..(262): NCBI GI: 256722053 Blast Desc: NECHADRAFT_16940 [Nectria haematococca mpVI 77-13-4]
  misc_feature (10)..(345): NCBI GI: 116205926 Blast Desc: CHGG_02256 [Chaetomium globosum CBS 148.51] gi|88182853|gb|EAQ90321.1| CHGG_02256 [Chaetomium globosum CBS 148.51]
  misc_feature (1)..(308): NCBI GI: 171688186 Blast Desc: protein product [Podospora anserina] gi|170944055|emb|CAP70165.1| protein product [Podospora anserina]
  misc_feature (1)..(319): NCBI GI: 238493477 Blast Desc: conserved [Aspergillus flavus NRRL3357] gi|220696469|gb|EED52811.1| conserved [Aspergillus flavus NRRL3357]
MWLINTHSLELEEFIGIDRPDYVILSHTWGIDELSFSQVRAGYLHFDEGRGSKKIRKTCELARNAGFNYAWVDTCCIDKSSSVELSEAINSMFQYYASAAVCYVYLEDLAAVAPIESFDSCRWFTRGWTLQELLAPDHLIFFDQSWNERGTKLALAKLIEEATSISQHVLRNKNLLYITPVAQKMSWAASRVTTRPEDIAYCLLGIFDVNMIPIYGEGRKKAFFRLQEEIIKQSPDPSIFLWRALPSEEKYRGMLARGPEEFSADSLTRSFHIEAYNQEFLMTNKGLRINTPLSYTNTGDLMLCLFHCWPGCEAVSQIGIYLQPQGDRTYVRMRPMELAAAKNSTLGPVEKRYISKEVLALEFENDLDSMQKNAVVFTGDLNTRYYQYESTYPSSCWDQDRNMYLRCGNTSLVAFHTFHGRWGNEKKDEQFIIAFGVSKDGLAWFSHAHEKTDDLFMSAKLGDLNAVQLYGKREFHRRGNNGLLVLHPAKNRYWLQVFLSEVTVNGSPMYCIDMKASNDVDGTIFWTSWALLLGGISIFWYFLRCSLYRKRRKKRNDP

SEQ ID NO: 644 - DNA, 913 bp, Muscodor strobelii
  misc_feature: SGI EST ID NO. CUFF.1746.0
  misc_feature: Variant of the nucleotide sequence at SEQ ID NO 642
agcaacttccattagtcaacatgtgcttcgaaacaaaaatcttttatatataacacctgtcgcgcagaagatgtcgtgggctgcgtcacgtgttacgactcgcccagaggatatcgcatattgcctgcttgggatattcgacgttaatatgattcccatctatggggagggtcgcaagaaagctttcttccgcctccaagaggagatcataaaacaatcaccggatcccagtatatttctgtggcgagcactgcctagcgaagagaagtatcgaggtatgctagctcgtgggcctgaagaattcagtgccgactctctcaccagatcatttcacatcgaggcatacaatcaggaatttttgatgactaacaaaggacttcgtatcaacactccattgtcatatacaaataccggagatcttatgttatgtctgtttcactgttggcctggatgcgaagcagttagtcagattggtatttatcttcaacctcaaggtgatagaacatacgtcagaatgcgacctatggagctggccgcggccaaaaattccactctaggcccggttgaaaagagatatataagtaaagaagttctcgcactggagtttgaaaacgatcttgattcgatgcaaaagaatgccgtcgttttcaccggagatctcaacacacggtattatcaatatgagtcgacttatccatcttcatgttgggatcaagaccgtaacatgtacctaagatgtggcaacacgtctctcgtcgcttttcataccttccacggtcggtggggtaatgagaaaaaagacgagcagttcatcatcgcatttggggtctcaaaggacggccttgcctggttctcacatgctcatgagaaaacagatgatctgttcatgtcagcgaaacttggcgacttgaac

SEQ ID NO: 645 - DNA, 3975 bp, Muscodor strobelii
  misc_feature: SGI cDNA ID NO. 559791
  misc_feature: Reduced expression when VOC is produced
  misc_feature: Encodes the peptide sequence at SEQ ID NO 646
atgtctgcagaaacctctcctcgcgccgtgcgcttcttccagggcgaggtcgagctggtccaggacaaggccaagagcggacggcccatcgccatcaccacggactcggacgcctccggctcctctgaggactccgcccccgacaccgccgacctcgaggagcaccaggaccaggtcagcgctctggggccctacggagacggcgccctgtccgcctccatgacctccctcaccaacagcaccgcccgccagcgcgtcccgaccgccgatgccaccgccacgcccggccccaacggcgtcaacacccgccagttgcagcgaccacacgtcgcccgcaccccttccaatgcctacgccccccagcgcgggcccacgcctcagcccttcatatccacccgctctacctcccgccgtcgcgatcctgtcgacaacgtcgactactcggacgaggagtccgagggagagacgccctcgtctgaaggtgtcttcgaggaccgcttcaatgacgagaccatcatgttccaaaacctcatcgacgacacccaacccaccgaagacgacatacaggacccggcgaatcgagagcgtctggaatggcacgggatgctggccgctgtcctgaccggcgatgtcgtcaagcaagagaaacgccgcctgcttggtacctcggatgctcagggcgccaagtccgcgcacaaggccgacctgtggctggggatcaggtccaagaccacgggccgctcattcgcgttgcagcggaggatgatagacgacgctcgaaacaatctggaccgaataattgacgagatcactcgtttcgaagtccaaggatcggctgaagcgggcaagcccgacatagagcagatcgccgacattgtgaagaagatcgaaaagtgtgaaagtctatatccatcctggaaggccttggaggctgctcatccaagcgcggcatcgccggcatttcatgaggcttgcgatgccgttctatcctggtacaataccaacatgatgattgatactgagctgtccatcctcaagaaatgggtgggcaacgaagagcttgatttccacaagacgaaacccagatcgccgagcaccaatggactcagcgacgaaacgtcattcctagatcgccttttaaaggaagatggtctcaagtcattacatgatgatatcgacgaagcgacaaaggaggagcacgccctcaagacgaagacccttatccgaagaagtatgcttgcgccaatctcaagcacaatagcaaaggccaaagagactctcatcatgaactcgggagcttttcacaaaagacatttgccgccctatattgaagaaattctcaccttgattagtttcccctcccggctcatcgaagaaattatcagcgtgcggcttgcatatgctcgaaaaatgaaggagaccacacagcagacacctatcctccaggaccagatgatctcacaattcgaactcttattaaaacttgccatcagaatcaagcaagaaacgcttactgtctcacagccacaacaaggctggcaactcccaccatgtattgacgaatcgttcgaccaagtcatactggatgctttgaaatactacttcaaaatgctgaactggaagttgagcagaaacaagaacaccttcaaggaagccgagattttgggccaggaatgggaatttgcgaatgagatcggccggcatctgctaggcggtgatatcgaagtggcggaacaattcagcaacctcacctacaaggttctcagtcggctgagccagacgtttgagcgagaactccagaggaagcccaaagaaagcgccgaagacatgagcaagagatacatgcaaatgttggactccgtccgtgttcgccagagaatgttgcagcgtttttcaagaatcctcagcgaccattacgaaaatgcctctgacatgagtatcgctctcgatgccgatgatctacagtatctatatgaacgcctttctgttacagggcattttctggtcgatgaaatcgacggaattcaaatcattgcttccccttcacttgttggtcgagatgaggaagttcgttccatcctgcgaacctgtcttcacgagcagatctcagaagacccaacagatccctatcttctgatactacgcccagaagcgcctcttacatggtttggcaaccggagcagtcagcctctcaacatcgagtctacagatttgaagctcggccagatgcgattgattgcggacggctcacaaactcgactggcacatgttcgaagtgtctttctcgagagaatcgatatgcatttggacctaatcgtggaagcacgatctaatcttcacaaagtcaatacacgactcttcgaaatccgcaaagtcggcttcaaactatccaatacgttcatggatagtgtcgccattatccgaaagcagacacagggaatgaactgccatgacctcatccaaacttgtttcgtattcgcgacggaattcggacgacgttcacttctttacatggacagcaatcgccgccaaatgaacaatctgaagctcacaaagctcggcctagattgggtgagctttatttgtgacgactgcaaggtcacagatcgaaggtcatttcgatgggcagtgccagctttggaattcgccatgagtatgacaaccgggcggcatatcctcgctttaggcgatgatgaatacgctagactgcgtgccaaggtgtccggctgcatgtctctgctcatttcccattttgatattctgggtgcgaaatccaatcaagcggcgcagtctgaacgagaacgcattgaggctctcgttggccaattccgccggtttgacaagaacagaaacatcgatgatgaggaagccgctaaattgatccaagaacagcgagtagccaagattgcagaggtcgatgaaattcagatggaggttatcgcagaaagacagggactgggtcgcgtcttagaagtctccaacgaggtcgacagatcccttgcttttctgtcttcctccgccaccaatgtcacgatgagatggcaacaaggtcatttcgttggtggtggtactttcggaaatgtctacgccgcaatgaacctggatactggtcacctgatggctgtcaaagagatccgactccaggacccgaagttgattccacagatcgcgacacagattaaagatgaaatgggtgttctagaagttcttgaccaccctaatgttgtatcctactacggcattgaagttcacagggatcgtgtatatatcttcatggaattttgttctggcgggtcgttggccggcttgttagagcacggccgtatcgaagatgaacaagtcgtcatggtctatgcactgcagcttctcgaaggattggcttatttgcacgaaagtcacatcgctcatcgtgacatcaagccagagaatatcctcctcgaccacaacggagtaatcaaatatgtcgacttcggagccgccaaagtcatcgcacgtcaaggtcgcaccctagtccacggaggagccgccagcaaaccgaacaactcgatgacaggcacacctatgtacatgtccccggaagtcattaagggagagaatcctggtcacctcggtgctgtcgacgtgtggtcgttgggatgtgtcgtcttagaaatggtcacagggcggcggccatggtccaatcttgacaacgaatgggccataatgtacaatattgcccaaggcaatccaccccaactaccaggtccggatcagttaagtccatcaggcattgatttccttcagcgttgctttcatcgggatccgcgcaagcgagccagcgcggtcgaattgcttcaacacgaatggataatgtgtattcgaaaccaggtcgtcgagccaccgacacccagtgatagcagtggctctgctcagagtacgccacatccaaactcggcaggaagcagggtcagtgcaggcgcggacgggttttattag

SEQ ID NO: 646 - protein, 1324 aa, Muscodor strobelii
  misc_feature: SGI Peptide ID NO. 559791
  misc_feature (1014)..(1283): Pfam Id: PF00069 Pfam Desc: Protein kinase domain
  misc_feature (1063)..(1153): Pfam Id: PF07714 Pfam Desc: Protein tyrosine kinase
  misc_feature (4)..(1324): NCBI GI: 46106086 Blast Desc: FG00408.1 [Gibberella zeae PH-1]
  misc_feature (4)..(1324): NCBI GI: 256735300 Blast Desc: [Nectria haematococca mpVI 77-13-4]
  misc_feature (1)..(1324): NCBI GI: 171687873 Blast Desc: protein product [Podospora anserina] gi|170943898|emb|CAP69550.1| protein product [Podospora anserina]
  misc_feature (1)..(1324): NCBI GI: 85111912 Blast Desc: NCU03071 [Neurospora crassa OR74A] gi|28189091|dbj|BAC56234.1| SSK22 like MAPKK kinase [Neurospora crassa] gi|28925934|gb|EAA34928.1| NCU03071 [Neurospora crassa
  misc_feature (64)..(1296): NCBI GI: 156052861 Blast Desc: SS1G_06598 [Sclerotinia sclerotiorum 1980] gi|154704376|gb|EDO04115.1| SS1G_06598 [Sclerotinia sclerotiorum 1980]
  misc_feature (54)..(1309): NCBI GI: 145611712 Blast Desc: MGG_00183 [Magnaporthe grisea 70-15] gi|145018963|gb|EDK03242.1| MGG_00183 [Magnaporthe grisea 70-15]
  misc_feature (43)..(1296): NCBI GI: 154315134 Blast Desc: BC1G_04606 [Botryotinia fuckeliana B05.10] gi|150847569|gb|EDN22762.1| BC1G_04606 [Botryotinia fuckeliana B05.10]
  misc_feature (73)..(1314): NCBI GI: 262204928 Blast Desc: Ssk2-type MAP kinase kinase kinase [Cochliobolus heterostrophus]
  misc_feature (71)..(1319): NCBI GI: 169608255 Blast Desc: SNOG_07196 [Phaeosphaeria nodorum SN15] gi|160701602|gb|EAT85847.2| SNOG_07196 [Phaeosphaeria nodorum SN15]
  misc_feature (75)..(1296): NCBI GI: 121701805 Blast Desc: MAP kinase kinase kinase SskB, [Aspergillus clavatus NRRL 1] gi|119397310|gb|EAW07741.1| MAP kinase kinase kinase SskB, [Aspergillus clavatus NRRL 1]
  misc_feature (185)..(1291): SWISSPROT Homolog: EC 2.7.11.25 Mitogen-activated protein kinase kinase kinase
  misc_feature: Useful for introducing or modulating the production of volatile compounds
MSAETSPRAVRFFQGEVELVQDKAKSGRPIAITTDSDASGSSEDSAPDTADLEEHQDQVSALGPYGDGALSASMTSLTNSTARQRVPTADATATPGPNGVNTRQLQRPHVARTPSNAYAPQRGPTPQPFISTRSTSRRRDPVDNVDYSDEESEGETPSSEGVFEDRFNDETIMFQNLIDDTQPTEDDIQDPANRERLEWHGMLAAVLTGDVVKQEKRRLLGTSDAQGAKSAHKADLWLGIRSKTTGRSFALQRRMIDDARNNLDRIIDEITRFEVQGSAEAGKPDIEQIADIVKKIEKCESLYPSWKALEAAHPSAASPAFHEACDAVLSWYNTNMMIDTELSILKKWVGNEELDFHKTKPRSPSTNGLSDETSFLDRLLKEDGLKSLHDDIDEATKEEHALKTKTLIRRSMLAPISSTIAKAKETLIMNSGAFHKRHLPPYIEEILTLISFPSRLIEEIISVRLAYARKMKETTQQTPILQDQMISQFELLLKLAIRIKQETLTVSQPQQGWQLPPCIDESFDQVILDALKYYFKMLNWKLSRNKNTFKEAEILGQEWEFANEIGRHLLGGDIEVAEQFSNLTYKVLSRLSQTFERELQRKPKESAEDMSKRYMQMLDSVRVRQRMLQRFSRILSDHYENASDMSIALDADDLQYLYERLSVTGHFLVDEIDGIQIIASPSLVGRDEEVRSILRTCLHEQISEDPTDPYLLILRPEAPLTWFGNRSSQPLNIESTDLKLGQMRLIADGSQTRLAHVRSVFLERIDMHLDLIVEARSNLHKVNTRLFEIRKVGFKLSNTFMDSVAIIRKQTQGMNCHDLIQTCFVFATEFGRRSLLYMDSNRRQMNNLKLTKLGLDWVSFICDDCKVTDRRSFRWAVPALEFAMSMTTGRHILALGDDEYARLRAKVSGCMSLLISHFDILGAKSNQAAQSERERIEALVGQFRRFDKNRNIDDEEAAKLIQEQRVAKIAEVDEIQMEVIAERQGLGRVLEVSNEVDRSLAFLSSSATNVTMRWQQGHFVGGGTFGNVYAAMNLDTGHLMAVKEIRLQDPKLIPQIATQIKDEMGVLEVLDHPNVVSYYGIEVHRDRVYIFMEFCSGGSLAGLLEHGRIEDEQVVMVYALQLLEGLAYLHESHIAHRDIKPENILLDHNGVIKYVDFGAAKVIARQGRTLVHGGAASKPNNSMTGTPMYMSPEVIKGENPGHLGAVDVWSLGCVVLEMVTGRRPWSNLDNEWAIMYNIAQGNPPQLPGPDQLSPSGIDFLQRCFHRDPRKRASAVELLQHEWIMCIRNQVVEPPTPSDSSGSAQSTPHPNSAGSRVSAGADGFY

SEQ ID NO: 647 - DNA, 5543 bp, Muscodor strobelii
  misc_feature: SGI EST ID NO. CUFF.1853.1
  misc_feature: Variant of the nucleotide sequence at SEQ ID NO 645
cagattgcatgtggcaaagacacacacctccaattaaagggccaaagtttatctgtgtcgaacatattgaacgagcgtgcagtacttgtcgcagaggtatcccggcaagaggcaaggtatggcaggcgatccgctctgggttagtcgatcatgtctcctccgacccgaccaggaccaaagctcgcatgaagatccggacctgtttttgattgaagacgccacgtgcagagcttcatctcgtcaacgacatgagatccaaggcaagtgcagtcgacgcctgccccttggcaccgtagcacatcctcctcgccctcctcgccctcctcatcgcctctgcttatcgccatcgccatcgccatcactgcatacggccatcaacagttgactttgctgtccgccatccacatccacctatctaaaaacttgtccacgacacgctttagatactcatgacatatagagccaacattggcataatcaaccatcaacaccaccacctcagacccactacaacaataaatatacaataattgtcgggcagattagttccatctatgagcgctccgaccgagatactgtgtgggcttcgcttttagctcacaagtcccgatccgaagctactaccgccaccaccattgcgacagccatcgctggataatcatgtctgcagaaacctctcctcgcgccgtgcgcttcttccagggcgaggtcgagctggtccaggacaaggccaagagcggacggcccatcgccatcaccacggactcggacgcctccggctcctctgaggactccgcccccgacaccgccgacctcgaggagcaccaggaccaggtcagcgctctggggccctacggagacggcgccctgtccgcctccatgacctccctcaccaacagcaccgcccgccagcgcgtcccgaccgccgatgccaccgccacgcccggccccaacggcgtcaacacccgccagttgcagcgaccacacgtcgcccgcaccccttccaatgcctacgccccccagcgcgggcccacgcctcagcccttcatatccacccgctctacctcccgccgtcgcgatcctgtcgacaagttccgcgaccagcagcccgcctacctgcgcatgatgcgccaggatgccccccaacgattacttcgacccgcaaacccccagcgtcgactactcggacgaggagtccgagggagagacgccctcgtctgaaggtgtcttcgaggaccgcttcaatgacgagaccatcatgttccaaaacctcatcgacgacacccaacccaccgaagacgacatacaggacccggcgaatcgagagcgtctggaatggcacgggatgctggccgctgtcctgaccggcgatgtcgtcaagcaagagaaacgccgcctgcttggtacctcggatgctcagggcgccaagtccgcgcacaaggccgacctgtggctggggatcaggtccaagaccacgggccgctcattcgcgttgcagcggaggatgatagacgacgctcgaaacaatctggaccgaataattgacgagatcactcgtttcgaagtccaaggatcggctgaagcgggcaagcccgacatagagcagatcgccgacattgtgaagaagatcgaaaagtgtgaaagtctatatccatcctggaaggccttggaggctgctcatccaagcgcggcatcgccggcatttcatgaggcttgcgatgccgttctatcctggtacaataccaacatgatgattgatactgagctgtccatcctcaagaaatgggtgggcaacgaagagcttgatttccacaagacgaaacccagatcgccgagcaccaatggactcagcgacgaaacgtcattcctagatcgccttttaaaggaagatggtctcaagtcattacatgatgatatcgacgaagcgacaaaggaggagcacgccctcaagacgaagacccttatccgaagaagtatgcttgcgccaatctcaagcacaatagcaaaggccaaagagactctcatcatgaactcgggagcttttcacaaaagacatttgccgccctatattgaagaaattctcaccttgattagtttcccctcccggctcatcgaagaaattatcagcgtgcggcttgcatatgctcgaaaaatgaaggagaccacacagcagacacctatcctccaggaccagatgatctcacaattcgaactcttattaaaacttgccatcagaatcaagcaagaaacgcttactgtctcacagccacaacaaggctggcaactcccaccatgtattgacgaatcgttcgaccaagtcatactggatgctttgaaatactacttcaaaatgctgaactggaagttgagcagaaacaagaacaccttcaaggaagccgagattttgggccaggaatgggaatttgcgaatgagatcggccggcatctgctaggcggtgatatcgaagtggcggaacaattcagcaacctcacctacaaggttctcagtcggctgagccagacgtttgagcgagaactccagaggaagcccaaagaaagcgccgaagacatgagcaagagatacatgcaaatgttggactccgtccgtgttcgccagagaatgttgcagcgtttttcaagaatcctcagcgaccattacgaaaatgcctctgacatgagtatcgctctcgatgccgatgatctacagtatctatatgaacgcctttctgttacagggcattttctggtcgatgaaatcgacggaattcaaatcattgcttccccttcacttgttggtcgagatgaggaagttcgttccatcctgcgaacctgtcttcacgagcagatctcagaagacccaacagatccctatcttctgatactacgcccagaagcgcctcttacatggtttggcaaccggagcagtcagcctctcaacatcgagtctacagatttgaagctcggccagatgcgattgattgcggacggctcacaaactcgactggcacatgttcgaagtgtctttctcgagagaatcgatatgcatttggacctaatcgtggaagcacgatctaatcttcacaaagtcaatacacgactcttcgaaatccgcaaagtcggcttcaaactatccaatacgttcatggatagtgtcgccattatccgaaagcagacacagggaatgaactgccatgacctcatccaaacttgtttcgtattcgcgacggaattcggacgacgttcacttctttacatggacagcaatcgccgccaaatgaacaatctgaagctcacaaagctcggcctagattgggtgagctttatttgtgacgactgcaaggtcacagatcgaaggtcatttcgatgggcagtgccagctttggaattcgccatgagtatgacaaccgggcggcatatcctcgctttaggcgatgatgaatacgctagactgcgtgccaaggtgtccggctgcatgtctctgctcatttcccattttgatattctgggtgcgaaatccaatcaagcggcgcagtctgaacgagaacgcattgaggctctcgttggccaattccgccggtttgacaagaacagaaacatcgatgatgaggaagccgctaaattgatccaagaacagcgagtagccaagattgcagaggtcgatgaaattcagatggaggttatcgcagaaagacagggactgggtcgcgtcttagaagtctccaacgaggtcgacagatcccttgcttttctgtcttcctccgccaccaatgtcacgatgagatggcaacaaggtcatttcgttggtggtggtactttcggaaatgtctacgccgcaatgaacctggatactggtcacctgatggctgtcaaagagatccgactccaggacccgaagttgattccacagatcgcgacacagattaaagatgaaatgggtgttctagaagttcttgaccaccctaatgttgtatcctactacggcattgaagttcacagggatcgtgtatatatcttcatggaattttgttctggcgggtcgttggccggcttgttagagcacggccgtatcgaagatgaacaagtcgtcatggtctatgcactgcagcttctcgaaggattggcttatttgcacgaaagtcacatcgctcatcgtgacatcaagccagagaatatcctcctcgaccacaacggagtaatcaaatatgtcgacttcggagccgccaaagtcatcgcacgtcaaggtcgcaccctagtccacggaggagccgccagcaaaccgaacaactcgatgacaggcacacctatgtacatgtccccggaagtcattaagggagagaatcctggtcacctcggtgctgtcgacgtgtggtcgttgggatgtgtcgtcttagaaatggtcacagggcggcggccatggtccaatcttgacaacgaatgggccataatgtacaatattgcccaaggcaatccaccccaactaccaggtccggatcagttaagtccatcaggcattgatttccttcagcgttgctttcatcgggatccgcgcaagcgagccagcgcggtcgaattgcttcaacacgaatggataatgtgtattcgaaaccaggtcgtcgagccaccgacacccagtgatagcagtggctctgctcagagtacgccacatccaaactcggcaggaagcagggtcagtgcaggcgcggacgggttttattaggaatatcaaccgtctgatgcactaccttcgtcccttgttaccgaggcccacgaacacaatacaatataccccgatccacccgataaggggacgctcgaaccggggacgactctagatggtgtcgtacaaacaccaacagaatcgaaagtactcgcggaatctactacgtttacgagctcgaacttgttggagaaaatgcatgcggcgcaagagtcggcaagaagagcggacgccagagaatcgtatgtgcgaagaaagcgcgccgaatccgatcttacgacatcccatgcggcgatgctgacggtggaagaagaattcttcggcccgtgctctaccagcagccagccgtgaactcattgttttccttttgttgaagaatgtggcatatcgacacgcgagaatgacagcatggtgctttaatgggtgatgtaccaggtgtgtacatggttgtgggatttttataatacgttgcgcggacacggatttgcatcagcgacggagtcttactttttaatgtctgcattgttcagtgccactgcatttatggacggaaactcgtgcaatggatcctttgctactacgatgaaggctactgcgataaagccgcttgctttaggtggcatacggcgctgcgttcgaagatattagatacacgatgaagactacgtaatcattattttcaatatactgctaatgctctctattgctgtttgcaacgttgctattgagcgagaatctgagttaggcttagggttgttagcttttatctgtcaactgtgagacatcatcactgtgtagtttactagctgtcaacataggttgctta

SEQ ID NO: 648 - DNA, 2880 bp, Muscodor strobelii
  misc_feature: SGI cDNA ID NO. 559792
  misc_feature: Encodes the peptide sequence at SEQ ID NO 649
atggggctgcaagacttagacgcgtcgcgtccccctcatcagattcatcgtggcaccgcaccagaaagcagccatggcagcaaatctacggctaaaaccaccactctcgatcttggggcgcccgcccaggagattggtgattctgaggccatgcaacatctccttacacctcacattcttataaagccacatccccccaatcttacgatcaaaccccgtagcctccaacccctgatgcttctgccccgagagcaccttcacctgtctttcctcgacctttcctctccctttgggtcctttgagcactccctctccttcgaatccaacatcaagatcctcgacctcgaacggcgcatcggtggccgccatgtcgtcctccttgcccgcctcgaatccaatcactctgtctatgcaattgagctccagcccaatggcttgtatagtctatgcaagctgggctcatgggtagatctggagcagctgtgcgaacatgccactgtctcttgttcccacttgatccgtttaccggcaaagccccaagcacaaccaaatgcctctcttcccttaactacgccccaattgtcccataacagcaagaaacggaggttggccatcgaagctatacagtctctggtgaagaagccgaagcggtctctgtctatgttgtctgctccctcccagcttagtgaatccttgccgccgtcgacgcccatttccgcggagcaggacgtcctggctcaaaatacaacggaaattacggagcacatacagtctcggggcagctttgaccgtgtggtggacgatgtatctaaggaagccccggaatctatccaagacgggtctctcattgctcccaatagggaatcaatcctaggggatctacaacgccagtatttcgatgcattgaagggatccctcgcgtattttgccaaaggtccactgtctcgagctcgcgcggcatatcatttcgattgcgattctacgctggacatggcggacctgatagccttcctgaggggtctactaacgacgaccacgctgatcgacaaaaaatatcgcgataccattccaaatatccggtcgcaaatgaagaccaatgttgacgataccgacgccgagcaacccaaggccaagccgaaatacaagaaacataagctgaggaaagatggattgtggaatcacgaagacgacctcgtcaagaagtggtggactgagcaacaatctctgttcaaagacgacgaggagtcgaatacaaaatcgacggaacagcaggacgttaaaatgctgacctcgcgtctccgatcgcgagagacccagctgcaaataatcatcctcctagagttgctcgctctagaacctctcctagtggacgagacttcaaatgacgccacgctccccgggcttgcaccaacacaagactcttcacagcagaaagaggtcgcatccaaaaagaagaacaaacaagatctccctaagctcctcaacacccatgcagatcgactgtgtatttggcagtcgaccactttagatgaatttgatgctttgaatgaatcccagggtggcgcgcgacctgaatctcagaaatcttcgaagaccacttctgaccccttaaaggatttttgtcttgacatcgttattcctttcttctccgcgagacttcccgagcactgcgactcgattaacaagaaactaggcggtcccgtgatgccatcacctccgaagtcgacccagaaaagagttgtatccgattccaaagtcaagaccaaacctggtgccgcaacaaaacggccagcgctgagatctactcggactctagacagagttctgtccaaggaaacagaaagaaacagacgcagcatgtcgcggggtcctggcggcgtcatcgcactaatgaggtcggcatctacacctacgctacccctattgaaacgggaagctagtgaaactgcttctctagatagcataccaagagcagaacataacccagctcacgagaaagaaacatctcaagtcagcatcatcgctgcaaagcgtaaatcgactgatgccagagagaagagagatgcttttgtgaaagcagaacttcaggatgctatttccaccctgcgtcgaccaaaccgagagacagtttcaaaggagatagtggaagccagcgaaaggcgagcaactacaagcctatcgcaattaaggaaatcacggaagcctacccaacatcctcgattccaagacgtcgtcaaagcgacgccagctggaaatcgatttcacaacattttagcaagcaatcgcgactctcggcctgcatcatcgatacaacgaccagacacaattcttgaggaatatgatgtcccatcttcctcaagagtcccggaatctgcgcccaggaagcgaatacgaaaggaagtttcggggagcgggtcactttcgctaccaaagctccccactgcaactagagaccagatcacagcgacgccggcgaagtcttcgaaacacagtcgagctttcctttctgtcccagagcacgacgacgacggcgtcgtcctggcatcatcacccgtgatgtctcggaaaatcgcgcaaccaaatttcttggccgtcaagaaacgcgccatgctggatcatagagacagtggtattggaatgttaccttcatcacccaacgggcccatcctgacggaaacgcccatgaaagcccgacaaaacggtactctcaatccaatggatcactatataaccgtaacgcccgttaagagacgattgtcggatggtgttccggtctccgcaagcaaaaacgaaaacactgaaccaacagcgggaaatgagagcgtggcgaaaaccctatatgaacggctgggatgggatgattatgatgacctcgcttga

SEQ ID NO: 649 - protein, 959 aa, Muscodor strobelii
  misc_feature: SGI Peptide ID NO. 559792
  misc_feature (130)..(800): Pfam Id: PF08639 Pfam Desc: DNA replication regulator SLD3
  misc_feature (54)..(923): NCBI GI: 116180360 Blast Desc: CHGG_00808 [Chaetomium globosum CBS 148.51] gi|88185105|gb|EAQ92573.1| CHGG_00808 [Chaetomium globosum CBS 148.51]
  misc_feature (46)..(852): NCBI GI: 85111914 Blast Desc: NCU03072 [Neurospora crassa OR74A] gi|28925935|gb|EAA34929.1| [Neurospora crassa OR74A]
  misc_feature (75)..(958): NCBI GI: 171687875 Blast Desc: protein product [Podospora anserina] gi|170943899|emb|CAP69551.1| protein product [Podospora anserina]
  misc_feature (48)..(958): NCBI GI: 261355900 Blast Desc: conserved [Verticillium albo-atrum VaMs.102]
  misc_feature (46)..(958): NCBI GI: 256732623 Blast Desc: NECHADRAFT_38515 [Nectria haematococca mpVI 77-13-4]
  misc_feature (46)..(856): NCBI GI: 46125441 Blast Desc: FG07098.1 [Gibberella zeae PH-1]
  misc_feature (106)..(959): NCBI GI: 154315132 Blast Desc: BC1G_04605 [Botryotinia fuckeliana B05.10] gi|150847568|gb|EDN22761.1| BC1G_04605 [Botryotinia fuckeliana B05.10]
  misc_feature (110)..(615): NCBI GI: 156052859 Blast Desc: SS1G_06597 [Sclerotinia sclerotiorum 1980] gi|154704375|gb|EDO04114.1| SS1G_06597 [Sclerotinia sclerotiorum 1980]
  misc_feature (59)..(760): NCBI GI: 238498452 Blast Desc: conserved [Aspergillus flavus NRRL3357] gi|220693735|gb|EED50080.1| conserved [Aspergillus flavus NRRL3357]
  misc_feature (59)..(760): NCBI GI: 169781658 Blast Desc: [Aspergillus oryzae RIB40] gi|83774034|dbj|BAE64159.1| protein product [Aspergillus oryzae]
MGLQDLDASRPPHQIHRGTAPESSHGSKSTAKTTTLDLGAPAQEIGDSEAMQHLLTPHILIKPHPPNLTIKPRSLQPLMLLPREHLHLSFLDLSSPFGSFEHSLSFESNIKILDLERRIGGRHVVLLARLESNHSVYAIELQPNGLYSLCKLGSWVDLEQLCEHATVSCSHLIRLPAKPQAQPNASLPLTTPQLSHNSKKRRLAIEAIQSLVKKPKRSLSMLSAPSQLSESLPPSTPISAEQDVLAQNTTEITEHIQSRGSFDRVVDDVSKEAPESIQDGSLIAPNRESILGDLQRQYFDALKGSLAYFAKGPLSRARAAYHFDCDSTLDMADLIAFLRGLLTTTTLIDKKYRDTIPNIRSQMKTNVDDTDAEQPKAKPKYKKHKLRKDGLWNHEDDLVKKWWTEQQSLFKDDEESNTKSTEQQDVKMLTSRLRSRETQLQIIILLELLALEPLLVDETSNDATLPGLAPTQDSSQQKEVASKKKNKQDLPKLLNTHADRLCIWQSTTLDEFDALNESQGGARPESQKSSKTTSDPLKDFCLDIVIPFFSARLPEHCDSINKKLGGPVMPSPPKSTQKRVVSDSKVKTKPGAATKRPALRSTRTLDRVLSKETERNRRSMSRGPGGVIALMRSASTPTLPLLKREASETASLDSIPRAEHNPAHEKETSQVSIIAAKRKSTDAREKRDAFVKAELQDAISTLRRPNRETVSKEIVEASERRATTSLSQLRKSRKPTQHPRFQDVVKATPAGNRFHNILASNRDSRPASSIQRPDTILEEYDVPSSSRVPESAPRKRIRKEVSGSGSLSLPKLPTATRDQITATPAKSSKHSRAFLSVPEHDDDGVVLASSPVMSRKIAQPNFLAVKKRAMLDHRDSGIGMLPSSPNGPILTETPMKARQNGTLNPMDHYITVTPVKRRLSDGVPVSASKNENTEPTAGNESVAKTLYERLGWDDYDDLA

SEQ ID NO: 650 - DNA, 3336 bp, Muscodor strobelii
  misc_feature: SGI EST ID NO. CUFF.1758.0
  misc_feature: Variant of the nucleotide sequence at SEQ ID NO 648
aatatctcgcgtagtctctcgtctctcttcagttgtattgtgcattgccttgagtttgtctgtaactgcatttcctaccatgcatgagcatctttgaacatattttctgtcttccatatgttgtccaatggggctgcaagacttagacgcgtcgcgtccccctcatcagattcatcgtggcaccgcaccagaaagcagccatggcagcaaatctacggctaaaaccaccactctcgatcttggggcgcccgcccaggagattggtgattctgaggccatgcaacatctccttacacctcacattcttataaagccacatccccccaatcttacgatcaaaccccgtagcctccaacccctgatgcttctgccccgagagcaccttcacctgtctttcctcgacctttcctctccctttgggtcctttgagcactccctctccttcgaatccaacatcaagatcctcgacctcgaacggcgcatcggtggccgccatgtcgtcctccttgcccgcctcgaatccaatcactctgtctatgcaattgagctccagcccaatggcttgtatagtctatgcaagctgggctcatgggtagatctggagcagctgtgcgaacatgccactgtctcttgttcccacttgatccgtttaccggcaaagccccaagcacaaccaaatgcctctcttcccttaactacgccccaattgtcccataacagcaagaaacggaggttggccatcgaagctatacagtctctggtgaagaagccgaagcggtctctgtctatgttgtctgctccctcccagcttagtgaatccttgccgccgtcgacgcccatttccgcggagcaggacgtcctggctcaaaatacaacggaaattacggagcacatacagtctcggggcagctttgaccgtgtggtggacgatgtatctaaggaagccccggaatctatccaagacgggtctctcattgctcccaatagggaatcaatcctaggggatctacaacgccagtatttcgatgcattgtattttcaaaagggatccctcgcgtattttgccaaaggtccactgtctcgagctcgcgcggcatatcatttcgattgcgattctacgctggacatggcggacctgatagccttcctgaggggtctactaacgacgaccacgctgatcgacaaaaaatatcgcgataccattccaaatatccggtcgcaaatgaagaccaatgttgacgataccgacgccgagcaacccaaggccaagccgaaatacaagaaacataagctgaggaaagatggattgtggaatcacgaagacgacctcgtcaagaagtggtggactgagcaacaatctctgttcaaagacgacgaggagtcgaatacaaaatcgacggaacagcaggacgttaaaatgctgacctcgcgtctccgatcgcgagagacccagctgcaaataatcatcctcctagagttgctcgctctagaacctctcctagtggacgagacttcaaatgacgccacgctccccgggcttgcaccaacacaagactcttcacagcagaaagaggtcgcatccaaaaagaagaacaaacaagatctccctaagctcctcaacacccatgcagatcgactgtgtatttggcagtcgaccactttagatgaatttgatgctttgaatgaatcccagggtggcgcgcgacctgaatctcagaaatcttcgaagaccacttctgaccccttaaaggatttttgtcttgacatcgttattcctttcttctccgcgagacttcccgagcactgcgactcgattaacaagaaactaggcggtcccgtgatgccatcacctccgaagtcgacccagaaaagagttgtatccgattccaaagtcaagaccaaacctggtgccgcaacaaaacggccagcgctgagatctactcggactctagacagagttctgtccaaggaaacagaaagaaacagacgcagcatgtcgcggggtcctggcggcgtcatcgcactaatgaggtcggcatctacacctacgctacccctattgaaacgggaagctagtgaaactgcttctctagatagcataccaagagcagaacataacccagctcacgagaaagaaacatctcaagtcagcatcatcgctgcaaagcgtaaatcgactgatgccagagagaagagagatgcttttgtgaaagcagaacttcaggatgctatttccaccctgcgtcgaccaaaccgagagacagtttcaaaggagatagtggaagccagcgaaaggcgagcaactacaagcctatcgcaattaaggaaatcacggaagcctacccaacatcctcgattccaagacgtcgtcaaagcgacgccagctggaaatcgatttcacaacattttagcaagcaatcgcgactctcggcctgcatcatcgatacaacgaccagacacaattcttgaggaatatgatgtcccatcttcctcaagagtcccggaatctgcgcccaggaagcgaatacgaaaggaagtttcggggagcgggtcactttcgctaccaaagctccccactgcaactagagaccagatcacagcgacgccggcgaagtcttcgaaacacagtcgagctttcctttctgtcccagagcacgacgacgacggcgtcgtcctggcatcatcacccgtgatgtctcggaaaatcgcgcaaccaaatttcttggccgtcaagaaacgcgccatgctggatcatagagacagtggtattggaatgttaccttcatcacccaacgggcccatcctgacggaaacgcccatgaaagcccgacaaaacggtactctcaatccaatggatcactatataaccgtaacgcccgttaagagacgattgtcggatggtgttccggtctccgcaagcaaaaacgaaaacactgaaccaacagcgggaaatgagagcgtggcgaaaaccctatatgaacggctgggatgggatgattatgatgacctcgcttgatcaaagaggcaggtgcaattgatgagttaatgaatgatgagttttacgttacctactcaaacataagcaaaagcattggaaggcgcatatttgatggatcatccctagaagtactaggtacatgcataggagttgtacatacatttgtccatcattcatattatttacactcatgagcggcgtttgtataccttgtgaaagatctagttgagctgctcaaatgtcaattagaattgccaggggttcaactcttcgatttgtctctctatgacttaattagtctattgtgcttgattgcaagtgattttcgtaaggaggag

SEQ ID NO: 651 - DNA, 2961 bp, Muscodor strobelii
  misc_feature: SGI cDNA ID NO. 559793
  misc_feature: Encodes the peptide sequence at SEQ ID NO 652
atgacaagtctcaaaagatccggcgatgcggatccgtttgcatcaaacctctctagtaaggtctatgtgagatcaacgaagagcgggaaggtccagaagatcgtccgcgaggtctacctgcgacaggatatcccgtgctcctctagaatctgctcaaaatgcttggccacggcaccaaaaagtgctgttggactcgcaactccttttgtgctctcaaatagtccggctggcaccaaggcctatccacaagggcattacctcgttccggacaccaatgccttgctgaacgctatggacctttttgagcaaggatcggccttctttgatgtgattattttgcagaccgtcttggaggagctgcgaaatagatcattgccattgtacaatcgccttatcggattgaccaaaagtcaggaaaaacgattttatgttttcttcaatgagttcaggctcgaaacacatgtcactcgcgaacaagatgagagtatcaacgatcgcaatgatcgagctgtccggtgcgctgtcaagtggtacaatgatcatttggcccagacaaaagcgaagaagatacctattactgtcatgcttacagacgatcgtggaaatcttgaaagggcgaagcaggagaaagttcctgctaccaagctacgcgattatgtcgccggcttaaaagatgccgatcgactgttagacatgattgctgaggcacaagagcgcgaagattccaagcagaaatcgaaggagtttctctacccggaatacttcagtatgtctaagatgatgacaggtgtcaagagcggcatgttgcaccagggaatcttcaacgtttccccatacaactatcttgaaggctccatcagagttcccgcttttcccaaagcgcttctagtactaggaagagacaacatcaaccgttctgtggatggagacacagtagtggtcgaggtgctccccgaagatcagtggaaagcaccttcaaccaaaattatcgaagaggctgctattacaagaaatgagaatgccgataacgatgatacgggatctgatcttgtcacggagaaagagagacgagctcttcaggagcaagtgaaaaagacacaagggtcgaccacagaggcatcaccacaaccgactgcaaaggttgtaggagttatcaagcgcaattggcgtcagtacgtcgggcacatagaccaatcctctgttagtcacggcgcaagtcagggccggaagcaagaaagtgtgttcttgatccccatggacaagaaagtccctaaaattcgtctgcgaacacgacaagctggcgagctactcggtaaacgcatacttgtcacgattgatagctggaatcgtgacagtagacatcctgtcggtcatttcgttcgatcactgggagagctcgagaccaaggctgcagagacggaggcgctgctcctagaatacgatgtacaatatcggccttttcccaagacagtattagactgtctgcccaaggagggccatgactggaaagttcctgctagtacggatgatccaggctggaaggatagagaagatcttcgcggacttctcatttgcagtattgatccaattggctgtcaagatattgacgatgctctccatgctaagcccctcccgaatggaaactttgaagtcggagtacacattgcggacgtgtcacatttcgttaagccggccaatgccatggataccgaagcaagtattcgaggcacaacagtttatctcgttgacaagcgtatcgatatgcttccgatgcttctcggtactgatctctgttcgttaaagccatacgtggagcgttatgcgttttcggttctttgggaattgagtccatcggcagacattgtgaacgtacgattcacaaagtccgtgatcaaatctcgtgaagccttcagctacgaacaagctcagctgcgcatcgacgattcgtcgcagcaggatgacctaaccgctgggatgcggacactgctgatgctctctaagaagctcaagcagaagcgcatggacgctggagcgttaagcctatcatcaccagaagtcaaagtacaaatggaatcagaaacgtcggatcccattgatgtcaagactaaggagctggtggatacaaattcacttgttgaagagttcatgttgctcgcaaatatcagcgtggcagggaagatcaacgatgcgtttccccagacagccatccttcgtcgccatgctgcgccaccgaagaccaactttgatgaacttgcaaatcagctcaaagtcaagcgtggactcgagctacgcttcgactcgtccaaagctctcgcagactctctggatgggtgcgtggattccgccgagccattcttcaataccttgattcgcatcatggcaacgcgatgcatgatgagcgccgagtacttctgcgcgggaacacaatcttaccccgaattccggcactacggtctcgcgtctgagatttacacacatttcacaagtcctatccggcgatatgcggatctagtagcgcatcgccaactcgcagccgccatcgactacgaacccatgcatccggcagtccgctcacgcgggcgtctcgaagccgtatgcaagaacatcaacgtgcgacaccgtaacgctcagctcgcaggccgtgcctctgtcgcgtactacgttggccagtctcttaagggccgtgtcgcggaggaagatggcttcatcatgaagatattcagtaatggattcgtcgtcctcgtgccgcgtttcggtatcgagagcctgatccggctgagagatcttgcagatactgagcctgagagtaattttgacgctgagacatatactctgacgttgagtggtagttacgaggcgaccgttgagctgttccagaaggttcgtgtgaggatccgagatgtgaaggatgaggctactggtaaacgcggagctaagatggatcttgtgcgtacgggctag

SEQ ID NO: 652 - protein, 986 aa, Muscodor strobelii
  misc_feature: SGI Peptide ID NO. 559793
  misc_feature (516)..(849): Pfam Id: PF00773 Pfam Desc: RNB domain
  misc_feature (1)..(983): NCBI GI: 39975321 Blast Desc: MGG_00193 [Magnaporthe grisea 70-15] gi|145018949|gb|EDK03228.1| MGG_00193 [Magnaporthe grisea 70-15]
  misc_feature (1)..(983): NCBI GI: 256735096 Blast Desc: [Nectria haematococca mpVI 77-13-4]
  misc_feature (1)..(983): NCBI GI: 46108604 Blast Desc: FG01184.1 [Gibberella zeae PH-1]
  misc_feature (1)..(983): NCBI GI: 116180372 Blast Desc: conserved [Chaetomium globosum CBS 148.51] gi|88185111|gb|EAQ92579.1| conserved [Chaetomium globosum CBS 148.51]
  misc_feature (3)..(985): NCBI GI: 85111130 Blast Desc: mitotic control protein dis3 [Neurospora crassa OR74A] gi|28925520|gb|EAA34551.1| mitotic control protein dis3 [Neurospora crassa OR74A]
  misc_feature (1)..(985): NCBI GI: 171687865 Blast Desc: protein product [Podospora anserina] gi|170943894|emb|CAP69546.1| protein product [Podospora anserina]
  misc_feature (1)..(983): NCBI GI: 156062888 Blast Desc: SS1G_01560 [Sclerotinia sclerotiorum 1980] gi|154696896|gb|EDN96634.1| SS1G_01560 [Sclerotinia sclerotiorum 1980]
  misc_feature (3)..(983): NCBI GI: 189188860 Blast Desc: ribonuclease R [Pyrenophora tritici-repentis Pt-1C-BFP] gi|187972375|gb|EDU39874.1| ribonuclease R [Pyrenophora tritici-repentis Pt-1C-BFP]
  misc_feature (60)..(983): NCBI GI: 169623574 Blast Desc: SNOG_15030 [Phaeosphaeria nodorum SN15] gi|160705007|gb|EAT77573.2| SNOG_15030 [Phaeosphaeria nodorum SN15]
  misc_feature (1)..(984): NCBI GI: 119500108 Blast Desc: exosome complex exonuclease exoribonuclease (Rrp44), [Neosartorya fischeri NRRL 181] gi|119414976|gb|EAW24914.1| exosome complex exonuclease exoribonuclease (Rrp44), [Neosartorya
MTSLKRSGDADPFASNLSSKVYVRSTKSGKVQKIVREVYLRQDIPCSSRICSKCLATAPKSAVGLATPFVLSNSPAGTKAYPQGHYLVPDTNALLNAMDLFEQGSAFFDVIILQTVLEELRNRSLPLYNRLIGLTKSQEKRFYVFFNEFRLETHVTREQDESINDRNDRAVRCAVKWYNDHLAQTKAKKIPITVMLTDDRGNLERAKQEKVPATKLRDYVAGLKDADRLLDMIAEAQEREDSKQKSKEFLYPEYFSMSKMMTGVKSGMLHQGIFNVSPYNYLEGSIRVPAFPKALLVLGRDNINRSVDGDTVVVEVLPEDQWKAPSTKIIEEAAITRNENADNDDTGSDLVTEKERRALQEQVKKTQGSTTEASPQPTAKVVGVIKRNWRQYVGHIDQSSVSHGASQGRKQESVFLIPMDKKVPKIRLRTRQAGELLGKRILVTIDSWNRDSRHPVGHFVRSLGELETKAAETEALLLEYDVQYRPFPKTVLDCLPKEGHDWKVPASTDDPGWKDREDLRGLLICSIDPIGCQDIDDALHAKPLPNGNFEVGVHIADVSHFVKPANAMDTEASIRGTTVYLVDKRIDMLPMLLGTDLCSLKPYVERYAFSVLWELSPSADIVNVRFTKSVIKSREAFSYEQAQLRIDDSSQQDDLTAGMRTLLMLSKKLKQKRMDAGALSLSSPEVKVQMESETSDPIDVKTKELVDTNSLVEEFMLLANISVAGKINDAFPQTAILRRHAAPPKTNFDELANQLKVKRGLELRFDSSKALADSLDGCVDSAEPFFNTLIRIMATRCMMSAEYFCAGTQSYPEFRHYGLASEIYTHFTSPIRRYADLVAHRQLAAAIDYEPMHPAVRSRGRLEAVCKNINVRHRNAQLAGRASVAYYVGQSLKGRVAEEDGFIMKIFSNGFVVLVPRFGIESLIRLRDLADTEPESNFDAETYTLTLSGSYEATVELFQKVRVRIRDVKDEATGKRGAKMDLVRTG

SEQ ID NO: 653 - DNA, 3715 bp, Muscodor strobelii
  misc_feature: SGI EST ID NO. CUFF.1762.0
  misc_feature: Variant of the nucleotide sequence at SEQ ID NO 651
acctaggctcgcctgtaggtatcgcctaagaactcgactctgacaaacgccatgacgttgctgattcgttcaatttaccgccttagcttttttgcctccctcagcattcaacagatcacgtctatcgatagacaatcaacagagcgcaaactcaatcaccaaagcagcgcaacaacgcaggaagagcaaggattaattcacgtctaagaacgaaacgccttgcattccattccagataaaccaaagagtatagcgtcacatttgggacttgtcgagatgacaagtctcaaaagatccggcgatgcggatccgtttgcatcaaacctctctagtaaggtctatgtgagatcaacgaagagcgggaaggtccagaagatcgtccgcgaggtctacctgcgacaggatatcccgtgctcctctagaatctgctcaaaatgcttggccacggcaccaaaaagtgctgttggactcgcaactccttttgtgctctcaaatagtccggctggcaccaaggcctatccacaagggcattacctcgttccggacaccaatgccttgctgaacgctatggacctttttgagcaaggatcggccttctttgatgtgattattttgcagaccgtcttggaggagctgcgaaatagatcattgccattgtacaatcgccttatcggattgaccaaaagtcaggaaaaacgattttatgttttcttcaatgagttcaggctcgaaacacatgtcactcgcgaacaagatgagagtatcaacgatcgcaatgatcgagctgtccggtgcgctgtcaagtggtacaatgatcatttggcccagacaaaagcgaagaagatacctattactgtcatgcttacagacgatcgtggaaatcttgaaagggcgaagcaggagaaagttcctgctaccaagctacgcgattatgtcgccggcttaaaagatgccgatcgactgttagacatgattgctgaggcacaagagcgcgaagattccaagcagaaatcgaaggagtttctctacccggaatacttcagtatgtctaagatgatgacaggtgtcaagagcggcatgttgcaccagggaatcttcaacgtttccccatacaactatcttgaaggctccatcagagttcccgcttttcccaaagcgcttctagtactaggaagagacaacatcaaccgttctgtggatggagacacagtagtggtcgaggtgctccccgaagatcagtggaaagcaccttcaaccaaaattatcgaagaggctgctattacaagaaatgagaatgccgataacgatgatacgggatctgatcttgtcacggagaaagagagacgagctcttcaggagcaagtgaaaaagacacaagggtcgaccacagaggcatcaccacaaccgactgcaaaggttgtaggagttatcaagcgcaattggcgtcagtacgtcgggcacatagaccaatcctctgttagtcacggcgcaagtcagggccggaagcaagaaagtgtgttcttgatccccatggacaagaaagtccctaaaattcgtctgcgaacacgacaagctggcgagctactcggtaaacgcatacttgtcacgattgatagctggaatcgtgacagtagacatcctgtcggtcatttcgttcgatcactgggagagctcgagaccaaggctgcagagacggaggcgctgctcctagaatacgatgtacaatatcggccttttcccaagacagtattagactgtctgcccaaggagggccatgactggaaagttcctgctagtacggatgatccaggctggaaggatagagaagatcttcgcggacttctcatttgcagtattgatccaattggctgtcaagatattgacgatgctctccatgctaagcccctcccgaatggaaactttgaagtcggagtacacattgcggacgtgtcacatttcgttaagccggccaatgccatggataccgaagcaagtattcgaggcacaacagtttatctcgttgacaagcgtatcgatatgcttccgatgcttctcggtactgatctctgttcgttaaagccatacgtggagcgttatgcgttttcggttctttgggaattgagtccatcggcagacattgtgaacgtacgattcacaaagtccgtgatcaaatctcgtgaagccttcagctacgaacaagctcagctgcgcatcgacgattcgtcgcagcaggatgacctaaccgctgggatgcggacactgctgatgctctctaagaagctcaagcagaagcgcatggacgctggagcgttaagcctatcatcaccagaagtcaaagtacaaatggaatcagaaacgtcggatcccattgatgtcaagactaaggagctggtggatacaaattcacttgttgaagagttcatgttgctcgcaaatatcagcgtggcagggaagatcaacgatgcgtttccccagacagccatccttcgtcgccatgctgcgccaccgaagaccaactttgatgaacttgcaaatcagctcaaagtcaagcgtggactcgagctacgcttcgactcgtccaaagctctcgcagactctctggatgggtgcgtggattccgccgagccattcttcaataccttgattcgcatcatggcaacgcgatgcatgatgagcgccgagtacttctgcgcgggaacacaatcttaccccgaattccggcactacggtctcgcgtctgagatttacacacatttcacaagtcctatccggcgatatgcggatctagtagcgcatcgccaactcgcagccgccatcgactacgaacccatgcatccggcagtccgctcacgcgggcgtctcgaagccgtatgcaagaacatcaacgtgcgacaccgtaacgctcagctcgcaggccgtgcctctgtcgcgtactacgttggccagtctcttaagggccgtgtcgcggaggaagatggcttcatcatgaagatattcagtaatggattcgtcgtcctcgtgccgcgtttcggtatcgagagcctgatccggctgagagatcttgcagatactgagcctgagagtaattttgacgctgagacatatactctgacgttgagtggtagttacgaggcgaccgttgagctgttccagaaggttcgtgtgaggatccgagatgtgaaggatgaggctactggtaaacgcggagctaagatggatcttgtgcgtacgggctaggagcacagtttgtccttggggaaatcgagagatcgttgatcctgctggtaaatgaggaaattctgtactacgcagaagtatgagtgtctgagtattgagggaaaatgagacatggccatagggacaggagatgtcgatgaatcgatagctacctagtttacacaaatccaccacacactcgcgccccatctcctcgcctcagtctttttgcgatctgtgagacggtatcttgaagtgctggtgtatgacttttcataaaattattatttcgtatatcctactcggagtagattcaaagaacgaaggtaccgctagaagttttacgactcagtcaacatccgtatacgctaggcactcagaggtactctgatctgataatcatcaaaatatgcatcccatttagtcccggagaaccaccaaccgttcagtgctcccttccatccttacactggcctgtctgaatttgagcatatattac

SEQ ID NO: 654 - DNA, 1260 bp, Muscodor strobelii
  misc_feature: SGI cDNA ID NO. 559794
  misc_feature: Encodes the peptide sequence at SEQ ID NO 655
atggataccgaagcaagtattcgaggcacaacagtttatctcgttgacaagcgtatcgatatgcttccgatgcttctcggtactgatctctgttcgttaaagccatacgtggagcgttatgcgttttcggttctttgggaattgagtccatcggcagacattgtgaacgtacgattcacaaagtccgtgatcaaatctcgtgaagccttcagctacgaacaagctcagctgcgcatcgacgattcgtcgcagcaggatgacctaaccgctgggatgcggacactgctgatgctctctaagaagctcaagcagaagcgcatggacgctggagcgttaagcctatcatcaccagaagtcaaagtacaaatggaatcagaaacgtcggatcccattgatgtcaagactaaggagctggtggatacaaattcacttgttgaagagttcatgttgctcgcaaatatcagcgtggcagggaagatcaacgatgcgtttccccagacagccatccttcgtcgccatgctgcgccaccgaagaccaactttgatgaacttgcaaatcagctcaaagtcaagcgtggactcgagctacgcttcgactcgtccaaagctctcgcagactctctggatgggtgcgtggattccgccgagccattcttcaataccttgattcgcatcatggcaacgcgatgcatgatgagcgccgagtacttctgcgcgggaacacaatcttaccccgaattccggcactacggtctcgcgtctgagatttacacacatttcacaagtcctatccggcgatatgcggatctagtagcgcatcgccaactcgcagccgccatcgactacgaacccatgcatccggcagtccgctcacgcgggcgtctcgaagccgtatgcaagaacatcaacgtgcgacaccgtaacgctcagctcgcaggccgtgcctctgtcgcgtactacgttggccagtctcttaagggccgtgtcgcggaggaagatggcttcatcatgaagatattcagtaatggattcgtcgtcctcgtgccgcgtttcggtatcgagagcctgatccggctgagagatcttgcagatactgagcctgagagtaattttgacgctgagacatatactctgacgttgagtggtagttacgaggcgaccgttgagctgttccagaaggttcgtgtgaggatccgagatgtgaaggatgaggctactggtaaacgcggagctaagatggatcttgtgcgtacgggctag

SEQ ID NO: 655 - protein, 419 aa, Muscodor strobelii
  misc_feature: SGI Peptide ID NO. 559794
  misc_feature (1)..(282): Pfam Id: PF00773 Pfam Desc: RNB domain
  misc_feature (1)..(418): NCBI GI: 85111130 Blast Desc: mitotic control protein dis3 [Neurospora crassa OR74A] gi|28925520|gb|EAA34551.1| mitotic control protein dis3 [Neurospora crassa OR74A]
  misc_feature (1)..(416): NCBI GI: 39975321 Blast Desc: MGG_00193 [Magnaporthe grisea 70-15] gi|145018949|gb|EDK03228.1| MGG_00193 [Magnaporthe grisea 70-15]
  misc_feature (1)..(416): NCBI GI: 46108604 Blast Desc: FG01184.1 [Gibberella zeae PH-1]
  misc_feature (1)..(418): NCBI GI: 171687865 Blast Desc: protein product [Podospora anserina] gi|170943894|emb|CAP69546.1| protein product [Podospora anserina]
  misc_feature (1)..(416): NCBI GI: 116180372 Blast Desc: conserved [Chaetomium globosum CBS 148.51] gi|88185111|gb|EAQ92579.1| conserved [Chaetomium globosum CBS 148.51]
  misc_feature (1)..(416): NCBI GI: 261355896 Blast Desc: mitotic control protein dis3 [Verticillium albo-atrum VaMs.102]
  misc_feature (1)..(416): NCBI GI: 156062888 Blast Desc: SS1G_01560 [Sclerotinia sclerotiorum 1980] gi|154696896|gb|EDN96634.1| SS1G_01560 [Sclerotinia sclerotiorum 1980]
  misc_feature (1)..(416): NCBI GI: 169623574 Blast Desc: SNOG_15030 [Phaeosphaeria nodorum SN15] gi|160705007|gb|EAT77573.2| SNOG_15030 [Phaeosphaeria nodorum SN15]
  misc_feature (1)..(416): NCBI GI: 189188860 Blast Desc: ribonuclease R [Pyrenophora tritici-repentis Pt-1C-BFP] gi|187972375|gb|EDU39874.1| ribonuclease R [Pyrenophora tritici-repentis Pt-1C-BFP]
  misc_feature (53)..(416): NCBI GI: 154314786 Blast Desc: BC1G_04102 [Botryotinia fuckeliana B05.10] gi|150848724|gb|EDN23917.1| BC1G_04102 [Botryotinia fuckeliana B05.10]
  misc_feature (1)..(340): SWISSPROT Homolog: EC 3.1.13.1 Exoribonuclease II
MDTEASIRGTTVYLVDKRIDMLPMLLGTDLCSLKPYVERYAFSVLWELSPSADIVNVRFTKSVIKSREAFSYEQAQLRIDDSSQQDDLTAGMRTLLMLSKKLKQKRMDAGALSLSSPEVKVQMESETSDPIDVKTKELVDTNSLVEEFMLLANISVAGKINDAFPQTAILRRHAAPPKTNFDELANQLKVKRGLELRFDSSKALADSLDGCVDSAEPFFNTLIRIMATRCMMSAEYFCAGTQSYPEFRHYGLASEIYTHFTSPIRRYADLVAHRQLAAAIDYEPMHPAVRSRGRLEAVCKNINVRHRNAQLAGRASVAYYVGQSLKGRVAEEDGFIMKIFSNGFVVLVPRFGIESLIRLRDLADTEPESNFDAETYTLTLSGSYEATVELFQKVRVRIRDVKDEATGKRGAKMDLVRTG

SEQ ID NO: 656 - DNA, 3715 bp, Muscodor strobelii; identical to SEQ ID NO: 653
  misc_feature: SGI EST ID NO. CUFF.1762.0
  misc_feature: Variant of the nucleotide sequence at SEQ ID NO 654

SEQ ID NO: 657 - DNA, 1941 bp, Muscodor strobelii
  misc_feature: SGI cDNA ID NO. 559795
  misc_feature: Reduced expression when VOC is produced
  misc_feature: Encodes the peptide sequence at SEQ ID NO 658
atgtattccacccagcccaacggcgctgagggtgcgaccatcaatcccgcgaccatcaaccctgccgccctcaatccagaactcctaaatccaacaaattcccgagggttgaagcggagtcgctcccccgaaacctaccaggacgcgccgacatctgagacccctggagacgatgattcgaagcagccaagaaagcgaggccgaccgatgaaatcgcgaatgtcagcagacagctatcccgaccccgcgaaccacgattcaactgcattacctccgccccaaatgtcgcaatcgctgccgccgcagactccgcagtcgcagagcgcgtctttgcctccaccggccgggaactacacgcccgcccaggtctccccgccgcccaagactacacccaccaagacgacactgaaggcgctgccgacggtccgcgaccacacgacggaccagcttgggccggccggtgatgaatacctgccgcgcgaatccgacgaggcgggcgagaagaaggtgatgcccaacggacagctgcttggcggccgcgagtaccgttgccgcactttcctcgtcccccagcgaggcgacaaactcttcatgcttgcgaccgaatgcgcaagagtcctgggataccgagactcataccttctctttaacaagaacaggtcgctcttcaagatcattgccaaccaggtcgagaaagatgatctcgtccaacaggaaatcttgcctttctcataccggtcgcgccagattgccatcgttaccgctcgctccatgttccgccagtttggaagccgggtgattgtcaatggcaggagagtgcgggacgactactgggagggcaaggcgcggaagcagggcttcaccgaggccgaccttgccggagagaagagaccaggcgcaggcaaggccagggaagccgcggcggaggcaaacaacaacatgccaccactcccaggaggccctcacggcgagattgtttacgcgactaccacgcagtatggtggtgctccccagccccagctcgtgcaaccaggtatgatgggaccgccaggatcctcgacccgaatgcccatgataacagttggaccagatctgaatgacacaaggacgcgagactacagcaacttcatcaagggcggcccccgccaggagatcaccggcccggcctaccaggacaggacgcaatccagccccctggccgagattcaccagcaggcgcaccatgcggccgagttcaaccgcaccgtcaaccagggccgcgagatgcgcacagagtacctgcagaacatgtggcgaaggccccatgagcagcccgcgacttcgcagccggtcgccaccgagcctagcttgccaactacgagaccagtgcagtcgccgcacgcaactcccgcgggcatggcatcgtcgggcattctcgccaaccaaagtccccagatgatgatgacggcgccgccatactcacagccaatccactcgcagcaggccatgaaccagacccccatgcgagccatgccgcagccgtcaagccagaaacaagcaaggccgcccaacctgcagtctggtccgagtaacatgtcacagggagctgccgcgtataattatggctcgtccaacccaatgtggggaccccctcagacaccccatcattacactggctataccacgcaagctcaggcttcgcctcatccccaacagtcaccggctccccaattgcgccatccaagcggaacaccacagatgcaacctagcaccatgcagtatcccgcgatgcagggccttcctcacggctacccgggcccggcacaaggcatgtatcctcccgagcagactccacggcaattcatgccgcaaaatccggcccctgggcctgccgtcacctcggcttgggcgaatccccagacttctgctggtggaagctggtggcccaaccagccgcagtga

SEQ ID NO: 658 - protein, 646 aa, Muscodor strobelii
  misc_feature: SGI Peptide ID NO. 559795
  misc_feature (170)..(270): Pfam Id: PF08624 Pfam Desc: Chromatin remodelling complex subunit
  misc_feature (1)..(646): NCBI GI: 116180376 Blast Desc: CHGG_00816 [Chaetomium globosum CBS 148.51] gi|88185113|gb|EAQ92581.1| CHGG_00816 [Chaetomium globosum CBS 148.51]
  misc_feature (1)..(641): NCBI GI: 46108602 Blast Desc: FG01183.1 [Gibberella zeae PH-1]
  misc_feature (1)..(646): NCBI GI: 85111302 Blast Desc: NCU03064 [Neurospora crassa OR74A] gi|28925616|gb|EAA34636.1| conserved [Neurospora crassa OR74A]
  misc_feature (1)..(641): NCBI GI: 256734376 Blast Desc: NECHADRAFT_98717 [Nectria haematococca mpVI 77-13-4]
  misc_feature (70)..(646): NCBI GI: 171687863 Blast Desc: protein product [Podospora anserina] gi|170943893|emb|CAP69545.1| protein product [Podospora anserina]
  misc_feature (171)..(646): NCBI GI: 261355897 Blast Desc: chromatin structure-remodeling complex protein RSC7 [Verticillium albo-atrum VaMs.102]
  misc_feature (22)..(646): NCBI GI: 156062892 Blast Desc: SS1G_01562 [Sclerotinia sclerotiorum 1980] gi|154696898|gb|EDN96636.1| SS1G_01562 [Sclerotinia sclerotiorum 1980]
  misc_feature (57)..(646): NCBI GI: 154314794 Blast Desc: BC1G_04106 [Botryotinia fuckeliana B05.10] gi|150848728|gb|EDN23921.1| BC1G_04106 [Botryotinia fuckeliana B05.10]
  misc_feature (136)..(498): NCBI GI: 145611702 Blast Desc: MGG_11643 [Magnaporthe grisea 70-15] gi|145018953|gb|EDK03232.1| MGG_11643 [Magnaporthe grisea 70-15]
  misc_feature (7)..(494): NCBI GI: 212542781 Blast Desc: nuclear localization protein, [Penicillium marneffei ATCC 18224] gi|210066452|gb|EEA20545.1| nuclear localization protein, [Penicillium marneffei ATCC 18224]
  misc_feature: Useful for introducing or modulating the production of volatile compounds
MYSTQPNGAEGATINPATINPAALNPELLNPTNSRGLKRSRSPETYQDAPTSETPGDDDSKQPRKRGRPMKSRMSADSYPDPANHDSTALPPPQMSQSLPPQTPQSQSASLPPPAGNYTPAQVSPPPKTTPTKTTLKALPTVRDHTTDQLGPAGDEYLPRESDEAGEKKVMPNGQLLGGREYRCRTFLVPQRGDKLFMLATECARVLGYRDSYLLFNKNRSLFKIIANQVEKDDLVQQEILPFSYRSRQIAIVTARSMFRQFGSRVIVNGRRVRDDYWEGKARKQGFTEADLAGEKRPGAGKAREAAAEANNNMPPLPGGPHGEIVYATTTQYGGAPQPQLVQPGMMGPPGSSTRMPMITVGPDLNDTRTRDYSNFIKGGPRQEITGPAYQDRTQSSPLAEIHQQAHHAAEFNRTVNQGREMRTEYLQNMWRRPHEQPATSQPVATEPSLPTTRPVQSPHATPAGMASSGILANQSPQMMMTAPPYSQPIHSQQAMNQTPMRAMPQPSSQKQARPPNLQSGPSNMSQGAAAYNYGSSNPMWGPPQTPHHYTGYTTQAQASPHPQQSPAPQLRHPSGTPQMQPSTMQYPAMQGLPHGYPGPAQGMYPPEQTPRQFMPQNPAPGPAVTSAWANPQTSAGGSWWPNQPQ

SEQ ID NO: 659 - DNA, 5093 bp, Muscodor strobelii
  misc_feature: SGI EST ID NO. CUFF.2035.1
  misc_feature: Variant of the nucleotide sequence at SEQ ID NO 657
cagacgacgggagatggaaagacacatagccaaaacgaggtcttgttcacccgcccgctattattcatcaaaattcaaaccgactaacccataatttcaggtcgatagtatggagttagcaccgccgttgtcatcgtcatcatttccatcatccgtcgttcttcgccgtcatctcagccccggaaagcgacttgaggaggcgcagatccgttatccatcatctgtgaagtatgcgcggtggcacaaaagattcaagcggatagttgtctgagacgccgatacacatgatatattcttcctgcttaggtgcagccgtctaacgcagcgaggtccacatcatcaaatggtacttgcataagacgctatctcgaaatacccacttggactatcatctgccacactccgttgccctagcctgtccgttcgagcgctcgctcctcgagtccttgttcatcatcttgtccgtctcgcccgctcagggcttgctgggcacgcgcaagacagaccccgtacgagacacgctgccagcccttgcaactcgtcgttgctctttgttctgttctgctcatctctgatgcgctgctgtgtcctccgttttggccgtcggtgttatccccacaaatcgaacatccacgttcagactacagccaggttttatccaagccatccggcgaccccatacctgctgcccctcagctcaggcaaactcgaaatcgcatgcttgcacgtaacagtttgttgttagttattaacgagcaagatacctagctaccagtagagcaagactctgagccatacatggcccatcgcgagcaacaagggattagcaaagtggttcccttggtattgcgcccgaccaaccagagggcgggttggcaataacatcctccattccacttccacatacgatcccgtacacatctcgtacatacatccgtactaacctgcatccacctacatacgactgggaagtacatacagcagcttgtacttgcatgcacgttcgcattcgcccatttgcactctctcatcaatcaaacacagagccttgagagttgaaacaaatcgcattgcccgccctcgcacagctcgcaacctagctgggactgcgtgtgtttagccaaggtgttgtagctaattggagtctctctgtttgagctgacttcttaccctgccacttccgtctggaggcattcgaagcactcgaggtcttcgctgctcgtgcctcgcctctgccggtaccctccgcactgtgcgttattcccatcgccgaagcatgcccttgctcgccggcgtcgagcagatctacacagactactcgttcgtgcttgtgcttcctgggctgcatctcgttattctccttcgtccgcacacccccctcgctctcccgcccccccttcccctcgaggcagccagaccagaggcgcataccgcatagacatacatccacaataccacaccttgccatccctctccaagatctactaccctcatcttgtcgcgcgcgtcattccaaaacctcgtcctgcgatttattcatccaactatatcaagacacgtcgctctgcaggcaccgcctttctccacgtctcctcccgccgccgctgcttgacgtgcaacatcgcatcgtcgccagcccgctcgaatgtattccacccagcccaacggcgctgagggtgcgaccatcaatcccgcgaccatcaaccctgccgccctcaatccagaactcctaaatccaacaaattcccgagggttgaagcggagtcgctcccccgaaacctaccaggacgcgccgacatctgagacccctggagacgatggtaagtcgcacgctgtgttcgttcgtgtagctctaccgctgcgcactggagccccgatccggggatttcatgtaacagtgcctggtctatcaatgactttgtcacgatcgatgcaatggtcaccatgcgacccgtttgcgcttgctaaaccccgcgttccctacagattcgaagcagccaagaaagcgaggccgaccgatgaaatcgcgaatgtcagcagacagctatcccgaccccgcgaaccacgattcaactgcattacctccgccccaaatgtcgcaatcgctgccgccgcagactccgcagtcgcagagcgcgtctttgcctccaccggccgggaactacacgcccgcccaggtctccccgccgcccaagactacacccaccaagacgacactgaaggcgctgccgacggtccgcgaccacacgacggaccagcttgggccggccggtgatgaatacctgccgcgcgaatccgacgaggcgggcgagaagaaggtgatgcccaacggacagctgcttggcggccgcgagtaccgttgccgcactttcctcgtcccccagcgaggcgacaaactcttcatgcttgcgaccgaatgcgcaagagtcctgggataccgagactcataccttctctttaacaagaacaggtcgctcttcaagatcattgccaaccaggtcgagaaagatgatctcgtccaacaggaaatcttgcctttctcataccggtcgcgccagattgccatcgttaccgctcgctccatgttccgccagtttggaagccgggtgattgtcaatggcaggagagtgcgggacgactactgggagggcaaggcgcggaagcagggcttcaccgaggccgaccttgccggagagaagagaccaggcgcaggcaaggccagggaagccgcggcggaggcaaacaacaacatgccaccactcccaggaggccctcacggcgagattgtttacgcgactaccacgcagtatggtggtgctccccagccccagctcgtgcaaccagatctgaatgacacaaggacgcgagactacagcaacttcatcaagggcggcccccgccaggagatcaccggcccggcctaccaggacaggacgcaatccagccccctggccgagattcaccagcaggcgcaccatgcggccgagttcaaccgcaccgtcaaccagggccgcgagatgcgcacagagtacctgcagaacatgtggcgaaggccccatgagcagcccgcgacttcgcagccggtcgccaccgagcctagcttgccaactacgagaccagtgcagtcgccgcacgcaactcccgcgggcatggcatcgtcgggcattctcgccaaccaaagtccccagatgatgatgacggcgccgccatactcacagccaatccactcgcagcaggccatgaaccagacccccatgcgagccatgccgcagccgtcaagccagaaacaagcaaggccgcccaacctgcagtctggtccgagtaacatgtcacagggagctgccgcgtataattatggctcgtccaacccaatgtggggaccccctcagacaccccatcattacactggctataccacgcaagctcaggcttcgcctcatccccaacagtcaccggctccccaattgcgccatccaagcggaacaccacagatgcaacctagcaccatgcagtatcccgcgatgcagggccttcctcacggctacccgggcccggcacaaggcatgtatcctcccgagcagactccacggcaattcatgccgcaaaatccggcccctgggcctgccgtcacctcggcttgggcgaatccccagacttctgctggtggaagctggtggcccaaccagccgcagtgataacggatgcgcatgcactcgatgatgagtaccctgacgtggttcaagggctatttgatgctgaatatgatggcctgctcagctatcatggatccgtgtccatgctacctatattctgccctcggccggccatagaggcgtccaagaaggcttttgatttgcccctccacccctattccgtacgtcttttggtcacttttcattcattctggggccagtgaagacttaacgagcttttttttgcatgaacatggaataagaacgatatcattcgatttccatctatcaccggagttgggcagcatttgcatatgcgcatgataccactgttgttttgctagtctcatttacgctgctacgaatgctgtcctgcgctctttctggcacgttgatcggccctttacgcatggcgttgtcgcttgccacgttgtttggcgactcagcatgttgcctcatccgtctgctacctcccagccactcgtgacggttcaagacaagactgttataactaggatcagtcatgtggccacagttatttccggacgatgcgagcctgtcaacctgtcaagttgctaccattgcattatacaggttaccaaagctgctgatcttggttcagtttcttgacgaatcaagctatggttgccactagctgagagtctagaaactctatacggttgtcttcagaccgctggatttctagagacaggtgtcccgccgaattatctagacatcgtctactcaacctgaacttatccctcagtgtagataatgtcatttgaattgtctgtctgggctgcggactcccctctctgcacaaattggccgcattggtggagttgcaattggttttgtcttcctgttttccaatttattcacatacgcctccttagcttttacgctgagtggatttgatttaacattgtcaaggttttggtttataagttcagtgcatcaatgatacatacgggaggctctatatgcatgctctgctcattgagtgagccgggtgcgcagcctcatcttctggcagggtctttttccttgcgtttcgaaatggacgaggggcaatctgcatcaatgtcacggatatcgagcttaggagtcaagtttgtgtttttctcgccacctgtagccttcgaaaagaaggttctatcacattgtgtatggtcgagctggtcatctaggaatagccgcgcaaaaggcagtgcatggaagcgcaacaagttaatattacaaatcatagtcaacaaaatatatctacatcgttgtgactatcatatgttcataaactagcgcaaaatagtgaccctatcattgtgagctatgtacacgttcggattgcgtgtgagaagttaggtagttaagagtcggccttcactatttcgagacgcgcga

SEQ ID NO: 660 - DNA, 1884 bp, Muscodor strobelii
  misc_feature: SGI cDNA ID NO. 559796
  misc_feature: Reduced expression when VOC is produced
  misc_feature: Encodes the peptide sequence at SEQ ID NO 661
atgtattccacccagcccaacggcgctgagggtgcgaccatcaatcccgcgaccatcaaccctgccgccctcaatccagaactcctaaatccaacaaattcccgagggttgaagcggagtcgctcccccgaaacctaccaggacgcgccgacatctgagacccctggagacgatgattcgaagcagccaagaaagcgaggccgaccgatgaaatcgcgaatgtcagcagacagctatcccgaccccgcgaaccacgattcaactgcattacctccgccccaaatgtcgcaatcgctgccgccgcagactccgcagtcgcagagcgcgtctttgcctccaccggccgggaactacacgcccgcccaggtctccccgccgcccaagactacacccaccaagacgacactgaaggcgctgccgacggtccgcgaccacacgacggaccagcttgggccggccggtgatgaatacctgccgcgcgaatccgacgaggcgggcgagaagaaggtgatgcccaacggacagctgcttggcggccgcgagtaccgttgccgcactttcctcgtcccccagcgaggcgacaaactcttcatgcttgcgaccgaatgcgcaagagtcctgggataccgagactcataccttctctttaacaagaacaggtcgctcttcaagatcattgccaaccaggtcgagaaagatgatctcgtccaacaggaaatcttgcctttctcataccggtcgcgccagattgccatcgttaccgctcgctccatgttccgccagtttggaagccgggtgattgtcaatggcaggagagtgcgggacgactactgggagggcaaggcgcggaagcagggcttcaccgaggccgaccttgccggagagaagagaccaggcgcaggcaaggccagggaagccgcggcggaggcaaacaacaacatgccaccactcccaggaggccctcacggcgagattgtttacgcgactaccacgcagtatggtggtgctccccagccccagctcgtgcaaccagatctgaatgacacaaggacgcgagactacagcaacttcatcaagggcggcccccgccaggagatcaccggcccggcctaccaggacaggacgcaatccagccccctggccgagattcaccagcaggcgcaccatgcggccgagttcaaccgcaccgtcaaccagggccgcgagatgcgcacagagtacctgcagaacatgtggcgaaggccccatgagcagcccgcgacttcgcagccggtcgccaccgagcctagcttgccaactacgagaccagtgcagtcgccgcacgcaactcccgcgggcatggcatcgtcgggcattctcgccaaccaaagtccccagatgatgatgacggcgccgccatactcacagccaatccactcgcagcaggccatgaaccagacccccatgcgagccatgccgcagccgtcaagccagaaacaagcaaggccgcccaacctgcagtctggtccgagtaacatgtcacagggagctgccgcgtataattatggctcgtccaacccaatgtggggaccccctcagacaccccatcattacactggctataccacgcaagctcaggcttcgcctcatccccaacagtcaccggctccccaattgcgccatccaagcggaacaccacagatgcaacctagcaccatgcagtatcccgcgatgcagggccttcctcacggctacccgggcccggcacaaggcatgtatcctcccgagcagactccacggcaattcatgccgcaaaatccggcccctgggcctgccgtcacctcggcttgggcgaatccccagacttctgctggtggaagctggtggcccaaccagccgcagtga

SEQ ID NO: 661 - protein, 627 aa, Muscodor strobelii
  misc_feature: SGI Peptide ID NO. 559796
  misc_feature (170)..(270): Pfam Id: PF08624 Pfam Desc: Chromatin remodelling complex subunit
  misc_feature (1)..(627): NCBI GI: 116180376 Blast Desc: CHGG_00816 [Chaetomium globosum CBS 148.51] gi|88185113|gb|EAQ92581.1| CHGG_00816 [Chaetomium globosum CBS 148.51]
  misc_feature (1)..(622): NCBI GI: 256734376 Blast Desc: NECHADRAFT_98717 [Nectria haematococca mpVI 77-13-4]
  misc_feature (1)..(622): NCBI GI: 46108602 Blast Desc: FG01183.1 [Gibberella zeae PH-1]
  misc_feature (70)..(627): NCBI GI: 171687863 Blast Desc: protein product [Podospora anserina] gi|170943893|emb|CAP69545.1| protein product [Podospora anserina]
  misc_feature (1)..(627): NCBI GI: 85111302 Blast Desc: NCU03064 [Neurospora crassa OR74A] gi|28925616|gb|EAA34636.1| conserved [Neurospora crassa OR74A]
  misc_feature (171)..(627): NCBI GI: 261355897 Blast Desc: chromatin structure-remodeling complex protein RSC7 [Verticillium albo-atrum VaMs.102]
  misc_feature (22)..(627): NCBI GI: 156062892 Blast Desc: SS1G_01562 [Sclerotinia sclerotiorum 1980] gi|154696898|gb|EDN96636.1| SS1G_01562 [Sclerotinia sclerotiorum 1980]
  misc_feature (136)..(479): NCBI GI: 145611702 Blast Desc: MGG_11643 [Magnaporthe grisea 70-15] gi|145018953|gb|EDK03232.1| MGG_11643 [Magnaporthe grisea 70-15]
  misc_feature (57)..(627): NCBI GI: 154314794 Blast Desc: BC1G_04106 [Botryotinia fuckeliana B05.10] gi|150848728|gb|EDN23921.1| BC1G_04106 [Botryotinia fuckeliana B05.10]
  misc_feature (7)..(475): NCBI GI: 212542781 Blast Desc: nuclear localization protein, [Penicillium marneffei ATCC 18224] gi|210066452|gb|EEA20545.1| nuclear localization protein, [Penicillium marneffei ATCC 18224]
  misc_feature: Useful for introducing or modulating the production of volatile compounds
MYSTQPNGAEGATINPATINPAALNPELLNPTNSRGLKRSRSPETYQDAPTSETPGDDDSKQPRKRGRPMKSRMSADSYPDPANHDSTALPPPQMSQSLPPQTPQSQSASLPPPAGNYTPAQVSPPPKTTPTKTTLKALPTVRDHTTDQLGPAGDEYLPRESDEAGEKKVMPNGQLLGGREYRCRTFLVPQRGDKLFMLATECARVLGYRDSYLLFNKNRSLFKIIANQVEKDDLVQQEILPFSYRSRQIAIVTARSMFRQFGSRVIVNGRRVRDDYWEGKARKQGFTEADLAGEKRPGAGKAREAAAEANNNMPPLPGGPHGEIVYATTTQYGGAPQPQLVQPDLNDTRTRDYSNFIKGGPRQEITGPAYQDRTQSSPLAEIHQQAHHAAEFNRTVNQGREMRTEYLQNMWRRPHEQPATSQPVATEPSLPTTRPVQSPHATPAGMASSGILANQSPQMMMTAPPYSQPIHSQQAMNQTPMRAMPQPSSQKQARPPNLQSGPSNMSQGAAAYNYGSSNPMWGPPQTPHHYTGYTTQAQASPHPQQSPAPQLRHPSGTPQMQPSTMQYPAMQGLPHGYPGPAQGMYPPEQTPRQFMPQNPAPGPAVTSAWANPQTSAGGSWWPNQPQ

SEQ ID NO: 662 - DNA, 5093 bp, Muscodor strobelii; identical to SEQ ID NO: 659
  misc_feature: SGI EST ID NO. CUFF.2035.1
  misc_feature: Variant of the nucleotide sequence at SEQ ID NO 660

SEQ ID NO: 663 - DNA, 1614 bp, Muscodor strobelii
  misc_feature: SGI cDNA ID NO. 559797
  misc_feature: Reduced expression when VOC is produced
  misc_feature: Encodes the peptide sequence at SEQ ID NO 664
atgggaggcatcaacaagcccaagaagcccaagtctaagcgcacgccggttcggttacgccataagattgagaaggcctcagcttctaagcagcgaaaggccaggaaggaagccaagaagaatccacaatggaagtctaagcttaagaaagatcccggcatccccaatctattcccctacaaagagaagatcctccacgagatcgaggagggccgacggagaaaggaggaggagcgcgcacagaagagagaacaggccagggctgccaagactggtgccacggcggaggacgatgagcaggaagtggtcgaggatgacgccatggacgggactttcgacgatagcgatttgatggaccaagacgacgacgagggtgaagactcgtccaaccccatggctgcactaatagcgagtgccaaggccgctgccgacaagtatgaacgccaactccaaagtggcgacgagtttgacgatgaagacgatcccgacgaagactcggacagcggcttcgacttaggcactcaagcgtcctcaaggaaagctcacgacaaggtcttcaaggacgtggtcgaccgggccgacgtcgtgctctatgttctcgatgcacgagaccccgagggcacaagatcgaaagaagtcgagcgcatggtcatggctgcggccagtggtgggaagcgattgatgcttgttttaaacaagatcgatctcatcccgcctaccgtcctcaaagattggctggtctacctccgaagatcctttcctacacttcccctccgcgcttccaaatctgcccctaacgcacacaccttcaatcacggagaccttactgtccagagcacctcggcgaccttattcaaatcgctgaaatctttcgccgcctcaaagcaattaaaacgtgccgtttctgttggtgtcatcggataccccaacgtaggcaagtcttccgtcatcaacgccttacttgccgggttaggcggcaggggcaaagccgcttgcccggccggcgccgaggcaggagtaaccacgagcatccgctccgtaaagatcgacagcaagttgacgttactcgactcgcctggtatcgtcttcccttcgaccgtggagggtgaaaccaaatacaagaagggatcgatcgaggagcatgctcatctcgtacttctcaacgccattccgccaaagcaaattgacgatccgttacctgccgttacactactacttaagaagctgtcgtcgtcagaggtcctactacaaaagcttctggatgtctacgaccttccaccgcttatgactgccgatggcgatatcactactgatttcctagtgcaggtggcgcgcaaaagaggcaggctgggtcgtggtggtatcccaaacttaccggccgccgccatgactgttgtcacagattggagagatggtcgtattcaaggatgggttgaaccgcctgctctgccagtttcgttggacgggatcaaggagactactgctaagcaaggtggctccgcccccatggcagatcagaaggagattttgacagaatgggcaaaggagttcaagcttgagggcttgtggggtgacgatgaagataccactacgggagatgctatggaacagtaa

SEQ ID NO: 664 - protein, 537 aa, Muscodor strobelii
  misc_feature: SGI Peptide ID NO. 559797
  misc_feature (18)..(97): Pfam Id: PF08701 Pfam Desc: GNL3L/Grn1 GTPase
  misc_feature (301)..(410): Pfam Id: PF01926 Pfam Desc: GTPase of function
  misc_feature (301)..(387): Pfam Id: PF01926 Pfam Desc: GTPase of function
  misc_feature (2)..(537): NCBI GI: 85111132 Blast Desc: NCU03066 [Neurospora crassa OR74A] gi|28925521|gb|EAA34552.1| conserved [Neurospora crassa OR74A]
  misc_feature (9)..(537): NCBI GI: 154299972 Blast Desc: BC1G_11175 [Botryotinia fuckeliana B05.10] gi|150856788|gb|EDN31980.1| BC1G_11175 [Botryotinia fuckeliana B05.10]
  misc_feature (2)..(537): NCBI GI: 46108606 Blast Desc: FG01185.1 [Gibberella zeae PH-1]
  misc_feature (9)..(537): NCBI GI: 156062896 Blast Desc: SS1G_01564 [Sclerotinia sclerotiorum 1980] gi|154696900|gb|EDN96638.1| SS1G_01564 [Sclerotinia sclerotiorum 1980]
  misc_feature (2)..(524): NCBI GI: 171687867 Blast Desc: protein product [Podospora anserina] gi|170943895|emb|CAP69547.1| protein product [Podospora anserina]
  misc_feature (2)..(525): NCBI GI: 116180370 Blast Desc: CHGG_00813 [Chaetomium globosum CBS 148.51] gi|88185110|gb|EAQ92578.1| CHGG_00813 [Chaetomium globosum CBS 148.51]
  misc_feature (12)..(526): NCBI GI: 238841308 Blast Desc: nuclear GTP-binding protein NUG1 [Microsporum canis CBS 113480]
  misc_feature (2)..(537): NCBI GI: 39975331 Blast Desc: MGG_00188 [Magnaporthe grisea 70-15] gi|145018957|gb|EDK03236.1| MGG_00188 [Magnaporthe grisea 70-15]
  misc_feature (9)..(536): NCBI GI: 189189796 Blast Desc: nucleolar GTP-binding protein 2 [Pyrenophora tritici-repentis Pt-1C-BFP] gi|187972843|gb|EDU40342.1| nucleolar GTP-binding protein 2 [Pyrenophora tritici-repentis Pt-1C-BFP]
  misc_feature (12)..(528): NCBI GI: 145239443 Blast Desc: An08g02520 [Aspergillus niger] gi|134076879|emb|CAK45288.1| protein product [Aspergillus niger]
  misc_feature: Useful for introducing or modulating the production of volatile compounds
MGGINKPKKPKSKRTPVRLRHKIEKASASKQRKARKEAKKNPQWKSKLKKDPGIPNLFPYKEKILHEIEEGRRRKEEERAQKREQARAAKTGATAEDDEQEVVEDDAMDGTFDDSDLMDQDDDEGEDSSNPMAALIASAKAAADKYERQLQSGDEFDDEDDPDEDSDSGFDLGTQASSRKAHDKVFKDVVDRADVVLYVLDARDPEGTRSKEVERMVMAAASGGKRLMLVLNKIDLIPPTVLKDWLVYLRRSFPTLPLRASKSAPNAHTFNHGDLTVQSTSATLFKSLKSFAASKQLKRAVSVGVIGYPNVGKSSVINALLAGLGGRGKAACPAGAEAGVTTSIRSVKIDSKLTLLDSPGIVFPSTVEGETKYKKGSIEEHAHLVLLNAIPPKQIDDPLPAVTLLLKKLSSSEVLLQKLLDVYDLPPLMTADGDITTDFLVQVARKRGRLGRGGIPNLPAAAMTVVTDWRDGRIQGWVEPPALPVSLDGIKETTAKQGGSAPMADQKEILTEWAKEFKLEGLWGDDEDTTTGDAMEQ

SEQ ID NO: 665 - DNA, 1926 bp, Muscodor strobelii
  misc_feature: SGI EST ID NO. CUFF.1820.0
  misc_feature: Variant of the nucleotide sequence at SEQ ID NO 663
atttaatggtaccatcttgaatctttttttgtgtacatacgtgcattgaaagaacggccggcgacatcccggacataccagcaccaattcttcccaccttgcaattgtacagcaatccaagatgggaggcatcaacaagcccaagaagcccaagtctaagcgcacgccggttcggttacgccataagattgagaaggcctcagcttctaagcagcgaaaggccaggaaggaagccaagaagaatccacaatggaagtctaagcttaagaaagatcccggcatccccaatctattcccctacaaagagaagatcctccacgagatcgaggagggccgacggagaaaggaggaggagcgcgcacagaagagagaacaggccagggctgccaagactggtgccacggcggaggacgatgagcaggaagtggtcgaggatgacgccatggacgggactttcgacgatagcgatttgatggaccaagacgacgacgagggtgaagactcgtccaaccccatggctgcactaatagcgagtgccaaggccgctgccgacaagtatgaacgccaactccaaagtggcgacgagtttgacgatgaagacgatcccgacgaagactcggacagcggcttcgacttaggcactcaagcgtcctcaaggaaagctcacgacaaggtcttcaaggacgtggtcgaccgggccgacgtcgtgctctatgttctcgatgcacgagaccccgagggcacaagatcgaaagaagtcgagcgcatggtcatggctgcggccagtggtgggaagcgattgatgcttgttttaaacaagatcgatctcatcccgcctaccgtcctcaaagattggctggtctacctccgaagatcctttcctacacttcccctccgcgcttccaaatctgcccctaacgcacacaccttcaatcacggagaccttactgtccagagcacctcggcgaccttattcaaatcgctgaaatctttcgccgcctcaaagcaattaaaacgtgccgtttctgttggtgtcatcggataccccaacgtaggcaagtcttccgtcatcaacgccttacttgccgggttaggcggcaggggcaaagccgcttgcccggccggcgccgaggcaggagtaaccacgagcatccgctccgtaaagatcgacagcaagttgacgttactcgactcgcctggtatcgtcttcccttcgaccgtggagggtgaaaccaaatacaagaagggatcgatcgaggagcatgctcatctcgtacttctcaacgccattccgccaaagcaaattgacgatccgttacctgccgttacactactacttaagaagctgtcgtcgtcagaggtcctactacaaaagcttctggatgtctacgaccttccaccgcttatgactgccgatggcgatatcactactgatttcctagtgcaggtggcgcgcaaaagaggcaggctgggtcgtggtggtatcccaaacttaccggccgccgccatgactgttgtcacagattggagagatggtcgtattcaaggatgggttgaaccgcctgctctgccagtttcgttggacgggatcaaggagactactgctaagcaaggtggctccgcccccatggcagatcagaaggagattttgacagaatgggcaaaggagttcaagcttgagggcttgtggggtgacgatgaagataccactacgggagatgctatggaacagtaatagaaaccactgttgctcagagtttaacaatatttctgtgcttttgattgcagatttcgcaaaaggcagacagggtaggcgttctgaggcataatgaaacatgaagattttctatcccgtgcagaacctttgactttccggctctcagtgcgatattgcgcagaaagcatacaggtgaacataactgtctt

SEQ ID NO: 666 - DNA, 717 bp, Muscodor strobelii
  misc_feature: SGI cDNA ID NO. 559798
  misc_feature: Encodes the peptide sequence at SEQ ID NO 667
atggactacgcagcagcatccaccgaaaatgtcacttttgacggccttcttttcgacatggacggcaccatcatcgactcaacaagtgccgttgaaaagcactggcatacagttggcaaggagattggcgtggcgccggaagtcatactgcagacttcgcacggccgtcgcagtattgacatgttgaaggttttaagccctcagaaggcaaactgggaatacgttagacaaatggaggcattgctgccaaagttgtacggcccagaagctgtcgagataccaggtgctagagcactcctggatcagttgatcgaggctaaggcaccttgggccatcgtaacatcgggcacagagccgttagttcatggttggttggatgtcctgaagttgccacaaccggagattctcgtctcagcagagtccgtagaaaacggcaagccggacccaacatgctacaaactcggccgttcaaagcttgggctcacctccgagtctacggtcttggtgctcgaggatagtcccgctggtatcctgtcaggtaaagctgcaggttgcaaagtcctcgggcttgtgactagtcacactatggagcaagtcactgccgcacagccagactgggtcgttcaagacctgagctccgtcaaactggtatcgtgtgatcgtgatggccgagtcacgctgcaattttctgatgcattagttgccaagacgcaataa

SEQ ID NO: 667 - protein, 238 aa, Muscodor strobelii
  misc_feature: SGI Peptide ID NO. 559798
  misc_feature (13)..(193): Pfam Id: PF00702 Pfam Desc: haloacid dehalogenase-like hydrolase
  misc_feature (9)..(233): NCBI GI: 46125437 Blast Desc: FG07096.1 [Gibberella zeae PH-1]
  misc_feature (2)..(233): NCBI GI: 256732621 Blast Desc: [Nectria haematococca mpVI 77-13-4]
  misc_feature (6)..(236): NCBI GI: 39975333 Blast Desc: MGG_00187 [Magnaporthe grisea 70-15] gi|145018959|gb|EDK03238.1| MGG_00187 [Magnaporthe grisea 70-15]
  misc_feature (2)..(237): NCBI GI: 164427323 Blast Desc: NCU03068 [Neurospora crassa OR74A] gi|157071695|gb|EAA34554.2| conserved [Neurospora crassa OR74A]
  misc_feature (6)..(234): NCBI GI: 261355894 Blast Desc: phosphatase yfbT [Verticillium albo-atrum VaMs.102]
  misc_feature (5)..(233): NCBI GI: 225559644 Blast Desc: glycerol-3-phosphate phosphatase [Ajellomyces capsulatus G186AR]
  misc_feature (5)..(233): NCBI GI: 154281021 Blast Desc: HCAG_03420 [Ajellomyces capsulatus NAm1] gi|150411502|gb|EDN06890.1| HCAG_03420 [Ajellomyces capsulatus NAm1]
  misc_feature (5)..(233): NCBI GI: 240279387 Blast Desc: glycerol-3-phosphate phosphatase [Ajellomyces capsulatus H143]
  misc_feature (6)..(233): NCBI GI: 261194871 Blast Desc: glycerol-3-phosphate phosphatase [Ajellomyces dermatitidis SLH14081] gi|239588378|gb|EEQ71021.1| glycerol-3-phosphate phosphatase [Ajellomyces dermatitidis
  misc_feature (13)..(233): NCBI GI: 240106640 Blast Desc: (DL)-glycerol-3-phosphatase, [Coccidioides posadasii C735 delta SOWgp]
  misc_feature (14)..(233): SWISSPROT Homolog: EC 3.1.3.68 2-deoxyglucose-6-phosphatase
MDYAAASTENVTFDGLLFDMDGTIIDSTSAVEKHWHTVGKEIGVAPEVILQTSHGRRSIDMLKVLSPQKANWEYVRQMEALLPKLYGPEAVEIPGARALLDQLIEAKAPWAIVTSGTEPLVHGWLDVLKLPQPEILVSAESVENGKPDPTCYKLGRSKLGLTSESTVLVLEDSPAGILSGKAAGCKVLGLVTSHTMEQVTAAQPDWVVQDLSSVKLVSCDRDGRVTLQFSDALVAKTQ

SEQ ID NO: 668 - DNA, 2019 bp, Muscodor strobelii
  misc_feature: SGI EST ID NO. CUFF.1822.0
  misc_feature: Variant of the nucleotide sequence at SEQ ID NO 666
ggtcacctcagtctggacattttgaatatttcattccatgcaagtgagcaagataaatagctgtcttaattcaaggatgattcgcgctgacgagttccgaaaatttggtggaattaccttacatgagcactctctgttcttgagataatatgcgaatgaagcatcatggtgattgatgtctgggtgtgagttgtcagaattgggacctaccttaggaatgtaagatattgcagaagtggcctagaccggcaccggactgggcggtgcctgatttaagcctgcattagacgtctctgactgttactcgattttttagctgtgaaaatttgaagataaaacttaggacacgcaatgaaatgttaggctccgacaatcattcggcggacggacactataagtgggcggagtttccatttcgaggcagactagcgacattgaagacgaacgtataatctctctattcttcccttgcacaaggtattacaagcttagcacacacatctatattcttaatacatcttatagactttcgttgtcatcttcaaaatatctagaggttctaaacaacgctcagtcaagatggactacgcagcagcatccaccgaaaatgtcacttttgacggccttcttttcgacatggacggcaccatcatcgactcaacaagtgccgttgaaaagcactggcatacagttggcaaggagattggcgtggcgccggaagtcatactgcagacttcgcacggccgtcgcagtattgacatgttgaaggttttaagccctcagaaggcaaactgggaatacgttagacaaatggaggcattgctgccaaagttgtacggcccagaagctgtcgagataccaggtgctagagcactcctggatcagttgatcgaggctaaggcaccttgggccatcgtaacatcgggcacagagccgttagttcatggttggttggatgtcctgaagttgccacaaccggagattctcgtctcagcagagtccgtagaaaacggcaagccggacccaacatgctacaaactcggccgttcaaagcttgggctcacctccgagtctacggtcttggtgctcgaggatagtcccgctggtatcctgtcaggtaaagctgcaggttgcaaagtcctcgggcttgtgactagtcacactatggagcaagtcactgccgcacagccagactgggtcgttcaagacctgagctccgtcaaactggtatcgtgtgatcgtgatggccgagtcacgctgcaattttctgatgcattagttgccaagacgcaataagagcgcggctagaacggcccgtcaggtgcattttcaatagtctacttatggtcaactcgatcctactatcaagcgcgcaagtgacgctggaaatcgattcagacaaaaggccatctcgttcctgcatatatcgacagcccccattcaggtgatgtcactcaccctggctcagtggcacagctctgatattaccgcagatgtcttggctgcatcattatatcgtatacttccaaatctgcgtcagcgctggttgcctcctgctttcttggggtctaatgcacaagctctcgctctacgtgtgcgtcgcaaagggacttgcaggtggtgggggcagaatgatcataacatcagcaaagtttttcaaagatcgtatagagtagacttagagttcctcatgttaaagatacctttttcttaagcagtaatggtgggtgccatcgacggtgagacagccgccgaaccggtgtgactagcgggcggactgggccggtgggaaagggaagatcttgtcacttacctgccgaaaggagagtgaagcctccaatagtacggcctgctattcggagaatcgttctgatgatcggtacagtgagaattgattatcaatatagacaatgccggatcactatactcattcactagtacgtcgaaagtctggatctgcagggcttagttataagcgaagcgaaatgatatcatcaatactatgcttagatggttaca

SEQ ID NO: 669 - DNA, 1425 bp, Muscodor strobelii
  misc_feature: SGI cDNA ID NO. 559799
  misc_feature: Encodes the peptide sequence at SEQ ID NO 670
atgaatatgcaatttggtacccagccagggttcgcctcgccatatgtctttcccccaagccagggaaacggcatgccctataacgatggccagtattcgatgcatcccagctaccctggtcttcagtatatgtttggttattcaacgcatcgtgcccctctgttgactgatcgaggtggtatgtgcgatggtaaaactgagtcgaaaccacggttatctaaggaagaagttgagaaacttgaaaaagtatttcaagaaaaccctaagccatcaagttctgtcaaggctcaactagccgacgggcttggcttagagcgtcctaggatcaacaattggttccagaaccggagagcgaaggcaaagcaagagaggaaacaggaggagtatgaagctcgcagggtagctgagaagactacctccgagcctgcatctcctgatgaggattctccaagtgttgcggattcagtacgagaaggctcacaaaaacgtacacagccatcttctgctgctttccctcccatttcctcgccgtccgacttcacggactcggcgttaaagcacgaggaggaagaagaggaagaagaagatgatgatgatgatgacgatgaggacagcgacggaaacaaacacaacgaagaagacaatgatatgagggctcggaaatacgagtatctcagtacagctcacatgcgatcaccggtctctgtggcccctgagtcgtacaactcaccacagtcgctcgactttccccgacatgatgtggcagcatacaatcattcttcaaatcgcatcccacagtcaagatctgcgagcgattatgggcttttcacttcgcctctgagccgtaccactcatcctctagactcggaggatgtttcgtgtagaacgcccactctcagctccgcagctcctccaacgccaatgacacctgctctttttgaccaccggcatggtcaagagcctgccgtggtttcggcgtgttccgacgatggatctttcactttgaatgctagcctagcggctcacttcatgcaaattaaagaacaagacgatctcaaaacaccacccaccacacctggtgtgatgaatgactaccgagcggcgaatttcgctggcaacaacttcggttcctgcttcagcgttcctgcagatcagccgcttctgactccgttcttccaatcggaatttcccgatttgacgatgcagaatattcctagttatgtttcgactagtgacggcctgccttcgacacccgtctacgcaggtataggccaaactctagaccatgctcacttcccgagcaatactcagtacgactgggacgcaaatgagtctgtggactcgtctaaatcatctcctggtcatccaatgccaaagcaaattcaattttcgaacataacgccgcaagactatgtcattgactga

SEQ ID NO: 670 - protein, 474 aa, Muscodor strobelii
  misc_feature: SGI Peptide ID NO. 559799
  misc_feature (68)..(122): Pfam Id: PF00046 Pfam Desc: Homeobox domain
  misc_feature (42)..(141): NCBI GI: 171687871 Blast Desc: protein product [Podospora anserina] gi|170943897|emb|CAP69549.1| protein product [Podospora anserina]
  misc_feature (50)..(246): NCBI GI: 164427321 Blast Desc: NCU03070 [Neurospora crassa OR74A] gi|157071694|gb|EAA34927.2| [Neurospora crassa OR74A]
  misc_feature (26)..(141): NCBI GI: 116180364 Blast Desc: CHGG_00810 [Chaetomium globosum CBS 148.51] gi|88185107|gb|EAQ92575.1| CHGG_00810 [Chaetomium globosum CBS 148.51]
  misc_feature (68)..(144): NCBI GI: 238498468 Blast Desc: homeobox transcription factor, [Aspergillus flavus NRRL3357] gi|220693743|gb|EED50088.1| homeobox transcription factor, [Aspergillus flavus NRRL3357]
  misc_feature (68)..(144): NCBI GI: 169781668 Blast Desc: [Aspergillus oryzae RIB40] gi|83774039|dbj|BAE64164.1| protein product [Aspergillus oryzae]
  misc_feature (68)..(149): NCBI GI: 119495872 Blast Desc: homeobox transcription factor, [Neosartorya fischeri NRRL 181] gi|119412874|gb|EAW22815.1| homeobox transcription factor, [Neosartorya fischeri NRRL 181]
  misc_feature (28)..(202): NCBI GI: 46125439 Blast Desc: FG07097.1 [Gibberella zeae PH-1]
  misc_feature (68)..(130): NCBI GI: 67518118 Blast Desc: AN1217.2 [Aspergillus nidulans FGSC A4] gi|40746654|gb|EAA65810.1| AN1217.2 [Aspergillus nidulans FGSC A4] gi|259488463|tpe|CBF87915.1| TPA: homeobox transcription FGSC
  misc_feature (68)..(130): NCBI GI: 70995333 Blast Desc: homeobox transcription factor [Aspergillus fumigatus Af293] gi|66850059|gb|EAL90386.1| homeobox transcription factor, [Aspergillus fumigatus Af293] gi|159131178|gb|EDP56291.1| factor,
  misc_feature (68)..(130): NCBI GI: 121701879 Blast Desc: homeobox transcription factor, [Aspergillus clavatus NRRL 1] gi|119397347|gb|EAW07778.1| homeobox transcription factor, [Aspergillus clavatus NRRL 1]
MNMQFGTQPGFASPYVFPPSQGNGMPYNDGQYSMHPSYPGLQYMFGYSTHRAPLLTDRGGMCDGKTESKPRLSKEEVEKLEKVFQENPKPSSSVKAQLADGLGLERPRINNWFQNRRAKAKQERKQEEYEARRVAEKTTSEPASPDEDSPSVADSVREGSQKRTQPSSAAFPPISSPSDFTDSALKHEEEEEEEEDDDDDDDEDSDGNKHNEEDNDMRARKYEYLSTAHMRSPVSVAPESYNSPQSLDFPRHDVAAYNHSSNRIPQSRSASDYGLFTSPLSRTTHPLDSEDVSCRTPTLSSAAPPTPMTPALFDHRHGQEPAVVSACSDDGSFTLNASLAAHFMQIKEQDDLKTPPTTPGVMNDYRAANFAGNNFGSCFSVPADQPLLTPFFQSEFPDLTMQNIPSYVSTSDGLPSTPVYAGIGQTLDHAHFPSNTQYDWDANESVDSSKSSPGHPMPKQIQFSNITPQDYVID

SEQ ID NO: 671 - DNA, 3201 bp, Muscodor strobelii
  misc_feature: SGI EST ID NO. CUFF.1871.0
  misc_feature: Variant of the nucleotide sequence at SEQ ID NO 669
cacgcatgtacctgcagccgtcttgggaccacaacacactccaagaaggcggcccttcgtcgtgcaaactccttcaagaaacgacccaccgaccagcaaactacttgtactcctctacgcgcgcccctcccttctcgctcctcctgctcccctgtattgtttcttattctcatcccgacttctgcttgtctctgcctcgagagcaatctgaggagtctaagtgaggtctgtctcacccagaccaggtcatagccattggtgtactgtcttgcccatttactcttatactctagcctcctctccttcacgtcgagcatcggacctctttgtgcttaggattcgtcccacgtcgctcgttcactatattagttttttgtcagtttggtattcaagcttctgaccctcagtcattctttattgccttcagaacaagtcccgacgctctacgattcccagtatataacatcgaaagcagtcttggccgagattccgtctgaaacaacccgtatggacagctcagaggatttctagtccgatatcgttacaactcaggtcccctgtgaatagttcacgatccgcacaatattgcacatatttctacccacgtaataagaattgcacagcgctcctacgaagccatgaatatgcaatttggtacccagccagggttcgcctcgccatatgtctttcccccaagccagggaaacggcatgccctataacgatggccagtattcgatgcatcccagctaccctggtcttcagtatatgtttggttattcaacgcatcgtgcccctctgttgactgatcgaggtggtatgtgcgatggtaaaactgagtcgaaaccacggttatctaaggaagaagttgagaaacttgaaaaagtatttcaagaaaaccctaagccatcaagttctgtcaaggctcaactagccgacgggcttggcttagagcgtcctaggatcaacaattggttccagaaccggagagcgaaggcaaagcaagagaggaaacaggaggagtatgaagctcgcagggtagctgagaagactacctccgagcctgcatctcctgatgaggattctccaagtgttgcggattcagtacgagaaggctcacaaaaacgtacacagccatcttctgctgctttccctcccatttcctcgccgtccgacttcacggactcggcgttaaagcacgaggaggaagaagaggaagaagaagatgatgatgatgatgacgatgaggacagcgacggaaacaaacacaacgaagaagacaatgatatgagggctcggaaatacgagtatctcagtacagctcacatgcgatcaccggtctctgtggcccctgagtcgtacaactcaccacagtcgctcgactttccccgacatgatgtggcagcatacaatcattcttcaaatcgcatcccacagtcaagatctgcgagcgattatgggcttttcacttcgcctctgagccgtaccactcatcctctagactcggaggatgtttcgtgtagtatgtcaccatgcgctgagagcactacgagcagtgactgtcacagcaatcagtcgtacgctggtatactggatggaagatacacggacgcgtccacacccactgcattttttcactcgatggcaaccggaacgtgtgacggatctataatccaatatgacgaaagcgcgagccccgactatcagaatggacacccggcaactcatgtaatgtctcaaggcatgcccactcctactaactcgttcagatcgcctcctcctcccgctaatctagcttcacggcgaaatatcgcacggccagctgcattacaggctgcctctctcagaagtcgctcctttaacttaggtggcataccaaaaacagcattggatggaactaaacggatagatacgtcaagtcctgtctcttctatgcgtcgaatctcgtcagccactgggaacggggccggacggatacaaaaatgtactacaggcccacggtcaccattattcttgggacgaaacgccgaagccctcttgcaatatcacagtcgttctccggtaggctcaggaacgcccactctcagctccgcagctcctccaacgccaatgacacctgctctttttgaccaccggcatggtcaagagcctgccgtggtttcggcgtgttccgacgatggatctttcactttgaatgctagcctagcggctcacttcatgcaaattaaagaacaagacgatctcaaaacaccacccaccacacctggtgtgatgaatgactaccgagcggcgaatttcgctggcaacaacttcggttcctgcttcagcgttcctgcagatcagccgcttctgactccgttcttccaatcggaatttcccgatttgacgatgcagaatattcctagttatgtttcgactagtgacggcctgccttcgacacccgtctacgcaggtataggccaaactctagaccatgctcacttcccgagcaatactcagtacgactgggacgcaaatgagtctgtggactcgtctaaatcatctcctggtcatccaatgccaaagcaaattcaattttcgaacataacgccgcaagactatgtcattgactgagcctgcatcgcttctactcatggcacatcccataacgtctattcttccggcgccacggtgtcatttcatttggctctttcagtcctgtaccagccactaaaatgcctgtatcaacatcaactgttcatctcttagcctttttcgcattttttaggtggcatacacacgtccattatcgcaaagctggtgatacttatagattgctcggcttggattgaccttgatgccatccaaagctcggtaaccatcatgaatagttctttaccttggttcttaatgtaatgaatatggataatgtttgaatcagggacttgatggtaaaaaaagatacccccaaatgggaaaagagtcggaaactgggctctgctttctttcgttctcgggctcgatcagttaacgatggatcttggatatcatcattgacggcctcccgaggctttatgttacaagcgatctgagcgagcgagcacgcgcataagagtttactaggaagctgaaatttgtcaggaaacaattggggtgtttgagttgtttgtcgctgatgtagatacggtctaagaaacaattgaagtgagatgatattcaaaag

SEQ ID NO: 672 - DNA, 2706 bp, Muscodor strobelii
  misc_feature: SGI cDNA ID NO. 559800
  misc_feature: Encodes the peptide sequence at SEQ ID NO 673
atgcgtcagcagcaataccagccggcgcgcgaggtcaagatcgaggatccgggagagcacgatggccctcaccgcattgcacacaccctcacagcttgctgtcggtgtcgccagcggaagactcgatgcgatccgaccctgcctcggtgtctgccctgcgaacgatcgggctccatatgcgagtacttcgacacgacaaagggcaaaaagatcagccgctactacgtcgtcaagcttcaggagacagtccgcgccttggaagccgagcttggtcagtacactgacgatgacgactacccgaaagatcacgaagattttgtccggccgggcggcttggtgcgactcaatgagacggacgaaacgccccggtatcttggcccctccagcggcattgccatgacacgcattgtcatggaggaggcgaagcggtacacggattccaagcgcatctccgacctcatacccgaggtcaaggggaggcggcatgtcgccaatgccaacgccgccgtgatggggcaccgatcgcagtctttcagcatgcccctgcacgcgtcaaggaaaaagagttaccccatgatcagtgctgttgcggcatctgccttaccgagtagggccattgcggacaggctcatccaagtgttcaatcagcgagcccaagtattcactccagtcctgcacgaacaaaaactggccgaggcactcgaaagtgtctatgcgggaacccaagacccgtaccaaaactttgtggtccgtttggtcgtggcaataagcatgcaaaagctagattctacgtatgccggcctagcagacagctactacctcgccgcaatgcagtatttcgaggcggttgtccgacccaaagacttgaaaactcttcagtgccttatcttgataggtcagtattcgcttttgacgccgactcgaacagccgtgtactatgtggtcggtctcgcaacccggatcagccagcaactgggccttgcagatgagaagacgatcgcccttggtgcaagcaatcctttgacattggacatgcgcaggcgactcagctggatcgtcatcagtttcgagttagggttatctcaatccatgggtcgaccaaatggcttcgccaagtctgaagatatcgtcgatgtaggatggttcgagacagttcccgatgccaacatctccgaaagcggtatcgtcccaggcccagctgaggagaggaagcttgttgctattcatttctacaaaatgagattgctccaggccgacatccgccgcatactgtatgaaaagaaacatgcggaaccgagaaatagccatcatccctggttcactgaaatggaagtgaagctcagccagtggctcgaaaaatcgccccaaaatccggcgtggtgtaagccatggttcaccggaagatatcataccatgattgttacccttcaccggccttcgccacaggtcccgcggccttccctccagtctgctatgaagtgcttcgattcatcagcattcgtgattgacatctcaagtaaacagatgatggctgccgctgttgatataacatgggtctttctcctaacattgtatatgtccctgaacactcttctgtggtgcgtggcgagctaccctgatgtgcgagctgcgcattcacgggaagaggtgcaagagcttgtgaacgttgcactggatattatcgatcaatgtgtcgagcggtggccagggaccgcatcggcatctcagctctatgctactctcacgaaagcctgcctacagagttatgactcgaataacactcctatattatccagtcctggttcactaaatactccaccgtcacagccggacaccagttcccctcaacccaactcatcaagcgctaaccaaacacctcaacctgctttcaagccaccacagtttggggctgtattcggctcaacaccagagtcaatggaaaactatgctcttgacagcaattttcctccgcacccgacttttcgatccaattccatttttctcaatcccgcctccagcgaccacacgggccgccggttcagctattttccgcccgatttcgcccagtcagacttggctgcgactgatgctagtccacctatttcagaagcaacgatttctccccctttcctctcaccgccgcaatctgagagcatttcccctgaccctatgctatcaatccctacggtaccaaccggccatgcaaatatgaatgcctcgatgttacaaactccaattctcaccggtcaacccctcccccatacttctcctgaagctatgctacccaacgggctacctcaaacgcagcagcgagcgcctccacaggcattcacaatccctcctctaccaccaggccagctcccgcagggtcaacgaccactaccgcaagctaccaccgtcaccgactggtttaaccctccacctccgttcatttcaccctactcctttggaagcatggggtcatcgtattggggcaacccaggtaatccaactagctttggaggtctagagcctggggccttccagtctttcaatggacttccccctgagaggcaaggaagtttgacgcaatcgcagcaaatcgaactgatgggcgttctggaaaacgagggcatgcaagacatagacacatatttgactggcgctactttttcgaatataggtacatcgggtttccaaggtatgaactggggagtgcggtcatga

SEQ ID NO: 673 - protein, 901 aa, Muscodor strobelii
  misc_feature: SGI Peptide ID NO. 559800
  misc_feature (31)..(70): Pfam Id: PF00172 Pfam Desc: Fungal Zn(2)-Cys(6) binuclear cluster domain
  misc_feature (288)..(385): Pfam Id: PF04082 Pfam Desc: Fungal specific transcription factor domain
  misc_feature (288)..(367): Pfam Id: PF04082 Pfam Desc: Fungal specific transcription factor domain
  misc_feature (52)..(883): NCBI GI: 46107382 Blast Desc: FG00574.1 [Gibberella zeae PH-1]
  misc_feature (10)..(879): NCBI GI: 145616417 Blast Desc: MGG_10528 [Magnaporthe grisea 70-15] gi|145010173|gb|EDJ94829.1| MGG_10528 [Magnaporthe grisea 70-15]
  misc_feature (65)..(886): NCBI GI: 256735217 Blast Desc: NECHADRAFT_103137 [Nectria haematococca mpVI 77-13-4]
  misc_feature (93)..(896): NCBI GI: 261357794 Blast Desc: fungal specific transcription factor domain-containing protein [Verticillium albo-atrum VaMs.102]
  misc_feature (18)..(730): NCBI GI: 116196762 Blast Desc: CHGG_04979 [Chaetomium globosum CBS 148.51] gi|88180892|gb|EAQ88360.1| CHGG_04979 [Chaetomium globosum CBS 148.51]
  misc_feature (17)..(835): NCBI GI: 171676768 Blast Desc: protein product [Podospora anserina] gi|170936451|emb|CAP61108.1| protein product [Podospora anserina]
  misc_feature (26)..(816): NCBI GI: 85105387 Blast Desc: NCU08651 [Neurospora crassa OR74A] gi|28923540|gb|EAA32716.1| [Neurospora crassa OR74A]
  misc_feature (24)..(643): NCBI GI: 169611568 Blast Desc: SNOG_08898 [Phaeosphaeria nodorum SN15] gi|160702320|gb|EAT84066.2| SNOG_08898 [Phaeosphaeria nodorum SN15]
  misc_feature (32)..(462): NCBI GI: 156052879 Blast Desc: SS1G_06607 [Sclerotinia sclerotiorum 1980] gi|154704385|gb|EDO04124.1| SS1G_06607 [Sclerotinia sclerotiorum 1980]
  misc_feature (25)..(614): NCBI GI: 226281634 Blast Desc: fungal specific transcription factor domain-containing protein [Paracoccidioides brasiliensis Pb01]
MRQQQYQPAREVKIEDPGEHDGPHRIAHTLTACCRCRQRKTRCDPTLPRCLPCERSGSICEYFDTTKGKKISRYYVVKLQETVRALEAELGQYTDDDDYPKDHEDFVRPGGLVRLNETDETPRYLGPSSGIAMTRIVMEEAKRYTDSKRISDLIPEVKGRRHVANANAAVMGHRSQSFSMPLHASRKKSYPMISAVAASALPSRAIADRLIQVFNQRAQVFTPVLHEQKLAEALESVYAGTQDPYQNFVVRLVVAISMQKLDSTYAGLADSYYLAAMQYFEAVVRPKDLKTLQCLILIGQYSLLTPTRTAVYYVVGLATRISQQLGLADEKTIALGASNPLTLDMRRRLSWIVISFELGLSQSMGRPNGFAKSEDIVDVGWFETVPDANISESGIVPGPAEERKLVAIHFYKMRLLQADIRRILYEKKHAEPRNSHHPWFTEMEVKLSQWLEKSPQNPAWCKPWFTGRYHTMIVTLHRPSPQVPRPSLQSAMKCFDSSAFVIDISSKQMMAAAVDITWVFLLTLYMSLNTLLWCVASYPDVRAAHSREEVQELVNVALDIIDQCVERWPGTASASQLYATLTKACLQSYDSNNTPILSSPGSLNTPPSQPDTSSPQPNSSSANQTPQPAFKPPQFGAVFGSTPESMENYALDSNFPPHPTFRSNSIFLNPASSDHTGRRFSYFPPDFAQSDLAATDASPPISEATISPPFLSPPQSESISPDPMLSIPTVPTGHANMNASMLQTPILTGQPLPHTSPEAMLPNGLPQTQQRAPPQAFTIPPLPPGQLPQGQRPLPQATTVTDWFNPPPPFISPYSFGSMGSSYWGNPGNPTSFGGLEPGAFQSFNGLPPERQGSLTQSQQIELMGVLENEGMQDIDTYLTGATFSNIGTSGFQGMNWGVRS

SEQ ID NO: 674 - DNA, 3468 bp, Muscodor strobelii
  misc_feature: SGI EST ID NO. CUFF.1917.0
  misc_feature: Variant of the nucleotide sequence at SEQ ID NO 672
caggcccctagtagtttgtgaacgcggtctcagaacgctgcataaggcagaggcccgcatgtacctaccgcagcctcgacggcacacttgcagatgcatggatgattgacatgaaacgaaacggctccggactgagcaactcgacggctccaagaaacgaaacggaacgatactggacactaacatcatatcttctcccgtcgccaacgttccgagcgcaaaatagacgatgcttccatgatctcgaagaacgaatgaagtgaacgaactttgtgttcccaactgcttgcccttacgcgccaagacagcctcacacaccggagtcggctctgttccagcctacgtaagacaccctttgcgatttgcgacggcgaggacgaaacacggcgacaactatttctgcctccgatcgggaagacgcatctcggcgccgcttctcaggcgagtcgctcgagcagctgccgcacgaggtggccgagcaaagccccgcttacgcatgtgaatgtgcagtgtggatgtgaatgttatggactcttattctatgctctctcatacgcaaggcttcggcggcaaccaggctgccatgcgtcagcagcaataccagccggcgcgcgaggtcaagatcgaggatccgggagagcacgatggccctcaccgcattgcacacaccctcacagcttgctgtcggtgtcgccagcggaagactcgatgcgatccgaccctgcctcggtgtctgccctgcgaacgatcgggctccatatgcgagtacttcgacacgacaaagggcaaaaagatcagccgctactacgtcgtcaagcttcaggagacagtccgcgccttggaagccgagcttggtcagtacactgacgatgacgactacccgaaagatcacgaagattttgtccggccgggcggcttggtgcgactcaatgagacggacgaaacgccccggtatcttggcccctccagcggcattgccatgacacgcattgtcatggaggaggcgaagcggtacacggattccaagcgcatctccgacctcatacccgaggtcaaggggaggcggcatgtcgccaatgccaacgccgccgtgatggggcaccgatcgcagtctttcagcatgcccctgcacgcgtcaaggaaaaagagttaccccatgatcagtgctgttgcggcatctgccttaccgagtagggccattgcggacaggctcatccaagtgttcaatcagcgagcccaagtattcactccagtcctgcacgaacaaaaactggccgaggcactcgaaagtgtctatgcgggaacccaagacccgtaccaaaactttgtggtccgtttggtcgtggcaataagcatgcaaaagctagattctacgtatgccggcctagcagacagctactacctcgccgcaatgcagtatttcgaggcggttgtccgacccaaagacttgaaaactcttcagtgccttatcttgataggtcagtattcgcttttgacgccgactcgaacagccgtgtactatgtggtcggtctcgcaacccggatcagccagcaactgggccttgcagatgagaagacgatcgcccttggtgcaagcaatcctttgacattggacatgcgcaggcgactcagctggatcgtcatcagtttcgagttagggttatctcaatccatgggtcgaccaaatggcttcgccaagtctgaagatatcgtcgatgtaggatggttcgagacagttcccgatgccaacatctccgaaagcggtatcgtcccaggcccagctgaggagaggaagcttgttgctattcatttctacaaaatgagattgctccaggccgacatccgccgcatactgtatgaaaagaaacatgcggaaccgagaaatagccatcatccctggttcactgaaatggaagtgaagctcagccagtggctcgaaaaatcgccccaaaatccggcgtggtgtaagccatggttcaccggaagatatcataccatgattgttacccttcaccggccttcgccacaggtcccgcggccttccctccagtctgctatgaagtgcttcgattcatcagcattcgtgattgacatctcaagtaaacagatgatggctgccgctgttgatataacatgggtctttctcctaacattgtatatgtccctgaacactcttctgtggtgcgtggcgagctaccctgatgtgcgagctgcgcattcacgggaagaggtgcaagagcttgtgaacgttgcactggatattatcgatcaatgtgtcgagcggtggccagggaccgcatcggcatctcagctctatgctactctcacgaaagcctgcctacagagttatgactcgaataacactcctatattatccagtcctggttcactaaatactccaccgtcacagccggacaccagttcccctcaacccaactcatcaagcgctaaccaaacacctcaacctgctttcaagccaccacagtttggggctgtattcggctcaacaccagagtcaatggaaaactatgctcttgacagcaattttcctccgcacccgacttttcgatccaattccatttttctcaatcccgcctccagcgaccacacgggccgccggttcagctattttccgcccgatttcgcccagtcagacttggctgcgactgatgctagtccacctatttcagaagcaacgatttctccccctttcctctcaccgccgcaatctgagagcatttcccctgaccctatgctatcaatccctacggtaccaaccggccatgcaaatatgaatgcctcgatgttacaaactccaattctcaccggtcaacccctcccccatacttctcctgaagctatgctacccaacgggctacctcaaacgcagcagcgagcgcctccacaggcattcacaatccctcctctaccaccaggccagctcccgcagggtcaacgaccactaccgcaagctaccaccgtcaccgactggtttaaccctccacctccgttcatttcaccctactcctttggaagcatggggtcatcgtattggggcaacccaggtaatccaactagctttggaggtctagagcctggggccttccagtctttcaatggacttccccctgagaggcaaggaagtttgacgcaatcgcagcaaatcgaactgatgggcgttctggaaaacgagggcatgcaagacatagacacatatttgactggcgctactttttcgaatataggtacatcgggtttccaaggtatgaactggggagtgcggtcatgaaatatctgggacttttttcaaattcgaactggacacgagagataccaacatttactacttggcgcatgtatggtgggcatttgggatataccgatatatgagccgtatgaaatatgatattaagtcgaacaatcatgatttatatcttaatgcggtatagcaatttttgtgcacgttta

SEQ ID NO: 675 - DNA, 474 bp, Muscodor strobelii
  misc_feature: SGI cDNA ID NO. 559801
  misc_feature: Encodes the peptide sequence at SEQ ID NO 676
atgacaaccgaatctcaagagatgaatgatttgaatgccaattcacagttggtcgccaccgaaggcgcagatatcatgagaaagcgactccggacactcctagtcgcgtttcaaaatgacttgggctacactggcgccagcgtaggagacagtgtcagtgactttgctaccctaagcaccctctggatatccgcatttactggagtttttacgtggattgccattcttattgatgatggcgtaagcaagaatgcggaagaatggaaacagttcctatgcgatttccgtaccaaccgcaagcagcccaaccttttagctcaagcatggtcagatctcttactcctcagttgcaagcattactcgcccattgtagcgaacttcattgtcacgtcagcacttaacttcgtcaatgccaatatcctcgagcagacggaggtccctaagatgacttatacggctggtggccaggcctga

SEQ ID NO: 676 - protein, 157 aa, Muscodor strobelii
  misc_feature: SGI Peptide ID NO. 559801
  misc_feature (63)..(157): NCBI GI: 46124133 Blast Desc: FG06444.1 [Gibberella zeae PH-1]
  misc_feature (5)..(141): NCBI GI: 46137763 Blast Desc: FG10397.1 [Gibberella zeae PH-1]
  misc_feature (5)..(141): NCBI GI: 263199514 Blast Desc: longiborneol synthase [Gibberella zeae]
MTTESQEMNDLNANSQLVATEGADIMRKRLRTLLVAFQNDLGYTGASVGDSVSDFATLSTLWISAFTGVFTWIAILIDDGVSKNAEEWKQFLCDFRTNRKQPNLLAQAWSDLLLLSCKHYSPIVANFIVTSALNFVNANILEQTEVPKMTYTAGGQA

SEQ ID NO: 677 - DNA, 357 bp, Muscodor strobelii
  misc_feature: SGI EST ID NO. CUFF.1877.0
  misc_feature: Variant of the nucleotide sequence at SEQ ID NO 675
cgactccggacactcctagtcgcgtttcaaaatgacttgggctacactggcgccagcgtaggagacagtgtcagtgagttggtggatggcatgcacaaagaggcaactagtctacatataccacccccggaaagctctcatgagaggcgtgcattccaggttggggtatattacgcacatctttgctaccctaagcaccctctggatatccgcatttactggagtttttacgtggattgccattcttattgatgatggcgtaagcaagaatgcggaagaatggaaacagttcctatgcgatttccgtaccaaccgcaagcagcccaaccttttagctcaagcatggtcagatctctt

SEQ ID NO: 678 - DNA, 894 bp, Muscodor strobelii
  misc_feature: SGI cDNA ID NO. 559802
  misc_feature: Encodes the peptide sequence at SEQ ID NO 679
atggccacgacatcctctgcagacgaggagatcgacaggttgcgcgccttgcttaagcgagagcaaagcccacgcaaggaagcagagcaaaatcgagaagaggaacagaggagacgcgagagtgccgagatacgcgcagaggggtcgcggctacaatcactccaacaataccttgagggctgccactcactgagtctcgccattcacgtcgatacagacccatcctcgacaacgcagggcgacacgacaaatcccaccagccgcgtcttcccccgacgcatcatcccctgggatgacttcccatcgcaccagcccttctgccagtctgcaaccttcccatcctcacaccagctcgactacgttgcccgcttaatcaagcctgtcgcgagcgagaccgccctccgcgtaaacgtggagaccagagactcatatgaacaaacagctttagcgcgagcgctttcgccttcgtttggctcaccagaaattgctgccttgttgattcagtacggcgccgaaattccggaacagtccacgaaggacggacttcgattccttaaagacatatctgaaaaagcggatgcccccggaacttacagcattctgaagtataacaagttccttgcacccctcttgcagctcttagtgaacttctactactcatgcaagttaggagatcaggagggagttataaagagtttcgtggatgactgcccgccttggatggtaacgatcgtgacagacatggggcggcacagacttacaaatgaccatttactagataggttgaaagagaaattcgactttggcacgagactaccacggcaagcaaagcctgatatgaaaatgtggtggatgcacgagggcgtggaacgacgttttcaagacgataaataa

SEQ ID NO: 679 - protein, 297 aa, Muscodor strobelii
  misc_feature: SGI Peptide ID NO. 559802
  misc_feature (30)..(148): NCBI GI: 226277734 Blast Desc: conserved [Paracoccidioides brasiliensis Pb01]
  misc_feature (4)..(148): NCBI GI: 171681616 Blast Desc: protein product [Podospora anserina] gi|170940767|emb|CAP66416.1| protein product [Podospora anserina]
  misc_feature (53)..(181): NCBI GI: 261361603 Blast Desc: conserved [Verticillium albo-atrum VaMs.102]
  misc_feature (10)..(148): NCBI GI: 256733701 Blast Desc: NECHADRAFT_35371 [Nectria haematococca mpVI 77-13-4]
  misc_feature (31)..(135): NCBI GI: 119174150 Blast Desc: CIMG_09057 [Coccidioides immitis RS]
  misc_feature (31)..(135): NCBI GI: 240106711 Blast Desc: CPC735_014960 [Coccidioides posadasii C735 delta SOWgp]
  misc_feature (8)..(135): NCBI GI: 240111182 Blast Desc: CPC735_070170 [Coccidioides posadasii C735 delta SOWgp]
  misc_feature (8)..(164): NCBI GI: 116192757 Blast Desc: CHGG_06096 [Chaetomium globosum CBS 148.51] gi|88182009|gb|EAQ89477.1| CHGG_06096 [Chaetomium globosum CBS 148.51]
  misc_feature (29)..(135): NCBI GI: 119189595 Blast Desc: CIMG_04845 [Coccidioides immitis RS]
  misc_feature (8)..(135): NCBI GI: 145607710 Blast Desc: MGG_13570 [Magnaporthe grisea 70-15] gi|145015236|gb|EDJ99772.1| MGG_13570 [Magnaporthe grisea 70-15]
MATTSSADEEIDRLRALLKREQSPRKEAEQNREEEQRRRESAEIRAEGSRLQSLQQYLEGCHSLSLAIHVDTDPSSTTQGDTTNPTSRVFPRRIIPWDDFPSHQPFCQSATFPSSHQLDYVARLIKPVASETALRVNVETRDSYEQTALARALSPSFGSPEIAALLIQYGAEIPEQSTKDGLRFLKDISEKADAPGTYSILKYNKFLAPLLQLLVNFYYSCKLGDQEGVIKSFVDDCPPWMVTIVTDMGRHRLTNDHLLDRLKEKFDFGTRLPRQAKPDMKMWWMHEGVERRFQDDK

SEQ ID NO: 680 - DNA, 1020 bp, Muscodor strobelii
  misc_feature: SGI cDNA ID NO. 559803
  misc_feature: Encodes the peptide sequence at SEQ ID NO 681
atggagtctatattacaatggcgctcagcattgccagctgacgtggacaatggacgcattatcaatatcgtagcttacgtccttgcaagcttttctactgtttgcgtacttctgcgcatctatagtaggatatttataatccgcgcccctgcctgggacgatgttcttatgggtttgactgcaatcctaagtgttggcgccagaggctcgacctcggctgctatcgcgcacggtctcggtcggcatgcgcagtacttatcggtcgaggacataacgaaagccgtgtattatatcaccatcgcccaagcccttgctattttggcccatactataccgaaactagctcttgtcctttttatccgcaagttgctaggagttgcggcgcgcggtatctggattttgtattttgtcgtcggtattcttttcataacgagtcccacggccattttcctggtctttcttccatgcaacgcgcattttctcatgtcgcatccttcttgggcgatttctccgtggtcggcagtggcagacttggcattggctgccttccctgcctttgcactttggagacttcaaatgaagacgtcgcgaaaagttgccgttattgccatcatggctttgggattcttcgccatggctgcagccatcgcaaaaactgtcgagattcccaacttctactcatcggacgcaacatatgatctgttttggctttttattacactattcattcagctcgatcttggcattactgccgcctgtgcaccagcatttcctaagctttggcagcatgtgttcggcaaacgagaccagggttcaatacgcgcacggcatcgaaggctggtggtaccttctgcctatgattataagaagccaagcggcaaaaatgacacgattgacttgcacattaatatatcgtctaaccactccggacacagtttgatagcatcaccgacgttagattcaccccctttgagagacaaagctatggccgcggctagcgtccgggaacggcatgactag

SEQ ID NO: 681 - protein, 339 aa, Muscodor strobelii
  misc_feature: SGI Peptide ID NO. 559803
  misc_feature (16)..(321): NCBI GI: 255943321 Blast Desc: Pc18g06020 [Penicillium chrysogenum Wisconsin 54-1255] gi|211587162|emb|CAP94826.1| Pc18g06020 [Penicillium chrysogenum Wisconsin 54-1255]
  misc_feature (14)..(303): NCBI GI: 238844609 Blast Desc: integral membrane protein [Microsporum canis CBS 113480]
  misc_feature (8)..(309): NCBI GI: 121709772 Blast Desc: conserved [Aspergillus clavatus NRRL 1] gi|119400665|gb|EAW11090.1| conserved [Aspergillus clavatus NRRL 1]
  misc_feature (9)..(267): NCBI GI: 238842889 Blast Desc: integral membrane protein [Microsporum canis CBS 113480]
  misc_feature (12)..(338): NCBI GI: 189193949 Blast Desc: conserved [Pyrenophora tritici-repentis Pt-1C-BFP] gi|187978877|gb|EDU45503.1| conserved [Pyrenophora tritici-repentis Pt-1C-BFP]
  misc_feature (22)..(309): NCBI GI: 212527270 Blast Desc: conserved [Penicillium marneffei ATCC 18224] gi|210073190|gb|EEA27277.1| conserved [Penicillium marneffei ATCC 18224]
  misc_feature (13)..(293): NCBI GI: 225557238 Blast Desc: integral membrane protein [Ajellomyces capsulatus G186AR]
  misc_feature (13)..(272): NCBI GI: 226287054 Blast Desc: integral membrane protein [Paracoccidioides brasiliensis Pb18]
  misc_feature (22)..(309): NCBI GI: 242783189 Blast Desc: conserved [Talaromyces stipitatus ATCC 10500] gi|218720293|gb|EED19712.1| conserved [Talaromyces stipitatus ATCC 10500]
  misc_feature (16)..(326): NCBI GI: 261358122 Blast Desc: conserved [Verticillium albo-atrum VaMs.102]
MESILQWRSALPADVDNGRIINIVAYVLASFSTVCVLLRIYSRIFIIRAPAWDDVLMGLTAILSVGARGSTSAAIAHGLGRHAQYLSVEDITKAVYYITIAQALAILAHTIPKLALVLFIRKLLGVAARGIWILYFVVGILFITSPTAIFLVFLPCNAHFLMSHPSWAISPWSAVADLALAAFPAFALWRLQMKTSRKVAVIAIMALGFFAMAAAIAKTVEIPNFYSSDATYDLFWLFITLFIQLDLGITAACAPAFPKLWQHVFGKRDQGSIRARHRRLVVPSAYDYKKPSGKNDTIDLHINISSNHSGHSLIASPTLDSPPLRDKAMAAASVRERHD

SEQ ID NO: 682 - DNA, 220 bp, Muscodor strobelii
  misc_feature: SGI EST ID NO. CUFF.2019.0
  misc_feature: Variant of the nucleotide sequence at SEQ ID NO 680
gaattgtgtccgaggtctctgtggattcaagacgtataacagactaatctctcttatgtatagcgtggtcggcagtggcagacttggcattggctgccttccctgcctttgcactttggagacttcaaatgaagacgtcgcgaaaagttgccgttattgccatcatggctttgggattcttcgccatggctgcagccatcgcaaaaactgtcgagattcc

SEQ ID NO: 683 - DNA, 1497 bp, Muscodor strobelii
  misc_feature: SGI cDNA ID NO. 559804
  misc_feature: Reduced expression when VOC is produced
  misc_feature: Encodes the peptide sequence at SEQ ID NO 684
atggcgagcgacgacgataccgaagactatccccagcccttcgacgccaagcagctctccgccaagaagcgcaagtccagcgacgcctcgccaccccccagacgcaccaacggcaagaagcgcgacaacgacgaccaagatgagctgccccagcccttcgacgccaaagcactagcccccgccaagaagcgactgcgctccacctccccctccgatgcgcctaggaagctcaagcggccgggacagcgagcacgcatcaccaactcggaggcggccgccatccgacagcgccacgagcagcgcgagcgagagtcggagcagcagatgatggccgccagcgcagtggcccccggcgctgtcaggggcatcaacgacatcgtccgcgagcactacaatgctgtccccgagagaggcagggactggcgcaagacgggaagtcgcatcaagggcctgcgcgtcttcaacaactgggtcaagagtaccctcatccagaagttctcccccgacgaggaccacacccccggcgcacaccagcagggtagggacatggcgggtgcgcgcggcggccacgagctgatcgtgctggacatgggctgcggcaagggcggagacctgggcaagtggcagcaggccccgcagagagtacagctctacgtcggactcgaccccgcaaacgtgtccatcgagcaggccagagagcgctaccgcagcatgggcagtcgaggaggaggtagaggcggacgggggggctacagaggaggcgggagacagcaacacctgttcgactgccggttccttgtcaaggactgctacagcacactcatcgacgacgtcgagattgtgcgccaagtcggcttcgatccctcccccatgggacatggcaacttcgacatcgtgagcatgatgttttgcatgcactatgcattcgagcgcgaggagaaggctcgcaacatgctcatgaacgtgtccgctgctctgaagaaaggaggcagattcatcggctgcataccgagctctgacattatcagctccagagtcactgctttcaacgagcgcaacggcaagaagaccgacgaaggctcggcaccagaagaaggggaagccgaggacaaagaagagggcgaagctgaggataccgcagagtggggcaacgacttataccgcgtacgattccccggcaagacacccgaagacggtatcttccgtccaccgttcggctggaagtacagtttcttcctcgacgaggctgttgaggaggtgccagaatacgtggtgccttgggaggcattccgagctattgccgaagactacaacctcgagatgcagtatcactctagcttccgcgagatatgggagacggagaaggatgacccgatactcggtccactgagcgagcgcatgggtgtcagagagcgtgggaagggacccttactcgtgagcgagcaggagctggagattgccaatttctacgtcgccttttgtttctacaaggtctaa

SEQ ID NO: 684 - protein, 498 aa, Muscodor strobelii
  misc_feature: SGI Peptide ID NO. 559804
  misc_feature (114)..(498): Pfam Id: PF03291 Pfam Desc: mRNA capping enzyme
  misc_feature (151)..(498): Pfam Id: PF03291 Pfam Desc: mRNA capping enzyme
  misc_feature (35)..(498): NCBI GI: 256733566 Blast Desc: NECHADRAFT_35705 [Nectria haematococca mpVI 77-13-4]
  misc_feature (25)..(498): NCBI GI: 46128135 Blast Desc: FG08445.1 [Gibberella zeae PH-1]
  misc_feature (42)..(498): NCBI GI: 85085954 Blast Desc: NCU03971 [Neurospora crassa OR74A] gi|28918703|gb|EAA28374.1| NCU03971 [Neurospora crassa OR74A]
  misc_feature (27)..(498): NCBI GI: 39977205 Blast Desc: MGG_06505 [Magnaporthe grisea 70-15] gi|158514086|sp|A4R8D7.1|MCES_MAGGR RecName: Full=mRNA cap guanine-N7 methyltransferase; AltName: Full=mRNA AltName: cap
  misc_feature (43)..(498): NCBI GI: 171682444 Blast Desc: protein product [Podospora anserina] gi|170941181|emb|CAP66831.1| protein product [Podospora anserina]
  misc_feature (42)..(498): NCBI GI: 40882314 Blast Desc: related to RNA (guanine-N7-) methyltransferase [Neurospora crassa]
  misc_feature (1)..(498): NCBI GI: 156060125 Blast Desc: SS1G_02201 [Sclerotinia sclerotiorum 1980] gi|154699609|gb|EDN99347.1| SS1G_02201 [Sclerotinia sclerotiorum 1980]
  misc_feature (2)..(498): NCBI GI: 154315451 Blast Desc: BC1G_04298 [Botryotinia fuckeliana B05.10] gi|150847238|gb|EDN22431.1| BC1G_04298 [Botryotinia fuckeliana B05.10]
  misc_feature (45)..(475): NCBI GI: 116202599 Blast Desc: CHGG_09184 [Chaetomium globosum CBS 148.51] gi|88177702|gb|EAQ85170.1| CHGG_09184 [Chaetomium globosum CBS 148.51]
  misc_feature (66)..(498): NCBI GI: 154274466 Blast Desc: conserved [Ajellomyces capsulatus NAm1] gi|150414524|gb|EDN09886.1| conserved [Ajellomyces capsulatus NAm1]
  misc_feature (27)..(498): SWISSPROT Homolog: EC 2.1.1.56 mRNA (guanine-N(7)-)-methyltransferase
  misc_feature: Useful for introducing or modulating the production of volatile compounds
MASDDDTEDYPQPFDAKQLSAKKRKSSDASPPPRRTNGKKRDNDDQDELPQPFDAKALAPAKKRLRSTSPSDAPRKLKRPGQRARITNSEAAAIRQRHEQRERESEQQMMAASAVAPGAVRGINDIVREHYNAVPERGRDWRKTGSRIKGLRVFNNWVKSTLIQKFSPDEDHTPGAHQQGRDMAGARGGHELIVLDMGCGKGGDLGKWQQAPQRVQLYVGLDPANVSIEQARERYRSMGSRGGGRGGRGGYRGGGRQQHLFDCRFLVKDCYSTLIDDVEIVRQVGFDPSPMGHGNFDIVSMMFCMHYAFEREEKARNMLMNVSAALKKGGRFIGCIPSSDIISSRVTAFNERNGKKTDEGSAPEEGEAEDKEEGEAEDTAEWGNDLYRVRFPGKTPEDGIFRPPFGWKYSFFLDEAVEEVPEYVVPWEAFRAIAEDYNLEMQYHSSFREIWETEKDDPILGPLSERMGVRERGKGPLLVSEQELEIANFYVAFCFYKV

SEQ ID NO: 685 - DNA, 1494 bp, Muscodor strobelii
  misc_feature: SGI cDNA ID NO. 559805
  misc_feature: Reduced expression when VOC is produced
  misc_feature: Encodes the peptide sequence at SEQ ID NO 686
atgggctccgatccgcagtatgcgaagtggcctctgctgccgctggcgcagcacgtcttcaccctcaccaacccctacgcctccaagccagcccagcaggctgccgtcaagagcctgcaggatgccatccaggagcacaagatggcgcccctctacaagcacctggcccaccccaccgacggcatcctcaacgcctcgggcgagtcctcctccgcccacgccgcacaccagaagcccctcgcccggaaacccagcgccgccggcatggtcgccaccaagggcgccacgtcgggtgccaatctgccctgggacgacagcatctaccagaagctgaaggccgacaacgacaccgagctggacgacatcaagaaagaggaggacgaggcggtcgagaaggccggtgacaccgagatcgccgccgccaggggcaagcgcgcagagttcttcgcaaagataggcgacaaggataaagcaatagcagcctatgaggacttgttagagaagacaggcatcttaggcaccaagatcgacataaccctcgccatcatccgcaccggcctcttcttcggcgaccgatccctcgtcaagaagcacgtcgtcacggccaaggccctcgtcgagagcggtggtgactgggaccgccggaaccgtctcaaggcctacgagggcctccatctcctcaccatccgatcctacaacctcgccgcccctctcctcctcgactccctctccaccttcaccagctacgaactctgcacatactccaacctcgtcgtctactccgtcctcgccggctccgtatcgctcaagagagtcgacttcaagagcaaggtcgtcgatgccccagagatcaaggcaattctgggcgcagacggcgaagacaagctcttggctctgtccggcgccatctcagcaggccccggagcagaggatgctgatatgtcggatgccaagaaccccggctcgtccaccgcccccgccaacaaggccgtcgtcaacttgaccactctcgggacgggctccgatcagcccgaagccgaggtcgccatcgacttctcttctctcgcccagcttgtcaacagtctgtacaacggccagtacaagctcttcttccaagcccttgccctggttgaggagcaattcctcacgcaggaccggtacttgttcgagcaccgcggctggttcgtccgtgagatgaggttgcgcgcataccagcagctgctccagagctaccgtgttgtcgggcttgagagcatggccaacgacttcggtgtcacggtcgatttcttggaccgtgatctggccaagttcattgcaggcggccgcatcccttgtacaatcgaccgcgtgacgggcaagggtgtcatcgagacgaaccgcccagatgacaagaacaagcagtaccaggacgtcatccggcagggtgatcagctgatcacgaagctacagaaatacggccaggctgtgcgtctgcgtggcagcgagagagcgtaa

SEQ ID NO: 686 - protein, 497 aa, Muscodor strobelii
  misc_feature: SGI Peptide ID NO. 559805
  misc_feature (353)..(460): Pfam Id: PF01399 Pfam Desc: PCI domain
  misc_feature (1)..(496): NCBI GI: 226288173 Blast Desc: conserved [Paracoccidioides brasiliensis Pb18]
  misc_feature (1)..(496): NCBI GI: 225679143 Blast Desc: 26S proteasome regulatory subunit RPN7 [Paracoccidioides brasiliensis Pb03]
  misc_feature (1)..(496): NCBI GI: 258575001 Blast Desc: 26S proteasome regulatory subunit RPN7 [Uncinocarpus reesii 1704] gi|237901948|gb|EEP76349.1| 26S proteasome regulatory subunit RPN7 [Uncinocarpus reesii 1704]
  misc_feature (1)..(497): NCBI GI: 240105570 Blast Desc: PCI domain containing protein [Coccidioides posadasii C735 delta SOWgp]
  misc_feature (1)..(497): NCBI GI: 159124227 Blast Desc: proteasome regulatory particle subunit (RpnG), [Aspergillus fumigatus A1163]
  misc_feature (3)..(497): NCBI GI: 212529232 Blast Desc: proteasome regulatory particle subunit (RpnG), [Penicillium marneffei ATCC 18224] gi|210074171|gb|EEA28258.1| proteasome regulatory particle subunit (RpnG), [Penicillium ATCC
  misc_feature (1)..(497): NCBI GI: 70991637 Blast Desc: proteasome regulatory particle subunit (RpnG) [Aspergillus fumigatus Af293] gi|66848300|gb|EAL88629.1| proteasome regulatory particle subunit (RpnG), [Aspergillus
  misc_feature (3)..(497): NCBI GI: 242764044 Blast Desc: proteasome regulatory particle subunit (RpnG), [Talaromyces stipitatus ATCC 10500] gi|218723891|gb|EED23308.1| proteasome regulatory particle subunit (RpnG), [Talaromyces ATCC
  misc_feature (1)..(496): NCBI GI: 189200979 Blast Desc: 26S proteasome regulatory subunit RPN7 [Pyrenophora tritici-repentis Pt-1C-BFP] gi|187983925|gb|EDU49413.1| 26S proteasome regulatory subunit RPN7 [Pyrenophora tritici-repentis
  misc_feature (1)..(496): NCBI GI: 238837918 Blast Desc: 26S proteasome regulatory subunit RPN7 [Microsporum canis CBS 113480]
  misc_feature: Useful for introducing or modulating the production of volatile compounds
MGSDPQYAKWPLLPLAQHVFTLTNPYASKPAQQAAVKSLQDAIQEHKMAPLYKHLAHPTDGILNASGESSSAHAAHQKPLARKPSAAGMVATKGATSGANLPWDDSIYQKLKADNDTELDDIKKEEDEAVEKAGDTEIAAARGKRAEFFAKIGDKDKAIAAYEDLLEKTGILGTKIDITLAIIRTGLFFGDRSLVKKHVVTAKALVESGGDWDRRNRLKAYEGLHLLTIRSYNLAAPLLLDSLSTFTSYELCTYSNLVVYSVLAGSVSLKRVDFKSKVVDAPEIKAILGADGEDKLLALSGAISAGPGAEDADMSDAKNPGSSTAPANKAVVNLTTLGTGSDQPEAEVAIDFSSLAQLVNSLYNGQYKLFFQALALVEEQFLTQDRYLFEHRGWFVREMRLRAYQQLLQSYRVVGLESMANDFGVTVDFLDRDLAKFIAGGRIPCTIDRVTGKGVIETNRPDDKNKQYQDVIRQGDQLITKLQKYGQAVRLRGSERA

SEQ ID NO: 687 - DNA, 8184 bp, Muscodor strobelii
  misc_feature: SGI EST ID NO. CUFF.2572.0
  misc_feature: Variant of the nucleotide sequence at SEQ ID NO 685
ctgagaagagcaagtctattaggacagagtatagggttttcagaagggtacggtggaggttaaagttcatgagatcgctcagctttccgaagcctgtgagtaggcatgatggattcacggattggtgtcgtaaggatgattgagctgtgtttagtcgtatcgtagtgtcgtggagattcatgatagctggagtttgctttatctatgttgaatacgagtgagtgctgaatgccgaattgttcactttgatctagctcacagatcatcatgctatactaactcgtagacgcaaatagtagaatctttcgcagaatggtagtatgcaattcatcgcctcattctcaggaactatcaagctctagttgatcggtcgagatgaaagcagccgcaagtaggacagcctagtaccagtatataatgccatatatacttctcatcatccatccataagatatccatataggttctgatcctgcgcctatagatatcctgattagaccttgtagaaacaaaaggcgacgtagaaattggcaatctccagctcctgctcgctcacgagtaagggtcccttcccacgctctctgacacccatgcgctcgctcagtggaccgagtatcgggtcatccttctccgtctcccatatctcgcggaagctagagtgatactgcatctcgaggttgtagtcttcggcaatagctcggaatgcctcccaaggcaccacgtattctggcacctcctcaacagcctcgtcgaggaagaaactgtacttccagccgaacggtggacggaagataccgtcttcgggtgtcttgccggggaatcgtacgcggtataagtcgttgccccactctgcggtatcctcagcttcgccctcttctttgtcctcggcttccccttcttctggtgccgagccttcgtcggtcttcttgccgttgcgctcgttgaaagcagtgactctggagctgataatgtcagagctcggtatgcagccgatgaatctgcctcctttcttcagagcagcggacacgttcatgagcatgttgcgagccttctcctcgcgctcgaatgcatagtgcatgcaaaacatcatgctcacgatgtcgaagttgccatgtcccatgggggagggatcgaagccgacttggcgcacaatctcgacgtcgtcgatgagtgtgctgtagcagtccttgacaaggaaccggcagtcgaacaggtgttgctgtctcccgcctcctctgtagcccccccgtccgcctctacctcctcctcgactgcccatgctgcggtagcgctctctggcctgctcgatggacacgtttgcggggtcgagtccgacgtagagctgtactctctgcggggcctgctgccacttgcccaggtctccgcccttgccgcagcccatgtccagcacgatcagctcgtggccgccgcgcgcacccgccatgtccctaccctgctggtgtgcgccgggggtgtggtcctcgtcgggggagaacttctggatgagggtactcttgacccagttgttgaagacgcgcaggcccttgatgcgacttcccgtcttgcgccagtccctgcctctctcggggacagcattgtagtgctcgcggacgatgtcgttgatgcccctgacagcgccgggggccactgcgctggcggccatcatctgctgctccgactctcgctcgcgctgctcgtggcgctgtcggatggcggccgcctccgagttggtgatgcgtgctcgctgtcccggccgcttgagcttcctaggcgcatcggagggggaggtggagcgcagtcgcttcttggcgggggctagtgctttggcgtcgaagggctggggcagctcatcttggtcgtcgttgtcgcgcttcttgccgttggtgcgtctggggggtggcgaggcgtcgctggacttgcgcttcttggcggagagctgcttggcgtcgaagggctggggatagtcttcggtatcgtcgtcgctcgccatcatggacgaggaggatagggggcgatagttcggaggtgatgatgatgatgatgattggaggtgaatcagttggattgatgatgattgggactggtttttatatggagtcttacttggagaaagaagatggaagtagtgaggatctaaactgtagtctgaagataattgatggggttgtgcagtgtcaatctgagatgggatgaagaaaggtaggtacaaagggaaagtgcatcgatcctaaggtccgaccagcctgaggcttctaaggtctggagcgagctggagaagtggagctctggctgatctctgtggtagctgccggaggtaggttttcaggtacgtaccgtccatctgaggctcgtagcggggcggcaactccaagtacacctaggctagactctaattggctgcgagacaggacattgctggaggagctgggcaattacgtcccgccttgtcgcctgcagcagcagcagcatcgcagcttcaactctcaccaaacaccaaacttgtgacttcttcacctgcatcgtcaccagccactcttcctcctccccacatctacatacgtaatctgtcgtctgccattgtcttgagataacccactgaagatccccgcgaccgccctccctcaccgaataatcgcaatccatccccgaccaccctcttccacccgcttccagacatcagcccggccaacatgggctccgatccgcagtatgcgaagtggcctctgctgccgctggcgcagcacgtcttcaccctcaccaacccctacgcctccaagccagcccagcaggctgccgtcaagagcctgcaggatgccatccaggagcacaagatggcgcccctctacaagcacctggcccaccccaccgacggcatcctcaacgcctcgggcgagtcctcctccgcccacgccgcacaccagaagcccctcgcccggaaacccagcgccgccggcatggtcgccaccaagggcgccacgtcgggtgccaatctgccctgggacgacagcatctaccagaagctgaaggccgacaacgacaccgagctggacgacatcaagaaagaggaggacgaggcggtcgagaaggccggtgacaccgagatcgccgccgccaggggcaagcgcgcagagttcttcgcaaagataggcgacaaggataaagcaatagcagcctatgaggacttgttagagaagacaggcatcttaggcaccaagatcgacataaccctcgccatcatccgcaccggcctcttcttcggcgaccgatccctcgtcaagaagcacgtcgtcacggccaaggccctcgtcgagagcggtggtgactgggaccgccggaaccgtctcaaggcctacgagggcctccatctcctcaccatccgatcctacaacctcgccgcccctctcctcctcgactccctctccaccttcaccagctacgaactctgcacatactccaacctcgtcgtctactccgtcctcgccggctccgtatcgctcaagagagtcgacttcaagagcaaggtcgtcgatgccccagagatcaaggcaattctgggcgcagacggcgaagacaagctcttggctctgtccggcgccatctcagcaggccccggagcagaggatgctgatatgtcggatgccaagaaccccggctcgtccaccgcccccgccaacaaggccgtcgtcaacttgaccactctcgggacgggctccgatcagcccgaagccgaggtcgccatcgacttctcttctctcgcccagcttgtcaacagtctgtacaacggccagtacaagctcttcttccaagcccttgccctggttgaggagcaattcctcacgcaggaccggtacttgttcgagcaccgcggctggttcgtccgtgagatgaggttgcgcgcataccagcagctgctccagagctaccgtgttgtcgggcttgagagcatggccaacgacttcggtgtcacggtcgatttcttggaccgtgatctggccaagttcattgcaggcggccgcatcccttgtacaatcgaccgcgtgacgggcaagggtgtcatcgagacgaaccgcccagatgacaagaacaagcagtaccaggacgtcatccggcagggtgatcagctgatcacgaagctacagaaatacggccaggctgtgcgtctgcgtggcagcgagagagcgtaagggcaggtggaatggagggagggaatttgcaggggggaaaaactattgagacgcgggttgacgtgggttgttggcctgttcgctgtagactcggatggcatagcatagcttagatcttgagaggaatagaacaaacaacttgtaaaatgctagcatggtaggacttgatttgaaatcaacacttaaccatgtctgtatgaacttgcttcgggatggaatgagactcggcccaatccaactttcaacattgtttgggaattaggatcaacaacgtgactctctcatacaataaatagcacatagctttctaggagggatacgcttgatgcatcatagaatcatgactacataatacttagagtgagtcgaaatagtcaacattgtcagagtagagatgcttcataacttctaactgtatctaaactacctgactagactctatctaccatgtgtagcttcttcttcttctcgaggtaacccaggttaattcactgcaatcaaactcctgcatagccaatgcctgtatcgatttttcgtgtccctaggaattgcgtattgtgtaatcccgctttcttcttctctttctttatgatcctcgagttatgttccatcgtcatccggatgcgtatcctcgtgcctaatccaattcttggtgttcaaaatatccagagaatagaacataggagtatacccacgtaggcagggaagggtagcgtcgctcaaggtttgtgaacacctcagcgatacttctccatgaactccttatggaacttcgtaatgctgcccacccactctgtaccaggcgcaaggaacgtggtcctgaaatgcagacttccctccttctgtccgaacccagagccaggaaccacacaaacaccggtagcctcgaggagcctcatacaatagaactcatcaggtgttcttccctctttcttggctgcttctgcggccttggcagagacatgaattgtagggaaaagatacatgcttccctgcggctcgccgcactccacgccctccatagacttgaaggcttcgtatagtgcgtatgctcgttcctttagcccagagaagatactgttgtattccttgtcgtagagttcgtaggatggggatccgggttggggagggttgaccatcatctctactagacattggccgatgactggcgcgcagagggtgatggagacgaatttatagatttgctcttcgacttctggcaggaaaccgatgaggtcgaagtatccaccgcggtgaccgcattcgcccaccattcccttggagatggagtgaagcgaggcaagttcgacgccgtcgtatttcccgggggaggctttctgcatggatagtaggacttggcggaaggatgtgaatttaccgatgaagacgttggtctggtagacttcgtcggccattaccacgagcttgtgttctgctgcgaattcgagaactgaacggatgtcagattcagagagggaggctcctgtggggttaccggggttgatgatcacgatggcgcggacgtctgtgcccgatgcctttgcagattcataggaggacttgatggtttcgagagatgtgccccagttggctgcttcatcgaggtagtaggggacgcatgttgcgttgagtacggagagagaagctgtgtagaggggatactgagggatggggacaaggatgcccgagtttggtgccgcgcagagtatgtggaggagtgtgttcacgccggctgaggcaccggctgagaggtagatgtgtgctgggtcagcggcgaagccatcacgctctggattcctcttttagtaatggggtttcatgggtcaaaaattcttgaacgtactctcgagaaacttggcgacgctctccttgatcgccggaacaccagcgctggcgctgtaagcaccaacactgcctgcattcttcaaaagccacttcgcgcggtccaagacatccgatttgtagcccaatgagttcaacagcacatcctcgtgttcgaggagcttgggattctcgagaatgctgagaacttggcggaagaaagtgatgggcttctggtcgagctgctgagggttaccaatgttggcgctgatgacctcgtcgaaaggcaaactcgtgtcgcctttgcgtagcctggctctgtactcctccgacatgaccgccagttcaccgcgcacggcgtacttggcctcgacgatgtgcgggttgatgtttcctaggtttagccggggcattctgggcgagctgtggaaatgccgtgagatttttttaaagttattttgtcgtgttagtggggttgaggaccctgatgatggtgacgatgtcaaggatggcggggtagagatgagagctatgccaatcaggaaagtcaaaaatcaacggttctctacgtaggcagcgaaagcgggatagcagaaataggaaatcaaagccgaagagttaaagatgtttttcagatctgaagtatcaggcaaaaccttaggtgctggtgtcacaggctagtgggggatgcgatattcagtaacaaaggtgaagagtgaggggctacacaaaatcacgtctctgcccatctatcgcgatttttttctccattaccgtcggctgaacccgcgattcttttgagtaccgggtaggtacagaggtgaagacgagtcgcgagcgtaatgcactcgctacggcaacagagtgacaggtagagtcgtggtacatgacgggctgcgggatggcctgacttgttgaacccgcagaatggatccgcgtcgttacgtgggagtgggaggtaggatgccgaaccggcgtcactgctccactggagacgggcggttggtcgagagcttcttcaagcattacaacatgatatgtgtttgtccttgttggcgcgtgagcatgttttatgaatggggaactccccgatacatgctagacgtaatatgtagacataaatagaaggtgaacaattgatgcatgtgttgagcaaatggccgtcgtcaattgaatatcgcgaggacgcgttcacggtggtcggtcgggctttggagcttgaatgattccacctaccggcatttccaagggtggatctcgaggctgtcctcgacgatactgttgagaaattgacagctttgcttgcggcaccgcgtggcctggtcgagcggcccagtattatcgacgggatagatgccatggtgggcagcttcttgatcgtccttgacctcgacagtcgtctttatgccgtgtcggactgcgggtagatcgggaagctcgaggtgctgagacttcgacgccaaagtggtcaaatcaattgcacaaatgtcaagaagcagataagaataccgaacaagtctcatgtcgattcctcgaagctatcgacaagctgagctccggtgagcggcaatgaaccttgttcaggcacagctaaggcaggctcagggtcctcaccgtctaccgcgacgagttgctgcgtaatttcgcctgtgggctcatcggagtttgatcggagctccagcgcgacacaatattatataaccaaaacacgagcgatatgattggatgcgtatttacgagagacattgaatacagtggtggaatctgatcagtttgctcaatgtggtcaaattcattaggtgttgcaagactgtgacgaattgatagcaagcgcatttaggtgtggtacctatgaaagaagttttttctatctccaacaaacctaaaccaatgtgaagcatttagtctaatggtcacaggcagcacacttatcaatttctcacgaagcctacccggaaattgcttgacagcacatcgagatatttggacgacagcgacgatatgtctagaaagtagcattgttgtaggaattttgtctatttagggacctaattgatttatctcaatgtagcgagcgtgaactggtgcaaaaaataaaccaattctggtggtattgatccttgtggctgttcgatattcaaataatgttatttaaagacaaaataagtcaattcaagca

SEQ ID NO: 688 - DNA, 1443 bp, Muscodor strobelii
  misc_feature: SGI cDNA ID NO. 559806
  misc_feature: Reduced expression when VOC is produced
  misc_feature: Encodes the peptide sequence at SEQ ID NO 689
atgccccggctaaacctaggaaacatcaacccgcacatcgtcgaggccaagtacgccgtgcgcggtgaactggcggtcatgtcggaggagtacagagccaggctacgcaaaggcgacacgagtttgcctttcgacgaggtcatcagcgccaacattggtaaccctcagcagctcgaccagaagcccatcactttcttccgccaagttctcagcattctcgagaatcccaagctcctcgaacacgaggatgtgctgttgaactcattgggctacaaatcggatgtcttggaccgcgcgaagtggcttttgaagaatgcaggcagtgttggtgcttacagcgccagcgctggtgttccggcgatcaaggagagcgtcgccaagtttctcgagaagcgtgatggcttcgccgctgacccagcacacatctacctctcagccggtgcctcagccggcgtgaacacactcctccacatactctgcgcggcaccaaactcgggcatccttgtccccatccctcagtatcccctctacacagcttctctctccgtactcaacgcaacatgcgtcccctactacctcgatgaagcagccaactggggcacatctctcgaaaccatcaagtcctcctatgaatctgcaaaggcatcgggcacagacgtccgcgccatcgtgatcatcaaccccggtaaccccacaggagcctccctctctgaatctgacatccgttcagttctcgaattcgcagcagaacacaagctcgtggtaatggccgacgaagtctaccagaccaacgtcttcatcggtaaattcacatccttccgccaagtcctactatccatgcagaaagcctcccccgggaaatacgacggcgtcgaacttgcctcgcttcactccatctccaagggaatggtgggcgaatgcggtcaccgcggtggatacttcgacctcatcggtttcctgccagaagtcgaagagcaaatctataaattcgtctccatcaccctctgcgcgccagtcatcggccaatgtctagtagagatgatggtcaaccctccccaacccggatccccatcctacgaactctacgacaaggaatacaacagtatcttctctgggctaaaggaacgagcatacgcactatacgaagccttcaagtctatggagggcgtggagtgcggcgagccgcagggaagcatgtatcttttccctacaattcatgtctctgccaaggccgcagaagcagccaagaaagagggaagaacacctgatgagttctattgtatgaggctcctcgaggctaccggtgtttgtgtggttcctggctctgggttcggacagaaggagggaagtctgcatttcaggaccacgttccttgcgcctggtacagagtgggtgggcagcattacgaagttccataaggagttcatggagaagtatcgctga

SEQ ID NO: 689 - protein, 480 aa, Muscodor strobelii
  misc_feature: SGI Peptide ID NO. 559806
  misc_feature (81)..(468): Pfam Id: PF00155 Pfam Desc: Aminotransferase class I and II
  misc_feature (106)..(266): Pfam Id: PF00155 Pfam Desc: Aminotransferase class I and II
  misc_feature (4)..(480): NCBI GI: 154315455 Blast Desc: BC1G_04300 [Botryotinia fuckeliana B05.10] gi|150847240|gb|EDN22433.1| BC1G_04300 [Botryotinia fuckeliana B05.10]
  misc_feature (3)..(480): NCBI GI: 145608620 Blast Desc: conserved [Magnaporthe grisea 70-15] gi|145016069|gb|EDK00559.1| conserved [Magnaporthe grisea 70-15]
  misc_feature (4)..(480): NCBI GI: 156060127 Blast Desc: SS1G_02202 [Sclerotinia sclerotiorum 1980] gi|154699610|gb|EDN99348.1| SS1G_02202 [Sclerotinia sclerotiorum 1980]
  misc_feature (3)..(480): NCBI GI: 171682448 Blast Desc: protein product [Podospora anserina] gi|170941183|emb|CAP66833.1| protein product [Podospora anserina]
  misc_feature (3)..(480): NCBI GI: 256734064 Blast Desc: NECHADRAFT_77801 [Nectria haematococca mpVI 77-13-4]
  misc_feature (4)..(480): NCBI GI: 189200981 Blast Desc: alanine aminotransferase 2 [Pyrenophora tritici-repentis Pt-1C-BFP] gi|187983926|gb|EDU49414.1| alanine aminotransferase 2 [Pyrenophora tritici-repentis Pt-1C-BFP]
  misc_feature (3)..(480): NCBI GI: 85085961 Blast Desc: NCU03973 [Neurospora crassa OR74A] gi|28918705|gb|EAA28376.1| NCU03973 [Neurospora crassa OR74A]
  misc_feature (4)..(480): NCBI GI: 169618501 Blast Desc: SNOG_12441 [Phaeosphaeria nodorum SN15] gi|111059134|gb|EAT80254.1| SNOG_12441 [Phaeosphaeria nodorum SN15]
  misc_feature (3)..(480): NCBI GI: 70991639 Blast Desc: alanine aminotransferase [Aspergillus fumigatus Af293] gi|66848301|gb|EAL88630.1| alanine aminotransferase, [Aspergillus fumigatus Af293] gi|159124228|gb|EDP49346.1| alanine [Aspergillus
  misc_feature (3)..(480): NCBI GI: 119469007 Blast Desc: alanine aminotransferase, [Neosartorya fischeri NRRL 181] gi|119406047|gb|EAW15998.1| alanine aminotransferase, [Neosartorya fischeri NRRL 181]
  misc_feature (3)..(480): SWISSPROT Homolog: EC 2.6.1.2 Alanine transaminase
  misc_feature: Useful for introducing or modulating the production of volatile compounds
MPRLNLGNINPHIVEAKYAVRGELAVMSEEYRARLRKGDTSLPFDEVISANIGNPQQLDQKPITFFRQVLSILENPKLLEHEDVLLNSLGYKSDVLDRAKWLLKNAGSVGAYSASAGVPAIKESVAKFLEKRDGFAADPAHIYLSAGASAGVNTLLHILCAAPNSGILVPIPQYPLYTASLSVLNATCVPYYLDEAANWGTSLETIKSSYESAKASGTDVRAIVIINPGNPTGASLSESDIRSVLEFAAEHKLVVMADEVYQTNVFIGKFTSFRQVLLSMQKASPGKYDGVELASLHSISKGMVGECGHRGGYFDLIGFLPEVEEQIYKFVSITLCAPVIGQCLVEMMVNPPQPGSPSYELYDKEYNSIFSGLKERAYALYEAFKSMEGVECGEPQGSMYLFPTIHVSAKAAEAAKKEGRTPDEFYCMRLLEATGVCVVPGSGFGQKEGSLHFRTTFLAPGTEWVGSITKFHKEFMEKYR

SEQ ID NO: 690 - DNA, 4485 bp, Muscodor strobelii
  misc_feature: SGI EST ID NO. CUFF.2573.2
  misc_feature: Variant of the nucleotide sequence at SEQ ID NO 688
tagatgggcagagacgtgattttgtgtagcccctcactcttcacctttgttactgaatatcgcatcccccactagcctgtgacaccagcacctaaggttttgcctgatacttcagatctgaaaaacatctttaactcttcggctttgatttcctatttctgctatcccgctttcgctgcctacgtagagaaccgttgatttttgactttcctgattggcatagctctcatctctaccccgccatccttgacatcgtcaccatcatcagggtcctcaaccccactaacacgacaaaataactttaaaaaaatctcacggcatttccacagctcgcccagaatgccccggctaaacctaggaaacatcaacccgcacatcgtcgaggccaagtacgccgtgcgcggtgaactggcggtcatgtcggaggagtacagagccaggctacgcaaaggcgacacgagtttgcctttcgacgaggtcatcagcgccaacattggtaaccctcagcagctcgaccagaagcccatcactttcttccgccaagttctcagcattctcgagaatcccaagctcctcgaacacgaggatgtgctgttgaactcattgggctacaaatcggatgtcttggaccgcgcgaagtggcttttgaagaatgcaggcagtgttggtgcttacagcgccagcgctggtgttccggcgatcaaggagagcgtcgccaagtttctcgagaagcgtgatggcttcgccgctgacccagcacacatctacctctcagccggtgcctcagccggcgtgaacacactcctccacatactctgcgcggcaccaaactcgggcatccttgtccccatccctcagtatcccctctacacagcttctctctccgtactcaacgcaacatgcgtcccctactacctcgatgaagcagccaactggggcacatctctcgaaaccatcaagtcctcctatgaatctgcaaaggcatcgggcacagacgtccgcgccatcgtgatcatcaaccccggtaaccccacaggagcctccctctctgaatctgacatccgttcagttctcgaattcgcagcagaacacaagctcgtggtaatggccgacgaagtctaccagaccaacgtcttcatcggtaaattcacatccttccgccaagtcctactatccatgcagaaagcctcccccgggaaatacgacggcgtcgaacttgcctcgcttcactccatctccaagggaatggtgggcgaatgcggtcaccgcggtggatacttcgacctcatcggtttcctgccagaagtcgaagagcaaatctataaattcgtctccatcaccctctgcgcgccagtcatcggccaatgtctagtagagatgatggtcaaccctccccaacccggatccccatcctacgaactctacgacaaggaatacaacagtatcttctctgggctaaaggaacgagcatacgcactatacgaagccttcaagtctatggagggcgtggagtgcggcgagccgcagggaagcatgtatcttttccctacaattcatgtctctgccaaggccgcagaagcagccaagaaagagggaagaacacctgatgagttctattgtatgaggctcctcgaggctaccggtgtttgtgtggttcctggctctgggttcggacagaaggagggaagtctgcatttcaggaccacgttccttgcgcctggtacagagtgggtgggcagcattacgaagttccataaggagttcatggagaagtatcgctgaggtgttcacaaaccttgagcgacgctacccttccctgcctacgtgggtatactcctatgttctattctctggatattttgaacaccaagaattggattaggcacgaggatacgcatccggatgacgatggaacataactcgaggatcataaagaaagagaagaagaaagcgggattacacaatacgcaattcctagggacacgaaaaatcgatacaggcattggctatgcaggagtttgattgcagtgaattaacctgggttacctcgagaagaagaagaagctacacatggtagatagagtctagtcaggtagtttagatacagttagaagttatgaagcatctctactctgacaatgttgactatttcgactcactctaagtattatgtagtcatgattctatgatgcatcaagcgtatccctcctagaaagctatgtgctatttattgtatgagagagtcacgttgttgatcctaattcccaaacaatgttgaaagttggattgggccgagtctcattccatcccgaagcaagttcatacagacatggttaagtgttgatttcaaatcaagtcctaccatgctagcattttacaagttgtttgttctattcctctcaagatctaagctatgctatgccatccgagtctacagcgaacaggccaacaacccacgtcaacccgcgtctcaatagtttttcccccctgcaaattccctccctccattccacctgcccttacgctctctcgctgccacgcagacgcacagcctggccgtatttctgtagcttcgtgatcagctgatcaccctgccggatgacgtcctggtactgcttgttcttgtcatctgggcggttcgtctcgatgacacccttgcccgtcacgcggtcgattgtacaagggatgcggccgcctgcaatgaacttggccagatcactgtgaccagtgttagtacgatagctctactgtcaaagtatctctgcgagtgagatgacataccggtccaagaaatcgaccgtgacaccgaagtcgttggccatgctctcaagcccgacaacacggtagctctggagcagctgctggtatgcgcgcaacctcatctcacggacgaaccagccgcggtgctcgaacaagtaccggtcctgcgtgaggaattgctcctcaaccagggcaagggcttggaagaagagcttgtactggccgttgtacagactgttgacaagctgggcgagagaagagaagtcgatggcgacctcggcttcgggctgatcggagcccgtcccgagagtggtcaagttgacgacggccttgttggcgggggcggtggacgagccggggttcttggcatccgacatatcagcatcctctgctccggggcctgctgagatggcgccggacagagccaagagcttgtcttcgccgtctgcgcccagaattgccttgatctctggggcatcgacgaccttgctcttgaagtcgactctcttgagcgatacggagccggcgaggacggagtagacgacgaggttggagtatgtgcagagttcgtagctggtgaaggtggagagggagtcgaggaggagaggggcggcgaggttgtaggatcggatggtgaggagatggaggccctcgtaggccttgagacggttccggcggtcccagtcaccaccgctctcgacgagggccttggccgtgacgacgtgcttcttgacgagggatcggtcgccgaagaagaggccggtgcggatgatggcgagggttatgtcgatcttggtgcctaagatgcctgtcttctctaacaagtcctcataggctgctattgctttatcctgtgacgaatgtgtcagtagagtgcgagttgctgacgaggtagccaggtggaggtatagtggtataccttgtcgcctatctttgcgaagaactctgcgcgcttgcccctggcggcggcgatctcggtgtcaccggccttctcgaccgcctcgtcctcctctttcttgatgtcgtccagctcggtgtcgttgtcggccttcagcttctggtagatgctgtcgtcccagggcagattggcacccgacgtggcgcccttggtggcgaccatgccggcggcgctgggtttccgggcgaggggcttctggtgtgcggcgtgggcggaggaggactcgcccgaggcgttgaggatgccgtcggtggggtgggccaggtgcttgtagaggggcgccatcttgtgctcctggatggcatcctgcaggctcttgacggcagcctgctgggctggcttggaggcgtaggggttggtgagggtgaagacgtgctgcgccagcggcagcagaggccacttcgcatactgcggatcggagcccatgttggccgggctgatgtctggaagcgggtggaagagggtggtcggggatggattgcgattattcggtgagggagggcggtcgcggggatcttcagtgggttatctcaagacaatggcagacgacagattacgtatgtagatgtggggaggaggaagagtggctggtgacgatgcaggtgaagaagtcacaagtttggtgtttggtgagagttgaagctgcgatgctgctgctgctgcaggcgacaaggcgggacgtaattgcccagctcctccagcaatgtcctgtctcgcagccaattagagtctagcctaggtgtacttggagttgccgccccgctacg

SEQ ID NO: 691 - DNA, 579 bp, Muscodor strobelii
  misc_feature: SGI cDNA ID NO. 559807
  misc_feature: Encodes the peptide sequence at SEQ ID NO 692
atgaagtccaccaccgctgctctcgctctcctttccgccaccgtctccatggcggcccctacactcgacagccgcacacctgccactgtgtctggatacgccgtccccagcgtcctgaagattcacagcatcaacaacaaccaaaacaccttcagcactcaaacctcgactgtccggagcggtaccttcgagacctccactctctacgacatccccatccccgctgccgccgctggcaagacctgctccctcgtcttcaaggcttctggcagcgacaccatctcgggaaccggcgctctcgatatcttcaagaacggcttcacggaccttgcttccctgactgagggcaacctccgtgatcaagaactcgctcgcatcgtcttcaaccctaacactgggttgttcgactttgaccgcactgctttccctcctactattgactccttcccttgccccgctgggaaggtcctccactgggaggctgcggctgttggcgaggctgataccgttattgtccagcaggacttctcttatgatggagctcatgttcctaatggtcttagcgtcgctttctggtaa

SEQ ID NO: 692 - protein, 192 aa, Muscodor strobelii
  misc_feature: SGI Peptide ID NO. 559807
  misc_feature (7)..(166): NCBI GI: 256726458 Blast Desc: NECHADRAFT_79693 [Nectria haematococca mpVI 77-13-4]
  misc_feature (54)..(183): NCBI GI: 115385541 Blast Desc: [Aspergillus terreus NIH2624] gi|114187764|gb|EAU29464.1| [Aspergillus terreus NIH2624]
MKSTTAALALLSATVSMAAPTLDSRTPATVSGYAVPSVLKIHSINNNQNTFSTQTSTVRSGTFETSTLYDIPIPAAAAGKTCSLVFKASGSDTISGTGALDIFKNGFTDLASLTEGNLRDQELARIVFNPNTGLFDFDRTAFPPTIDSFPCPAGKVLHWEAAAVGEADTVIVQQDFSYDGAHVPNGLSVAFW

SEQ ID NO: 693 - DNA, 1218 bp, Muscodor strobelii
  misc_feature: SGI EST ID NO. CUFF.1934.0
  misc_feature: Variant of the nucleotide sequence at SEQ ID NO 691
gctgcggtgtcttgaggcgtccaatggaatgattccattatccaacagctagcgtcagcactccaagaactgcggcgcacctcatcgtcttttgccggaggactaagtgtcccaggaccgcggagagctgaggcgtaaaaatagggttacagagtataggacggattcttggcgccatatcgtgagaatatgctgcgggtatgttggcgttggatggatatataatggtgagctcccgcatcgttgacaatggctttcttcctatctcatcagcatcaccaactgcactgcaacgcctaaagttacaaagtctaatcaacttaacatttgcaacactctcactaactcatataactatcacttcgggtatcatatctcataaacacgtcagtcaaaatgaagtccaccaccgctgctctcgctctcctttccgccaccgtctccatggcggcccctacactcgacagccgcacacctgccactgtgtctggatacgccgtccccagcgtcctgaagattcacagcatcaacaacaaccaaaacaccttcagcactcaaacctcgactgtccggagcggtaccttcgagacctccactctctacgacatccccatccccgctgccgccgctggcaagacctgctccctcgtcttcaaggcttctggcagcgacaccatctcgggaaccggcgctctcgatatcttcaagaacggcttcacggaccttgcttccctgactgagggcaacctccgtgatcaagaactcgctcgcatcgtcttcaaccctaacactgggttgttcgactttgaccgcactgctttccctcctactattgactccttcccttgccccgctgggaaggtcctccactgggaggctgcggctgttggcgaggctgataccgttattgtccagcaggacttctcttatgatggagctcatgttcctaatggtcttagcgtcgctttctggtaagcgatccgtggtatgagtaggggttcggtttgatgttgcagtttgcattttcgggagttctgtgagcaggcatgggtgatgggtcgataaatggttgagctagaggacgctccttgaatatttggtatttaatatacttgtgtacgttctttagaatctttttacgtttatcgaggcgatgatcgcatcttgtttccaattcctgtgactcctgcatacaaatctttgatcgcaagaaatttt

SEQ ID NO: 694 - DNA, 900 bp, Muscodor strobelii
  misc_feature: SGI cDNA ID NO. 559808
  misc_feature: Encodes the peptide sequence at SEQ ID NO 695
atgccacatcctttaaccgacttccttcgcggtagacgcttctccgctcgaacagcgcgaagtcgatccacgccaagcaaacagttctccgacctagtattggaagaaatgtcacgtatgtgggaagcggatccgcgcacaaaggacctacctgctagtttcaagcgtatgcatatccgaccggggatgggaggccctgcattcgacactgcagccaagaaggtaaaagaacagtggcttgagcaagggatttggaaggcctcatggaacaacatggaagacgggccttaccgaagagaagtctggaagcacgaggaggcgcgcggagcctgtagtgggaatgataatgaggacaatgatagcaatgagggacagacagatccagaagatctcgaccaacaggttgagattttaaggagcgaggaagacctcgcccgcgaccgagaagcctcgcgaccaatacaccagttcacatatcaagtatcgcaggagcgacgacggctctctgatgaatacggagactattgtttccaaagatttccggacctcaacacgaaagcttatgatatcgtgaaggactcctgggattcgaggggaatctgggacgacaaatggggagttctgccgggaatgctatggaagcatgagacgatcactgaccattgggactctggtgcttctgatgaagaggacgcggacgaataccgacctgaggttgaaaagtatagtgaagacgaagagtttaatgaatatcggcaaggcatcgatacagatgatgaggatgaccagtcgccaatcgaagtagagtcttatcgcctactagataaatacactacgccggagccgaatgaggagagaagagtcaagaggcagcgtattactccttcacgtaagaactag

SEQ ID NO: 695 - protein, 299 aa, Muscodor strobelii
  misc_feature: SGI Peptide ID NO. 559808
  misc_feature (23)..(216): NCBI GI: 240275874 Blast Desc: conserved [Ajellomyces capsulatus H143]
  misc_feature (12)..(216): NCBI GI: 225563285 Blast Desc: HCBG_01019 [Ajellomyces capsulatus G186AR]
  misc_feature (20)..(221): NCBI GI: 240273016 Blast Desc: conserved [Ajellomyces capsulatus H143]
  misc_feature (54)..(252): NCBI GI: 225555043 Blast Desc: HCBG_08276 [Ajellomyces capsulatus G186AR]
  misc_feature (68)..(221): NCBI GI: 225557998 Blast Desc: [Ajellomyces capsulatus G186AR]
  misc_feature (69)..(234): NCBI GI: 239615003 Blast Desc: conserved [Ajellomyces dermatitidis ER-3]
  misc_feature (75)..(217): NCBI GI: 255940178 Blast Desc: Pc16g05110 [Penicillium chrysogenum Wisconsin 54-1255] gi|211585481|emb|CAP93181.1| Pc16g05110 [Penicillium chrysogenum Wisconsin 54-1255]
  misc_feature (70)..(216): NCBI GI: 258572890 Blast Desc: [Uncinocarpus reesii 1704] gi|237905477|gb|EEP79878.1| [Uncinocarpus reesii 1704]
  misc_feature (71)..(215): NCBI GI: 225561700 Blast Desc: [Ajellomyces capsulatus G186AR]
  misc_feature (132)..(234): NCBI GI: 261187978 Blast Desc: conserved [Ajellomyces dermatitidis SLH14081] gi|239593417|gb|EEQ75998.1| conserved [Ajellomyces dermatitidis SLH14081]
MPHPLTDFLRGRRFSARTARSRSTPSKQFSDLVLEEMSRMWEADPRTKDLPASFKRMHIRPGMGGPAFDTAAKKVKEQWLEQGIWKASWNNMEDGPYRREVWKHEEARGACSGNDNEDNDSNEGQTDPEDLDQQVEILRSEEDLARDREASRPIHQFTYQVSQERRRLSDEYGDYCFQRFPDLNTKAYDIVKDSWDSRGIWDDKWGVLPGMLWKHETITDHWDSGASDEEDADEYRPEVEKYSEDEEFNEYRQGIDTDDEDDQSPIEVESYRLLDKYTTPEPNEERRVKRQRITPSRKN

SEQ ID NO: 696 - DNA, 936 bp, Muscodor strobelii
  misc_feature: SGI cDNA ID NO. 559809
  misc_feature: Encodes the peptide sequence at SEQ ID NO 697
atgtgggacggcggaagaagtgaaattcgagcacgagtgagaagactagggaaagaaaagttaaacagatatcctcgacatggaagagaagatggtgatctatcccttcaagcctttgtccatccaagggataggaatgcgaggccaagtaaaatcacccattttcagatcaagagcttaggagaaggcaactttggtaaagtctctgaaacagtcaatgttcatacgggcgtgcataacattattgggttttacggctccaacgtcagtagtgataaggtcgaaatcttcatggacaaaaaggacggaaacttggagagtcttgttgaaaactggaatggtaacactgcagatttgatggcacacggcaaaactgcactgttacacgtcctttcgggactcgactacctcgatcaaaatggcctgatgcatcgagacattaaacctgataatgtcctttacgagcggaggtcgagcggttaccatttcctgctggcagaccttggaggcataaagtctgaagaagattacagagacagcatatttggagctatgcgctattttgcacctgaggtgactatggacaggggacaaacggcaaaatcagacatatggagtacctacgtgacttttctatgggtgctgaacattggaggctttagggataaagacgaaaaacaccaacttgggagtgttagaaacatacagaggattgcagtcaaaactgcagcgtatgagcgcgaggcgcgtgaaatccgcagtatggccatctgggacccccgttttcgcccgtcggctgcagatatgctcaagaaattgagcggccggcgtgaggctatatcacactggtcctcttggatggaggcctgtcaaaatcctagaaatcggttggtgaaagagatggaggaggtgacgggtgtcagatttcgatcctaa

SEQ ID NO: 697 - protein, 311 aa, Muscodor strobelii
  misc_feature: SGI Peptide ID NO. 559809
  misc_feature (120)..(206): Pfam Id: PF00069 Pfam Desc: Protein kinase domain
  misc_feature (90)..(276): NCBI GI: 256724900 Blast Desc: NECHADRAFT_77064 [Nectria haematococca mpVI 77-13-4]
  misc_feature (93)..(272): NCBI GI: 240275875 Blast Desc: CAMK kinase [Ajellomyces capsulatus H143]
  misc_feature (60)..(273): NCBI GI: 258572892 Blast Desc: [Uncinocarpus reesii 1704] gi|237905478|gb|EEP79879.1| [Uncinocarpus reesii 1704]
  misc_feature (93)..(272): NCBI GI: 225563286 Blast Desc: conserved [Ajellomyces capsulatus G186AR]
  misc_feature (52)..(273): NCBI GI: 225557999 Blast Desc: serine/threonine-protein kinase ppk11 [Ajellomyces capsulatus G186AR]
  misc_feature (52)..(273): NCBI GI: 240273017 Blast Desc: calcium/calmodulin-dependent protein kinase [Ajellomyces capsulatus H143]
  misc_feature (95)..(273): NCBI GI: 255940176 Blast Desc: Pc16g05100 [Penicillium chrysogenum Wisconsin 54-1255] gi|211585480|emb|CAP93180.1| Pc16g05100 [Penicillium chrysogenum Wisconsin 54-1255]
  misc_feature (52)..(273): NCBI GI: 225561701 Blast Desc: STE family protein kinase [Ajellomyces capsulatus G186AR]
  misc_feature (80)..(272): NCBI GI: 225555044 Blast Desc: CAMK family protein kinase [Ajellomyces capsulatus G186AR]
  misc_feature (80)..(270): NCBI GI: 258567308 Blast Desc: [Uncinocarpus reesii 1704] gi|237905844|gb|EEP80245.1| [Uncinocarpus reesii 1704]
  misc_feature (80)..(293): SWISSPROT Homolog: EC 2.7.11.25 Mitogen-activated protein kinase kinase kinase
MWDGGRSEIRARVRRLGKEKLNRYPRHGREDGDLSLQAFVHPRDRNARPSKITHFQIKSLGEGNFGKVSETVNVHTGVHNIIGFYGSNVSSDKVEIFMDKKDGNLESLVENWNGNTADLMAHGKTALLHVLSGLDYLDQNGLMHRDIKPDNVLYERRSSGYHFLLADLGGIKSEEDYRDSIFGAMRYFAPEVTMDRGQTAKSDIWSTYVTFLWVLNIGGFRDKDEKHQLGSVRNIQRIAVKTAAYEREAREIRSMAIWDPRFRPSAADMLKKLSGRREAISHWSSWMEACQNPRNRLVKEMEEVTGVRFRS

SEQ ID NO: 698 - DNA, 564 bp, Muscodor strobelii
  misc_feature: SGI cDNA ID NO. 559810
  misc_feature: Encodes the peptide sequence at SEQ ID NO 699
atgatttcctcaagtttcatgaagatctgcactttggccctcactggcatttccactgcgtctccggtgccagttgagacacagccacaaaaacgagggatgaacgtgattgttggctaccggaaagctagtgcggaccaagccaagcgatacaatgatgctggaactctgacagacgatggaaacatgattgccacacaaatggcgcaggtgtctatacggctcacgggcgagagacatcgtgtgtcgaaggcttgggtgcccgagacctttggcggacagactttgtggtataagggcgatgagctcattggcaactatatccaaggtgttattgacgccagctgggacccatctaagacccttcgcatgtccattatcagtggaaagggttatgatgacgtccagatggtgatcccaccagggctcttgaactctaacggtggctcgctcggcattgtcgcttcctgcatggaggatgcaaatgctattccggaccaagatgttaactacgatgactggcagaacaatattggtggctggcgaactgaccctgctgcttga

SEQ ID NO: 699 - protein, 187 aa, Muscodor strobelii
  misc_feature: SGI Peptide ID NO. 559810
MISSSFMKICTLALTGISTASPVPVETQPQKRGMNVIVGYRKASADQAKRYNDAGTLTDDGNMIATQMAQVSIRLTGERHRVSKAWVPETFGGQTLWYKGDELIGNYIQGVIDASWDPSKTLRMSIISGKGYDDVQMVIPPGLLNSNGGSLGIVASCMEDANAIPDQDVNYDDWQNNIGGWRTDPAA

SEQ ID NO: 700 - DNA, 627 bp, Muscodor strobelii
  misc_feature: SGI cDNA ID NO. 559811
  misc_feature: Encodes the peptide sequence at SEQ ID NO 701
agggaactgctggagtctgaacgagatgcgatcaaagcacatcggtctctctacgtcaagggcaagatcctccaccgcgacatatcctcaaacaacattattatcacgaagcctgaaatggcagatggcttcaagggtatgctcatcgaccttgatttggctaaagtgagggatagtggccctagtggggcacggcaccagaccggcacgatgcagttcgtggcggtagaggtgctccgcaagaccgatcatacctaccgccacgatctcgagtcgttcttctacgtattgctatggatgtgcgcgcgccagtcatggagtaatggatttgctcgcggagagaagccgcataaggaaagcgtccttcggaggtgggaaattggaacatttgatactatcgcagatgccaaagagggctatatgacggtgaacgggcttgagcgtattatgggtgaatttccaaaggccttggatgacgttaaagccctctgtattaagattaggaaggtcctctttccattagacaaggacgaaagaatgagctttggaactcctgcaggagacccagaccaagtttacgggcccatcatagctgcctacgatgaagctatcagcaggcttagctaa

SEQ ID NO: 701 - protein, 208 aa, Muscodor strobelii
  misc_feature: SGI Peptide ID NO. 559811
  misc_feature (1)..(207): NCBI GI: 225563071 Blast Desc: conserved [Ajellomyces capsulatus G186AR]
  misc_feature (1)..(204): NCBI GI: 238845808 Blast Desc: serine/threonine-protein kinase Sgk2 [Microsporum canis CBS 113480]
  misc_feature (2)..(205): NCBI GI: 154282547 Blast Desc: [Ajellomyces capsulatus NAm1] gi|150410249|gb|EDN05637.1| [Ajellomyces capsulatus NAm1]
  misc_feature (2)..(205): NCBI GI: 225681151 Blast Desc: conserved [Paracoccidioides brasiliensis Pb03]
  misc_feature (2)..(205): NCBI GI: 226277531 Blast Desc: conserved [Paracoccidioides brasiliensis Pb01]
  misc_feature (2)..(205): NCBI GI: 154273166 Blast Desc: [Ajellomyces capsulatus NAm1] gi|150415947|gb|EDN11291.1| [Ajellomyces capsulatus NAm1]
  misc_feature (2)..(205): NCBI GI: 154282621 Blast Desc: [Ajellomyces capsulatus NAm1] gi|150410286|gb|EDN05674.1| [Ajellomyces capsulatus NAm1]
  misc_feature (2)..(205): NCBI GI: 226283417 Blast Desc: conserved [Paracoccidioides brasiliensis Pb01]
  misc_feature (2)..(205): NCBI GI: 261196588 Blast Desc: serine/threonine-protein kinase Sgk2 [Ajellomyces dermatitidis SLH14081] gi|239595942|gb|EEQ78523.1| serine/threonine-protein kinase Sgk2 [Ajellomyces dermatitidis
  misc_feature (2)..(205): NCBI GI: 239609518 Blast Desc: serine/threonine-protein kinase Sgk2 [Ajellomyces dermatitidis ER-3]
RELLESERDAIKAHRSLYVKGKILHRDISSNNIIITKPEMADGFKGMLIDLDLAKVRDSGPSGARHQTGTMQFVAVEVLRKTDHTYRHDLESFFYVLLWMCARQSWSNGFARGEKPHKESVLRRWEIGTFDTIADAKEGYMTVNGLERIMGEFPKALDDVKALCIKIRKVLFPLDKDERMSFGTPAGDPDQVYGPIIAAYDEAISRLS

SEQ ID NO: 702 - DNA, 711 bp, Muscodor strobelii
  misc_feature: SGI cDNA ID NO. 559812
  misc_feature: Encodes the peptide sequence at SEQ ID NO 703
gcgtacagctcgggtctattcgacattcacgacgagccggataagtttgcgcgcgctcttgttggctacgctacgatggatgacgacttgatgggtctagacacattcattgagcgaagggatgagcatcgctatgtcacactggatgatgcaagtggcaaggatacaagggtcaggccagacaaggcgatggtcaggcagaaggccatcgtttgtcgcgggacgacgtgttatgagacccaaaatagccacgttgccaaattctcatgggcatcggataagcggaagccggaggtggaacaattgaacttgacacaagcaatgggtgttaaaggggtagccagagccgtggcacatcgtcgcatcacttctattgcagagatgcgggaggggctgctgttcccaaaggctcaccgttttcggggtgaagacgttcactttgacgatccaccattagccacagcaagcacgaacacgtcgagcaagcgcaagtcatcgtccgaccatacccccgatgacgtgtctgggtccaaaaggcggcggtccaacagtcggaagtcgaagctggctaccgaggtgaacgatcagctgtcgattggcaagaccaagccgagcctctatgcacctggcgaggacctgtgggagaataggatctactcctgcctcgttgtttcgccagctggccgtgtcatcagcgagtttaggaccatt

SEQ ID NO: 703 - protein, 237 aa, Muscodor strobelii
  misc_feature: SGI Peptide ID NO. 559812
  misc_feature (1)..(237): NCBI GI: 240109622 Blast Desc: CPC735_031270 [Coccidioides posadasii C735 delta SOWgp]
  misc_feature (2)..(236): NCBI GI: 261201093 Blast Desc: serine/threonine-protein kinase Sgk2 [Ajellomyces dermatitidis SLH14081] gi|239594019|gb|EEQ76600.1| serine/threonine-protein kinase Sgk2 [Ajellomyces dermatitidis
  misc_feature (2)..(236): NCBI GI: 154282637 Blast Desc: [Ajellomyces capsulatus NAm1] gi|150410294|gb|EDN05682.1| [Ajellomyces capsulatus NAm1]
  misc_feature (2)..(236): NCBI GI: 239615506 Blast Desc: serine/threonine-protein kinase Sgk2 [Ajellomyces dermatitidis ER-3]
  misc_feature (2)..(236): NCBI GI: 240111000 Blast Desc: CPC735_068350 [Coccidioides posadasii C735 delta SOWgp]
  misc_feature (2)..(236): NCBI GI: 226283417 Blast Desc: conserved [Paracoccidioides brasiliensis Pb01]
  misc_feature (1)..(236): NCBI GI: 240109984 Blast Desc: CPC735_034890 [Coccidioides posadasii C735 delta SOWgp]
  misc_feature (2)..(236): NCBI GI: 154280575 Blast Desc: [Ajellomyces capsulatus NAm1] gi|150411279|gb|EDN06667.1| [Ajellomyces capsulatus NAm1]
  misc_feature (1)..(236): NCBI GI: 119184799 Blast Desc: CIMG_07157 [Coccidioides immitis RS]
  misc_feature (2)..(236): NCBI GI: 154276400 Blast Desc: [Ajellomyces capsulatus NAm1] gi|150414118|gb|EDN09483.1| [Ajellomyces capsulatus NAm1]
AYSSGLFDIHDEPDKFARALVGYATMDDDLMGLDTFIERRDEHRYVTLDDASGKDTRVRPDKAMVRQKAIVCRGTTCYETQNSHVAKFSWASDKRKPEVEQLNLTQAMGVKGVARAVAHRRITSIAEMREGLLFPKAHRFRGEDVHFDDPPLATASTNTSSKRKSSSDHTPDDVSGSKRRRSNSRKSKLATEVNDQLSIGKTKPSLYAPGEDLWENRIYSCLVVSPAGRVISEFRTI

SEQ ID NO: 704 - DNA, 628 bp, Muscodor strobelii
  misc_feature: SGI EST ID NO. CUFF.1955.0
  misc_feature: Variant of the nucleotide sequence at SEQ ID NO 702
ggctacgctacgatggatgacgacttgatgggtctagacacattcattgagcgaagggatgagcatcgctatgtcacactggatgatgcaagtggcaaggatacaagggtcaggccagacaaggcgatggtcaggcagaaggccatcgtttgtcgcgggacgacgtgttatgagacccaaaatagccacgttgccaaattctcatgggcatcggataagcggaagccggaggtggaacaattgaacttgacacaagcaatgggtgttaaaggggtagccagagccgtggcacatcgtcgcatcacttctattgcagagatgcgggaggggctgctgttcccaaaggctcaccgttttcggggtgaagacgttcactttgacgatccaccattagccacagcaagcacgaacacgtcgagcaagcgcaagtcatcgtccgaccatacccccgatgacgtgtctgggtccaaaaggcggcggtccaacagtcggaagtcgaagctggctaccgaggtgaacgatcagctgtcgattggcaagaccaagccgagcctctatgcacctggcgaggacctgtgggagaataggatctactcctgcctcgttgtttcgccagctggccgtgtca

SEQ ID NO: 705 - DNA, 1923 bp, Muscodor strobelii
  misc_feature: SGI cDNA ID NO. 559813
  misc_feature: Encodes the peptide sequence at SEQ ID NO 706
atgcactccttggtccaaccaaatggctgggtagccctcaagctcccttctgggaacttacgggtactccaagtcactcctaacactactatatcgctcggaaaatacggtgccttccccagcaatctcattatacatcgtccctaccatctcacatacgaattggtggacaagagagccggagaaaactttagtcgcctgcgaatcgtccccgctgccgagctctatgccgacactttgacctcggacacaccaccgaccagttccgaagcagtgacacccgcgccagacaccgaagatgctgccaatgcaatatccacgggtgtcgagtacgcgctcgttgatgcagactcgggcgccgtggttgctaagaccgaccgcgcggaattggatgcatctgcccgccagaccttgacaatagccgagatcgaggaattgaaaaaggacgggactgatgcgggaagggacataattgcgaaactaatgctatcacatacggccatagacgagaagacggaatattctcttgccaagtacaagctgctaaagaccaagaagtacatccgcagattctccgtgctaccctttgacataccgcttctcaattattacgcgctcgaggagaaagaccccaccaagatcatggacataagagaagagattatcggtctgcttggatgctgggctaatgtgcactttggtggcgaggacccggaaacggcgattccggacgacgagggcacaaatatggagcatagcgagatgccacagacacgcactcctggacgatggctggtggtggacgatacaagtggacttctagtcggtgctatggctgagcggatgggaatactctacccgcccgagccagaccccaagagtcaggacgagacaatgcagaaatcgccaattgctgctcggaaagactctgcagctgcgcagttacagataacagaatcaggagagcctgtagaatctgtcctggagtcagcgaaaggagaggcagaaccaaaacctgagcaagacgcagaagcagcagagccaacatctcccacaataatccgcaaacgtccacgcacagacgacttccagatccctttctcccactcgaatacaataacattaataaccaacaactctcaacccaacctcagctacctccgataccacgacttcgacctatccaaccaacttcaaagccacacactcacccacccgttatccaaacacctcatgacactaacctggctccaactcctcgaaccctcagccgatccaacttacaactctccagcacccagcgcaacgccagaagaaatggcaaggtggaagacaaaccgcaaaagtaacttccaccgaaaacgccggcgctgggcgcggacccggcacattatcgacgccacgcgaaaaggcaagttctcggggctcgtagtagcaagtaccatggacgcaatatctataatgcgatcctgcgtgccgctcctcgccggcggtgcgcccatcgcgatatactcacccaccgtcgaaggactcacagaactcgtagactgctacagcatagtgcgccgagcagcctgggccacgagcatgcccgcagaactcgaggggaagagtgtagaagaacaggagaattgggccggaaacgacgattttccacttaatccttcgctagtgttgggggcggcgattcaaacgagtagggtgagacaatggcaggttttgcctggacgcactcacccgcttatgacgagtcggggtgggccagagggatatgtgtttacggcttggagggtaaaacctgcggagggcaaggtggaggcgagggggaaggcggttaggaagaagagaaagcttgatgagggggaggatgaggcggtgaggaagaagaggaaggttgatgagggggagggggatgcaaactga

SEQ ID NO: 706 - protein, 640 aa, Muscodor strobelii
  misc_feature: SGI Peptide ID NO. 559813
  misc_feature (1)..(354): Pfam Id: PF04189 Pfam Desc: Gcd10p family
  misc_feature (131)..(235): Pfam Id: PF04189 Pfam Desc: Gcd10p family
  misc_feature (5)..(615): NCBI GI: 256730545 Blast Desc: NECHADRAFT_89689 [Nectria haematococca mpVI 77-13-4]
  misc_feature (1)..(640): NCBI GI: 156063434 Blast Desc: SS1G_01835 [Sclerotinia sclerotiorum 1980] gi|154697169|gb|EDN96907.1| SS1G_01835 [Sclerotinia sclerotiorum 1980]
  misc_feature (2)..(620): NCBI GI: 85093396 Blast Desc: NCU09571 [Neurospora crassa OR74A] gi|28921131|gb|EAA30446.1| conserved [Neurospora crassa OR74A]
  misc_feature (1)..(640): NCBI GI: 154319183 Blast Desc: BC1G_02543 [Botryotinia fuckeliana B05.10] gi|150856974|gb|EDN32166.1| BC1G_02543 [Botryotinia fuckeliana B05.10]
  misc_feature (1)..(617): NCBI GI: 145611542 Blast Desc: MGG_00308 [Magnaporthe grisea 70-15] gi|145018811|gb|EDK03090.1| MGG_00308 [Magnaporthe grisea 70-15]
  misc_feature (1)..(631): NCBI GI: 171678179 Blast Desc: protein product [Podospora anserina] gi|170937159|emb|CAP61816.1| protein product [Podospora anserina]
  misc_feature (5)..(565): NCBI GI: 46109438 Blast Desc: FG01601.1 [Gibberella zeae PH-1]
  misc_feature (9)..(615): NCBI GI: 116205746 Blast Desc: CHGG_02166 [Chaetomium globosum CBS 148.51] gi|88182763|gb|EAQ90231.1| CHGG_02166 [Chaetomium globosum CBS 148.51]
  misc_feature (1)..(617): NCBI GI: 240277102 Blast Desc: tRNA(m1A58)-methyltransferase subunit trm6 [Ajellomyces capsulatus H143]
  misc_feature (1)..(617): NCBI GI: 225557248 Blast Desc: conserved [Ajellomyces capsulatus G186AR]
MHSLVQPNGWVALKLPSGNLRVLQVTPNTTISLGKYGAFPSNLIIHRPYHLTYELVDKRAGENFSRLRIVPAAELYADTLTSDTPPTSSEAVTPAPDTEDAANAISTGVEYALVDADSGAVVAKTDRAELDASARQTLTIAEIEELKKDGTDAGRDIIAKLMLSHTAIDEKTEYSLAKYKLLKTKKYIRRFSVLPFDIPLLNYYALEEKDPTKIMDIREEIIGLLGCWANVHFGGEDPETAIPDDEGTNMEHSEMPQTRTPGRWLVVDDTSGLLVGAMAERMGILYPPEPDPKSQDETMQKSPIAARKDSAAAQLQITESGEPVESVLESAKGEAEPKPEQDAEAAEPTSPTIIRKRPRTDDFQIPFSHSNTITLITNNSQPNLSYLRYHDFDLSNQLQSHTLTHPLSKHLMTLTWLQLLEPSADPTYNSPAPSATPEEMARWKTNRKSNFHRKRRRWARTRHIIDATRKGKFSGLVVASTMDAISIMRSCVPLLAGGAPIAIYSPTVEGLTELVDCYSIVRRAAWATSMPAELEGKSVEEQENWAGNDDFPLNPSLVLGAAIQTSRVRQWQVLPGRTHPLMTSRGGPEGYVFTAWRVKPAEGKVEARGKAVRKKRKLDEGEDEAVRKKRKVDEGEGDAN

SEQ ID NO: 707 - DNA, 3443 bp, Muscodor strobelii
  misc_feature: SGI EST ID NO. CUFF.1964.0
  misc_feature: Variant of the nucleotide sequence at SEQ ID NO 705
ccttgagctgatggtcccaaattttcggagagctgccaaaacatcccaccagcgcatctcaaacataacaattgtgcactgtcgcgacctcaaggagccaagatgcactccttggtccaaccaaatggctgggtagccctcaagctcccttctgggaacttacgggtactccaagtcactcctaacactactatatcgctcggaaaatacggtgccttccccagcaatctcattatacatcgtccctaccatctcacatacgaattggtggacaagagagccggagaaaactttagtcgcctgcgaatcgtccccgctgccgagctctatgccgacactttgacctcggacacaccaccgaccagttccgaagcagtgacacccgcgccagacaccgaagatgctgccaatgcaatatccacgggtgtcgagtacgcgctcgttgatgcagactcgggcgccgtggttgctaagaccgaccgcgcggaattggatgcatctgcccgccagaccttgacaatagccgagatcgaggaattgaaaaaggacgggactgatgcgggaagggacataattgcgaaactaatgctatcacatacggccatagacgagaagacggaatattctcttgccaagtacaagctgctaaagaccaagaagtacatccgcagattctccgtgctaccctttgacataccgcttctcaattattacgcgctcgaggagaaagaccccaccaagatcatggacataagagaagagattatcggtctgcttggatgctgggctaatgtgcactttggtggcgaggacccggaaacggcgattccggacgacgagggcacaaatatggagcatagcgagatgccacagacacgcactcctggacgatggctggtggtggacgatacaagtggacttctagtcggtgctatggctgagcggatgggaatactctacccgcccgagccagaccccaagagtcaggacgagacaatgcagaaatcgccaattgctgctcggaaagactctgcagctgcgcagttacagataacagaatcaggagagcctgtagaatctgtcctggagtcagcgaaaggagaggcagaaccaaaacctgagcaagacgcagaagcagcagagccaacatctcccacaataatccgcaaacgtccacgcacagacgacttccagatccctttctcccactcgaatacaataacattaataaccaacaactctcaacccaacctcagctacctccgataccacgacttcgacctatccaaccaacttcaaagccacacactcacccacccgttatccaaacacctcatgacactaacctggctccaactcctcgaaccctcagccgatccaacttacaactctccagcacccagcgcaacgccagaagaaatggcaaggtggaagacaaaccgcaaaagtaacttccaccgaaaacgccggcgctgggcgcggacccggcacattatcgacgccacgcgaaaaggcaagttctcggggctcgtagtagcaagtaccatggacgcaatatctataatgcgatcctgcgtgccgctcctcgccggcggtgcgcccatcgcgatatactcacccaccgtcgaaggactcacagaactcgtagactgctacagcatagtgcgccgagcagcctgggccacgagcatgcccgcagaactcgaggggaagagtgtagaagaacaggagaattgggccggaaacgacgattttccacttaatccttcgctagtgttgggggcggcgattcaaacgagtagggtgagacaatggcaggttttgcctggacgcactcacccgcttatgacgagtcggggtgggccagagggatatgtgtttacggcttggagggtaaaacctgcggagggcaaggtggaggcgagggggaaggcggttaggaagaagagaaagcttgatgagggggaggatgaggcggtgaggaagaagaggaaggttgatgagggggagggggatgcaaactgaatttagtagatagattcatgtgcagatatgggagtgttggggtattatggctgatgctcagatgggaaaaagagcacggatctggtatcgttgttgcgctgcataggcatgcatatcattataccccagcagtgtcacgggaaacccagagcatccagcacatccaaaaatgatggcaacctccaagaaacaaaatgatcatgaaatgcttgattgattggactttatcatttgtcgctaatgctacctcttaacattgcttcgttctacccattcacagcgacttgcccataaacttcctcttagtaaagctcaaccaccacttactcggtttcccatcgccatcctcgtcatacacacgggcgagtaatctcgtagcgagctcctgtcggacttgggataggtactggcgtaggagctcggcatcttgacggtcgcggggcgcttcgtacatctatcctctcatgtcagccctcgcacatcccatatatctcttcttcccataatcatgttcatgccatacctgattcaaaggaaaccccgggtccccaggtaccgcaaagtttgagtccagcgcaatattcatgacctccttattcgcatccctaaccccatgatgtgggcgtatctttcctagacactcgctcacaaacaatatcccatagatcagcaaccgatcagcgggaccctggatctcgaaattgcggaagaaggtgttggcgcggaagagggagagaacttcgtcgaggatgtcgtaggattctgagtcaggatctggtgactcgttggcagggagtggagcggatggcaggacgtatgctggaccgcgggtctttgtgcggagggggaggaggggtacgtttccgattaagcgcgacgaagacgtttcgtcgtcgttgaacattgagttgtaggcctagtatataggttagcccaggagctcagtagctcagttgccgtaggaatcgagaatatcgcgggggctggagattcgggggttgacaggaaccaatgtcgcgttgagtggtgagggtatcgtccgtcaatggagctacataccggcatcttaactaacggcggccttggagctggcaggctgttcaacgactatatggtgttgtgtatagagtggtagctgatagtcagctctttgcttgattggaggggagctctgtagtgcgatagaggggcgcaaggctaccactgctcttcggcccaggctgacgtcggagcaggttggagctacgaggaacgtcacttctcgtcgtgcggataaatgccgggtaagctgtttcactcttgcctgctggcagctgtcggaatcggacgcatgaagtgccccgtaccaacagctccggaatgtgagcaagtatctgctgcctggaaattgatccaggctaggcttaatcgggtcattg

SEQ ID NO: 708 - DNA, 579 bp, Muscodor strobelii
  misc_feature: SGI cDNA ID NO. 559814
  misc_feature: Encodes the peptide sequence at SEQ ID NO 709
atgccggcctacaactcaatgttcaacgacgacgaaacgtcttcgtcgcgcttaatcggaaacgtacccctcctccccctccgcacaaagacccgcggtccagcatacgtcctgccatccgctccactccctgccaacgagtcaccagatcctgactcagaatcctacgacatcctcgacgaagttctctccctcttccgcgccaacaccttcttccgcaatttcgagatccagggtcccgctgatcggttgctgatctatgggatattgtttgtgagcgagtgtctaggaaagatacgcccacatcatggggttagggatgcgaataaggaggtcatgaatattgcgctggactcaaactttgcggtacctggggacccggggtttcctttgaatcagatgtacgaagcgccccgcgaccgtcaagatgccgagctcctacgccagtacctatcccaagtccgacaggagctcgctacgagattactcgcccgtgtgtatgacgaggatggcgatgggaaaccgagtaagtggtggttgagctttactaagaggaagtttatgggcaagtcgctgtga

SEQ ID NO: 709 - protein, 192 aa, Muscodor strobelii
  misc_feature: SGI Peptide ID NO. 559814
  misc_feature (1)..(192): Pfam Id: PF04062 Pfam Desc: P21-ARC (ARP2/3 complex 21 kDa subunit)
  misc_feature (1)..(192): NCBI GI: 145611544 Blast Desc: MGG_00307 [Magnaporthe grisea 70-15] gi|145018812|gb|EDK03091.1| MGG_00307 [Magnaporthe grisea 70-15]
  misc_feature (1)..(192): NCBI GI: 256730539 Blast Desc: [Nectria haematococca mpVI 77-13-4]
  misc_feature (1)..(192): NCBI GI: 261357164 Blast Desc: ARP2/3 complex 21 kDa subunit [Verticillium albo-atrum VaMs.102]
  misc_feature (1)..(192): NCBI GI: 85093400 Blast Desc: ARP2/3 complex 21 kDa subunit [Neurospora crassa OR74A] gi|28921132|gb|EAA30447.1| ARP2/3 complex 21 kDa subunit [Neurospora crassa OR74A]
  misc_feature (1)..(192): NCBI GI: 156063436 Blast Desc: SS1G_01836 [Sclerotinia sclerotiorum 1980] gi|154697170|gb|EDN96908.1| SS1G_01836 [Sclerotinia sclerotiorum 1980]
  misc_feature (1)..(192): NCBI GI: 46109438 Blast Desc: FG01601.1 [Gibberella zeae PH-1]
  misc_feature (1)..(192): NCBI GI: 154319181 Blast Desc: BC1G_02542 [Botryotinia fuckeliana B05.10] gi|150856973|gb|EDN32165.1| BC1G_02542 [Botryotinia fuckeliana B05.10]
  misc_feature (1)..(192): NCBI GI: 116205748 Blast Desc: CHGG_02167 [Chaetomium globosum CBS 148.51] gi|88182764|gb|EAQ90232.1| CHGG_02167 [Chaetomium globosum CBS 148.51]
  misc_feature (1)..(192): NCBI GI: 171678177 Blast Desc: protein product [Podospora anserina] gi|170937158|emb|CAP61815.1| protein product [Podospora anserina]
  misc_feature (1)..(192): NCBI GI: 189189276 Blast Desc: Actin-related protein 2/3 complex subunit 4 [Pyrenophora tritici-repentis Pt-1C-BFP] gi|187972583|gb|EDU40082.1| Actin-related protein 2/3 complex 4
MPAYNSMFNDDETSSSRLIGNVPLLPLRTKTRGPAYVLPSAPLPANESPDPDSESYDILDEVLSLFRANTFFRNFEIQGPADRLLIYGILFVSECLGKIRPHHGVRDANKEVMNIALDSNFAVPGDPGFPLNQMYEAPRDRQDAELLRQYLSQVRQELATRLLARVYDEDGDGKPSKWWLSFTKRKFMGKSL

SEQ ID NO: 710 - DNA, 3040 bp, Muscodor strobelii
  misc_feature: SGI EST ID NO. CUFF.1965.2
  misc_feature: Variant of the nucleotide sequence at SEQ ID NO 708
cccgattaagcctagcctggatcaatttccaggcagcagatacttgctcacattccggagctgttggtacggggcacttcatgcgtccgattccgacagctgccagcaggcaagagtgaaacagcttacccggcatttatccgcacgacgagaagtgacgttcctcgtagctccaacctgctccgacgtcagcctgggccgaagagcagtggtagccttgcgcccctctatcgcactacagagctcccctccaatcaagcaaagagctgactatcagctaccactctatacacaacaccatatagtcgttgaacagcctgccagctccaaggccgccgttagttaagatgccggcctacaactcaatgttcaacgacgacgaaacgtcttcgtcgcgcttaatcggaaacgtacccctcctccccctccgcacaaagacccgcggtccagcatacgtcctgccatccgctccactccctgccaacgagtcaccagatcctgactcagaatcctacgacatcctcgacgaagttctctccctcttccgcgccaacaccttcttccgcaatttcgagatccagggtcccgctgatcggttgctgatctatgggatattgtttgtgagcgagtgtctaggaaagatacgcccacatcatggggttagggatgcgaataaggaggtcatgaatattgcgctggactcaaactttgcggtacctggggacccggggtttcctttgaatcagatgtacgaagcgccccgcgaccgtcaagatgccgagctcctacgccagtacctatcccaagtccgacaggagctcgctacgagattactcgcccgtgtgtatgacgaggatggcgatgggaaaccgagtaagtggtggttgagctttactaagaggaagtttatgggcaagtcgctgtgaatgggtagaacgaagcaatgttaagaggtagcattagcgacaaatgataaagtccaatcaatcaagcatttcatgatcattttgtttcttggaggttgccatcatttttggatgtgctggatgctctgggtttcccgtgacactgctggggtataatgatatgcatgcctatgcagcgcaacaacgataccagatccgtgctctttttcccatctgagcatcagccataataccccaacactcccatatctgcacatgaatctatctactaaattcagtttgcatccccctccccctcatcaaccttcctcttcttcctcaccgcctcatcctccccctcatcaagctttctcttcttcctaaccgccttccccctcgcctccaccttgccctccgcaggttttaccctccaagccgtaaacacatatccctctggcccaccccgactcgtcataagcgggtgagtgcgtccaggcaaaacctgccattgtctcaccctactcgtttgaatcgccgcccccaacactagcgaaggattaagtggaaaatcgtcgtttccggcccaattctcctgttcttctacactcttcccctcgagttctgcgggcatgctcgtggcccaggctgctcggcgcactatgctgtagcagtctacgagttctgtgagtccttcgacggtgggtgagtatatcgcgatgggcgcaccgccggcgaggagcggcacgcaggatcgcattatagatattgcgtccatggtacttgctactacgagccccgagaacttgccttttcgcgtggcgtcgataatgtgccgggtccgcgcccagcgccggcgttttcggtggaagttacttttgcggtttgtcttccaccttgccatttcttctggcgttgcgctgggtgctggagagttgtaagttggatcggctgagggttcgaggagttggagccaggttagtgtcatgaggtgtttggataacgggtgggtgagtgtgtggctttgaagttggttggataggtcgaagtcgtggtatcggaggtagctgaggttgggttgagagttgttggttattaatgttattgtattcgagtgggagaaagggatctggaagtcgtctgtgcgtggacgtttgcggattattgtgggagatgttggctctgctgcttctgcgtcttgctcaggttttggttctgcctctcctttcgctgactccaggacagattctacaggctctcctgattctgttatctgtaactgcgcagctgcagagtctttccgagcagcaattggcgatttctgcattgtctcgtcctgactcttggggtctggctcgggcgggtagagtattcccatccgctcagccatagcaccgactagaagtccacttgtatcgtccaccaccagccatcgtccaggagtgcgtgtctgtggcatctcgctatgctccatatttgtgccctcgtcgtccggaatcgccgtttccgggtcctcgccaccaaagtgcacattagcccagcatccaagcagaccgataatctcttctcttatgtccatgatcttggtggggtctttctcctcgagcgcgtaataattgagaagcggtatgtcaaagggtagcacggagaatctgcggatgtacttcttggtctttagcagcttgtacttggcaagagaatattccgtcttctcgtctatggccgtatgtgatagcattagtttcgcaattatgtcccttcccgcatcagtcccgtcctttttcaattcctcgatctcggctattgtcaaggtctggcgggcagatgcatccaattccgcgcggtcggtcttagcaaccacggcgcccgagtctgcatcaacgagcgcgtactcgacacccgtggatattgcattggcagcatcttcggtgtctggcgcgggtgtcactgcttcggaactggtcggtggtgtgtccgaggtcaaagtgtcggcatagagctcggcagcggggacgattcgcaggcgactaaagttttctccggctctcttgtccaccaattcgtatgtgagatggtagggacgatgtataatgagattgctggggaaggcaccgtattttccgagcgatatagtacta

SEQ ID NO: 711 - DNA, 1257 bp, Muscodor strobelii
  misc_feature: SGI cDNA ID NO. 559815
  misc_feature: Encodes the peptide sequence at SEQ ID NO 712
atggatccgtcaactgtcaagataatacctgacgggttaagtgaagtcaaaacattaacgaagcgcagaaggatacgcacgaggcatatttcgcccgaggtcgggtctttatacgacattctacatgattacgctggcaagtcactctacgtaataccattatgttggaccgacttgcatgcgcgactactcggctgtcgcttcaagcagatacctgcatggaatacaccaactccaaacaacacatcgacaccacgaagacagcgaaagacacctggaagtgtcgtcgcgttaggccatgatctcgatatccttctcagtaccgatggcacgaagctagtacatgccaagaaccgtgctatgcgctgtgttatgtctaagttctatccggatcatcttgcacgaccaagcggcatttccgagttggatctacgcttcggcaagagcttcttcccaagaactgttcgatgccaagtagtttggaatcagccaagcacactcatgtctttcgattcggcgactacctggacagcaagtcagtctgctagcaatctgttggcgtctatgaccgtcaatgttggctcggaagatcccatgctagcatacgtcagtcgaagtcatctcgaatacgtccggagtacgtgttttcgggtgttgagcggcccgaatcgatctttcaacatgccggtacatcgactacgcaagctccgtgctaagaacctgatgccgagtaacgcggatgaggatgcatatttcatcgcagtcatggtcgccatggcgcaacagtcgtgttacacagatgtacgggcagggaaaggcttcgcacctcgaccaatcaagactcgcgtcttgactgtctcggaggatgagaacgccttcatcgtctacactgctacagttccgatcggtcttctccagatgttccatgagccggagaaggctcctgttgatacttcgcagatcgaggttgaatatgcccaggttccgatttggccggtcctaggtctcaaggagcgattgggtacagcccttggtgccgatatggtgggcgacttctcacgagtcccgttggatacatacgagcatgaggaagagatcgaatcaacacctgagtctatctcgcccaagcgcaggagggacgcactctcagaagtttttaatgcgagcttctccgaggatcgcgagtccgattgtcccgagggcgtattcccaaagcgacagtgttttgaagagacgaggattggtgttgttcgatga

SEQ ID NO: 712 - protein, 418 aa, Muscodor strobelii
  misc_feature: SGI Peptide ID NO. 559815
  misc_feature (16)..(417): NCBI GI: 256730748 Blast Desc: NECHADRAFT_74155 [Nectria haematococca mpVI 77-13-4]
  misc_feature (14)..(417): NCBI GI: 46109440 Blast Desc: FG01602.1 [Gibberella zeae PH-1]
  misc_feature (17)..(393): NCBI GI: 171678175 Blast Desc: protein product [Podospora anserina] gi|170937157|emb|CAP61814.1| protein product [Podospora anserina]
  misc_feature (33)..(396): NCBI GI: 116205750 Blast Desc: CHGG_02168 [Chaetomium globosum CBS 148.51] gi|88182765|gb|EAQ90233.1| CHGG_02168 [Chaetomium globosum CBS 148.51]
  misc_feature (17)..(350): NCBI GI: 85093404 Blast Desc: NCU09573 [Neurospora crassa OR74A] gi|28921133|gb|EAA30448.1| [Neurospora crassa OR74A]
  misc_feature (41)..(366): NCBI GI: 145611546 Blast Desc: MGG_00306 [Magnaporthe grisea 70-15] gi|145018813|gb|EDK03092.1| MGG_00306 [Magnaporthe grisea 70-15]
  misc_feature (21)..(358): NCBI GI: 261357163 Blast Desc: conserved [Verticillium albo-atrum VaMs.102]
  misc_feature (47)..(347): NCBI GI: 255949606 Blast Desc: Pc22g16560 [Penicillium chrysogenum Wisconsin 54-1255] gi|211592587|emb|CAP98944.1| Pc22g16560 [Penicillium chrysogenum Wisconsin 54-1255]
  misc_feature (49)..(265): NCBI GI: 145242200 Blast Desc: An09g04310 [Aspergillus niger] gi|134078291|emb|CAK96872.1| [Aspergillus niger]
  misc_feature (33)..(365): NCBI GI: 46116438 Blast Desc: FG04061.1 [Gibberella zeae PH-1]
MDPSTVKIIPDGLSEVKTLTKRRRIRTRHISPEVGSLYDILHDYAGKSLYVIPLCWTDLHARLLGCRFKQIPAWNTPTPNNTSTPRRQRKTPGSVVALGHDLDILLSTDGTKLVHAKNRAMRCVMSKFYPDHLARPSGISELDLRFGKSFFPRTVRCQVVWNQPSTLMSFDSATTWTASQSASNLLASMTVNVGSEDPMLAYVSRSHLEYVRSTCFRVLSGPNRSFNMPVHRLRKLRAKNLMPSNADEDAYFIAVMVAMAQQSCYTDVRAGKGFAPRPIKTRVLTVSEDENAFIVYTATVPIGLLQMFHEPEKAPVDTSQIEVEYAQVPIWPVLGLKERLGTALGADMVGDFSRVPLDTYEHEEEIESTPESISPKRRRDALSEVFNASFSEDRESDCPEGVFPKRQCFEETRIGVVR

SEQ ID NO: 713 - DNA, 2234 bp, Muscodor strobelii
  misc_feature: SGI EST ID NO. CUFF.2100.0
  misc_feature: Variant of the nucleotide sequence at SEQ ID NO 711
ctcgccccctggacctccccccatctactctcgcagctctccgccatctttacctacaacacagtatcgcgtccatcgcgacagcacccacgccactcaatcttgtcactatcgcaactcagatctgtcgccgcccgtctatcgattgattgtcgtcacagtttgcgtcgcatatctaccatcacaaatcccacactcattccgggcggctacacgttgcacacagtctgtcctttccagctctccaactgccggactccgaatacggtcgtgttttggaagtgtcgcatcttaagccgctatctaccaacacctaacaactacgattctgtcaaccaaaatcgagtcgcctccaactctgagtctgcatcttaggtgagtttgtctcaactctcaattttcaatgtcttcgcaccagtttaagtgcatcctactaacatgcaccaagctccaccgtggcacttaccgccacttcaactctccactcacacatagtcatcgcgactatggatccgtcaactgtcaagataatacctgacgggttaagtgaagtcaaaacattaacgaagcgcagaaggatacgcacgaggcatatttcgcccgaggtcgggtctttatacgacattctacatgattacgctggcaagtcactctacgtaataccattatgttggaccgacttgcatgcgcgactactcggctgtcgcttcaagcagatacctgcatggaatacaccaactccaaacaacacatcgacaccacgaagacagcgaaagacacctggaagtgtcgtcgcgttaggccatgatctcgatatccttctcagtaccgatggcacgaagctagtacatgccaagaaccgtgctatgcgctgtgttatgtctaagttctatccggatcatcttgcacgaccaagcggcatttccgagttggatctacgcttcggcaagagcttcttcccaagaactgttcgatgccaagtagtttggaatcagccaagcacactcatgtctttcgattcggcgactacctggacagcaagtcagtctgctagcaatctgttggcgtctatgaccgtcaatgttggctcggaagatcccatgctagcatacgtcagtcgaagtcatctcgaatacgtccggagtacgtgttttcgggtgttgagcggcccgaatcgatctttcaacatgccggtacatcgactacgcaagctccgtgctaagaacctgatgccgagtaacgcggatgaggatgcatatttcatcgcagtcatggtcgccatggcgcaacagtcgtgttacacagatgtacgggcagggaaaggcttcgcacctcgaccaatcaagactcgcgtcttgactgtctcggaggatgagaacgccttcatcgtctacactgctacagttccgatcggtcttctccagatgttccatgagccggagaaggctcctgttgatacttcgcagatcgaggttgaatatgcccaggttccgatttggccggtcctaggtctcaaggagcgattgggtacagcccttggtgccgatatggtgggcgacttctcacgagtcccgttggatacatacgagcatgaggaagagatcgaatcaacacctgagtctatctcgcccaagcgcaggagggacgcactctcagaagtttttaatgcgagcttctccgaggatcgcgagtccgattgtcccgagggcgtattcccaaagcgacagtgttttgaagagacgaggattggtgttgttcgatgacttcccgatggctctggggggaactgatgatcaatgacttatttttgctcaacgcagaatactagaaggggaggaaaacaatgatgactatgaaagaacattcgaattcacatggccggcgcgtggagtttacggttgttatacagaagagaatgaagcatttgcactggcatctgagcttaccgcagaactacgacagcatagcacggggttagggtggctgctgactttttttgaactttacactttcttgatgatatacacacaatggcttgttatgatgaagcacgatacctacctttgcgcgaacggaaggggaacttactggtacatagtttgatgaaattcgcttcttgctgcacttttgcagatcaatatgaaaaagactttccccagcatcacattgctgattcgtgcttgttggtgatgttactgcaggttgtttaatgtgaactataatgccctcccata

SEQ ID NO: 714 - DNA, 1199 bp, Muscodor strobelii
  misc_feature: SGI cDNA ID NO. 559816
  misc_feature: Reduced expression when VOC is produced
  misc_feature: Encodes the peptide sequence at SEQ ID NO 715
atggatccgtcaactgtcaagataatacctgacgggttaagtgaagtcaaaacattaacgaagcgcagaaggatacgcacgaggcatatttcgcccgaggtcgggtctttatacgacattctacatgattacgctggcaagtcactctacgtaataccattatgttggaccgacttgcatgcgcgactactcggctgtcgcttcaagcagatacctgcatggaatacaccaactccaaacaacacatcgacaccacgaagacagcgaaagacacctggaagtgtcgtcgcgttaggccatgatctcgatatccttctcagtaccgatggcacgaagctagtacatgccaagaaccgtgctatgcgctgtgttatgtctaagttctatccggatcatcttgcacgaccaagcggcatttccgagttggatctacgcttcggcaagagcttcttcccaagaactgttcgatgccaagtagtttggaatcagccaagcacactcatgtctttcgattcggcgactacctggacagcaagtcagtctgctagcaatctgttggcgtctatgaccgtcaatgttggctcggaagatcccatgctagcatacgtcagtcgaagtcatctcgaatacgtccggagtacgtgttttcgggtgttgagcggcccgaatcgatctttcaacatgccggtacatcgactacgcaagctccgtgctaagaacctgatgccgagtaacgcggatgaggatgcatatttcatcgcagtcatggtcgccatggcgcaacagtcgtgttacacagatgtacgggcagggaaaggcttcgcacctcgaccaatcaagactcgcgtcttgactgtctcggaggatgagaacgccttcatcgtctacactgctacagttccgatcggtcttctccagatgttccatgagccggagaaggctcctgttgatacttcgcagatcgaggttgaatatgcccaggttccgatttggccggtcctaggtctcaaggagcgattgggtacagcccttggtgccgatatggtgggcgacttctcacgagtcccgttggatacatacgagcatgaggaagagatcgaatcaacacctgagtctatctcgcccaagcgcaggagggacgcactctcagaagtttttaatgcgagcttctccgaggatcgcgagtccgattgtcccga

SEQ ID NO: 715 - protein, 399 aa, Muscodor strobelii
  misc_feature: SGI Peptide ID NO. 559816
  misc_feature (16)..(397): NCBI GI: 256730748 Blast Desc: NECHADRAFT_74155 [Nectria haematococca mpVI 77-13-4]
  misc_feature (14)..(396): NCBI GI: 46109440 Blast Desc: FG01602.1 [Gibberella zeae PH-1]
  misc_feature (17)..(393): NCBI GI: 171678175 Blast Desc: protein product [Podospora anserina] gi|170937157|emb|CAP61814.1| protein product [Podospora anserina]
  misc_feature (33)..(396): NCBI GI: 116205750 Blast Desc: CHGG_02168 [Chaetomium globosum CBS 148.51] gi|88182765|gb|EAQ90233.1| CHGG_02168 [Chaetomium globosum CBS 148.51]
  misc_feature (17)..(350): NCBI GI: 85093404 Blast Desc: NCU09573 [Neurospora crassa OR74A] gi|28921133|gb|EAA30448.1| [Neurospora crassa OR74A]
  misc_feature (41)..(366): NCBI GI: 145611546 Blast Desc: MGG_00306 [Magnaporthe grisea 70-15] gi|145018813|gb|EDK03092.1| MGG_00306 [Magnaporthe grisea 70-15]
  misc_feature (21)..(358): NCBI GI: 261357163 Blast Desc: conserved [Verticillium albo-atrum VaMs.102]
  misc_feature (47)..(347): NCBI GI: 255949606 Blast Desc: Pc22g16560 [Penicillium chrysogenum Wisconsin 54-1255] gi|211592587|emb|CAP98944.1| Pc22g16560 [Penicillium chrysogenum Wisconsin 54-1255]
  misc_feature (49)..(265): NCBI GI: 145242200 Blast Desc: An09g04310 [Aspergillus niger] gi|134078291|emb|CAK96872.1| [Aspergillus niger]
  misc_feature (33)..(365): NCBI GI: 46116438 Blast Desc: FG04061.1 [Gibberella zeae PH-1]
  misc_feature: Useful for introducing or modulating the production of volatile compounds
MDPSTVKIIPDGLSEVKTLTKRRRIRTRHISPEVGSLYDILHDYAGKSLYVIPLCWTDLHARLLGCRFKQIPAWNTPTPNNTSTPRRQRKTPGSVVALGHDLDILLSTDGTKLVHAKNRAMRCVMSKFYPDHLARPSGISELDLRFGKSFFPRTVRCQVVWNQPSTLMSFDSATTWTASQSASNLLASMTVNVGSEDPMLAYVSRSHLEYVRSTCFRVLSGPNRSFNMPVHRLRKLRAKNLMPSNADEDAYFIAVMVAMAQQSCYTDVRAGKGFAPRPIKTRVLTVSEDENAFIVYTATVPIGLLQMFHEPEKAPVDTSQIEVEYAQVPIWPVLGLKERLGTALGADMVGDFSRVPLDTYEHEEEIESTPESISPKRRRDALSEVFNASFSEDRESDCP

SEQ ID NO: 716 - DNA, 2234 bp, Muscodor strobelii; identical to SEQ ID NO: 713
  misc_feature: SGI EST ID NO. CUFF.2100.0
  misc_feature: Variant of the nucleotide sequence at SEQ ID NO 714

SEQ ID NO: 717 - DNA, 1992 bp, Muscodor strobelii
  misc_feature: SGI cDNA ID NO. 559817
  misc_feature: Encodes the peptide sequence at SEQ ID NO 718
atggacgaaaacgccaaggagatttttcgccgtttccgccgcattcctctgggaaagatcgctacctggtcgcgcaatgttgtccaaaatcctgacaaacatccagaaagccataaaaagctggcccaacggttgacgacgtttcttgaccgagttgcccaccgtcgccgtcagaatgcagtgccgcaagagggcccactcacaatacaagaattacctgaagatgtattgttaccaatatttgacgcagtgaaggctattccgtcgatcattcactttgaattcgaagtccaagagttgaaagaagaacggtacactgatcctcgacatcatgccggcggcactctcttcagagcaaatctggccgatgatcagcgccgtacttcatatcgcactacacagcgccctgttaacgagcatacacgtcgcgctggtattattagagacaaaactcattcgaatgttaacagagagggcgaggcatctcatctttttgagcacatgctttcaggaggtcttgcagggtcacggcgcgcggataaactcacacagagtgcaaagacagccttgaaggcaatggaaggactcgagggagacgatgatcctaacgtagacgagctaatagcacaagctaaagaaattctcgaaaagaacaaagcacattctcttgaagagccattcttacttgaaattggggacaaaatcaaggacttcaaagttcgaccggcctatgattggttctttctcgagaactatctcacagtctggacccgacatgctagaatgaatattgagctcctcccttggtgtgctgcctttcgcacaattcgtacccccgtatttttcttgagagatatttacaatgcattttgcttcatttttgctgaagacacactgaggcaacggtatgaaacgcgtccctatgacgacgttgtggctccaagaaagctcccgacaaacccccctctagatttagacgatgatgatttaaatccaacaataaatcgcatcatggctggtcaagggactatcatacaaagtcgacagcttttcccaacaaacttcatacaaaccgtcgacgatttcacattctcccgacttgttaatgaactgttcttgcacatattctggcgattctctaatcatgacgaacttttgatcatggtcggaaagatgccagataccgagatgccattgcacaaggactttgaaaagattgaagtggagtggaccggaacagggccgcgtggaaagtgcgacccctcggcgatatcaaccgagcctgacactgtgagcgatcgcgataagaggatgatgagctttgtcaaagttgtgatggacttgatcattgacatgcaaggaccgttttgttacaatttccttgacacgcaaatcgcgcaggatgcatttttgagcaaacactgcgaaactccctttacgcactggctagcagatacggaggttggcaagcgatggttacaaacgttggcaggtagaggttggctcgaaacagacgcagggctgtggtggctcagctcctcggcgggtggcgtcgcttggctggactccaaagttggcttggagtggctcgacgagccgggcaaccctctattggaatctaaatttggaattatttgggccctctacggtatcagtgatgataagaatgtagccaggaaacaaaaccttcgacagcacaatttctatgcgacagaaaagggcagcgaatggtttaagagcaatgttggaattttaggtcccggtgacgagaagcctgagccacctgagccaccaaacattggctcccgacccaacgaaatgatgttaacacatagtaacatgtcgtttcgaaattttactggtcgaagtccggactacttgaatatgtttatgacaccgccaagagagtggcatttcattcagcagaaaggcgggaatcctgatctcaatagccctggtcctgaccgtaaaggcaaaggagtgcagcgatga

SEQ ID NO: 718 - protein, 663 aa, Muscodor strobelii
  misc_feature: SGI Peptide ID NO. 559817
MDENAKEIFRRFRRIPLGKIATWSRNVVQNPDKHPESHKKLAQRLTTFLDRVAHRRRQNAVPQEGPLTIQELPEDVLLPIFDAVKAIPSIIHFEFEVQELKEERYTDPRHHAGGTLFRANLADDQRRTSYRTTQRPVNEHTRRAGIIRDKTHSNVNREGEASHLFEHMLSGGLAGSRRADKLTQSAKTALKAMEGLEGDDDPNVDELIAQAKEILEKNKAHSLEEPFLLEIGDKIKDFKVRPAYDWFFLENYLTVWTRHARMNIELLPWCAAFRTIRTPVFFLRDIYNAFCFIFAEDTLRQRYETRPYDDVVAPRKLPTNPPLDLDDDDLNPTINRIMAGQGTIIQSRQLFPTNFIQTVDDFTFSRLVNELFLHIFWRFSNHDELLIMVGKMPDTEMPLHKDFEKIEVEWTGTGPRGKCDPSAISTEPDTVSDRDKRMMSFVKVVMDLIIDMQGPFCYNFLDTQIAQDAFLSKHCETPFTHWLADTEVGKRWLQTLAGRGWLETDAGLWWLSSSAGGVAWLDSKVGLEWLDEPGNPLLESKFGIIWALYGISDDKNVARKQNLRQHNFYATEKGSEWFKSNVGILGPGDEKPEPPEPPNIGSRPNEMMLTHSNMSFRNFTGRSPDYLNMFMTPPREWHFIQQKGGNPDLNSPGPDRKGKGVQR

SEQ ID NO: 719 - DNA, 881 bp, Muscodor strobelii
  misc_feature: SGI EST ID NO. CUFF.1995.0
  misc_feature: Variant of the nucleotide sequence at SEQ ID NO 717
tcgacagcacaatttctatgcgacagaaaagggcagcgaatggtttaagagcaatgttggaattttaggtcccggtgacgagaagcctgagccacctgagccaccaaacattggctcccgacccaacgaaatgatgttaacacatagtaacatgtcgtttcgaaattttactggtcgaagtccggactacttgaatatgtttatgacaccgccaagagagtggcatttcattcagcagaaaggcgggaatcctgatctcaatagccctggtcctgaccgtaaaggcaaaggagtgcagcgatgataacccaactatgtctgggccaccttttttcttctttttcttttatcgaattgttgctttatgttctcgctagtccttcattctatcctttgccaactgtgaagacagtcaactcgcacttattgggcatttgcgatattgatgcttttactaacacgctccttggcaattcggaaacgcccttgatggtacagatcgcctactgtataatcaatcaagatgctgggtggtaatagctgtatcgttacgcttcggtcatcatttaccattttctcccttgtgccgaccacattaaatctgcacggcgttgcccatttctgcatctcttactttctataggttcctgtctcatcaagctagcagtcctcgccaccaggtcttcatcgacacacttgagcttcacatacttcgtcttttagacaataacaacggcgctgaaaaatggcgtagtcaagatgcttgttctactggccgtcttagatatgaagcgcaggatttcgaccgatgaaaatacctgtaattagttatttgctttattcatcacagtctatctttaaataaattccatgtgtccacg

SEQ ID NO: 720 - DNA, 5619 bp, Muscodor strobelii
  misc_feature: SGI cDNA ID NO. 559818
  misc_feature: Reduced expression when VOC is produced
  misc_feature: Encodes the peptide sequence at SEQ ID NO 721
atgtctgccgaagcgcctgccctcgcggccgatccgtctgcgctgccccccttcgccgccggccacgaggacatggacgtcgatgtcgatgcttctctcctccccaacgtcctgccccggccttacgacagcactggccacgatgactcaggcattcagccgggcatcaaggtcgtctgtccaccactgccactcccactcaaccacgatactccacccgatgatgaacacagtcatgaccacgcacatcatctatcccctaaacccaccggtctgcactcgccgccagacagcaacaatgccatgaagctcgacggcagcgactccgagctcagcgacatcgaggacccgaccctcgaacctgaccagctgccctccgtccactcccactcccagccttacatccagcccgagtccattcccacagccaataccgagccggaagaggaagaagaagacatcggcgaggtcacgcccgaccattggtctggcaccgtgcccgtcttcaagcccgacatgcatcagttcaaggactttaagaaattcatggcaaagatcgactcgtacggcatgaagtctggcatcgtcaaggtcatcccacctgaggaatggaaggagaagctgccccaactcgacgaactagtcaagcaagtcagggttcgtgaacccatcaagcaggagataatgggctccaacggcacctatcgccaggtgaacatcctgcaccagcgcgcctacaatctgccacaatggcgccagctctgcgaccagagcgaacatcaacctcctgccaggcgaggcgagcgacgtgcccaggcccctcccaaaccgaaagccccagctgccccgaaatcctctacgccaagacgtgctgctgctgccgccggtggaggacgcagcacaaggagccgaaacaagaaaggtggcgccaaggccagtgcagtcgagcaggacgagcggcccatgacccctgtctctcccaagcctgccgacgatgtcgtcgagtcggtcgaacaggatcccggaaccgacattgacgacgacgaggaagacgatgcccctcgtccggctggtcgcatgggcggtagcaggcaggccaagcccaagcagcctaaagagcagagcacgtctgcccgtcgcaagtttgcccgtcgggaaggctcagcccgaattgacgaggaagccttcaaagactttgattaccatatggacatttccgactacacccctgagagatgtgaagaactggagcgcatatactggaagaccctcacttatgcaccgccgctctatggtgccgatgtcctgggaactctgttcgatgataccacagacacatggaacctcaacaagcttcccaatctcctcgacgtgcttggcaccaaggtccctggtgtcaacacggcctatctctaccttggcatgtggaaggctacctttgcgtggcatctggaagacgttgatctgtacagtatcaactatctccatttcggtgccccaaaacagtggtatagtatctctcaaggtgatgcccgtcgatttgaagcggccatgaagagtatctggcctaccgacgcaaaggcttgcgaccagttcctccgtcacaaagcctttttgatctctcccaatcatcttcagcagtacttcaatatcaaggtcaacaaatgtgtgtcttaccccggagagtttgttgttacttatccctatggctaccactccggctacaatctcgggtacaattgcgcggaagctgtcaactttgctctcgactcctggttgcccatgggtaagatcgccaagaagtgcgaatgtgctcaggcccaggatagcgtctggattgatgtccacgcgatcgaacgtaagctacgcggtgaagaaacagattatgaggagactgaggacgaggatgacgaggaggacgaagacgaggacgaggaaactggcatacctactcctcgctcatcccacatcagattcaaagtgtctggagggaaacgcaaacgaacagcgacagacaagagcgaaaggaagacgaagaagatccgtcttcgtatcaagagccatgttgagccaccttgctgtctctgcccacacgacattgctggtgccgagttactgccgaccgacgacaaacgcaaagctcatcgtctctgtgccatctatggcgccgagacctggatcgagactgtcgatggaaaagaaaccgtcgccaacgtggccaacatcagcaaagctcgtctcgacctcaaatgtctgttgtgtcgttcgaagaggggcgcgtgtttgcagtgctcgcacaagaaatgtgtgcgctcataccatgcgacctgcgctgcagcggctgggatgttcgtcgaagaggctgaaatccctattttcagcgaagatggtatcgaatacaaagagcaggcatttgccttcacttgtcgtttccacagggcgaaacgcgaccgcaaattggatgcaaataacttcgatgatcacaagcagacagctgaagctgccagcaacgtaaaggagggtgacatcagccagttccaatatttcttcagggagacggtaaagaagaatggtgtcgagcagttccagtattccaaaggagagatatttgcaggtatcattgttgaaaacagggtcgccgagcagacattcctcgtcgatattttacctaatggtgaacgtgtcgaggtcgaatggaaatggctggttcttgaggatccggctgatttgcatctaccgcacgcctctgcaaaggccataccgatgcccacctcacgcaaagccaaggatcaaatcaatgcgaataggaaacaagttgaagagttacctcgagccgacgatatctttgtggacggcggcttcacatgggcagagttcaaccatcacgatctggagaggaatagggcccaagtcaagattgatctgtcgaagcagaaccaagtctggcattacctcggtaaattttccactgaggctcgtccgcagtacacagaagaccccaagaagcagcttcataactgcaagagcaatttcctggataccattcctcgacctccgccaccaccgcctcaaccccggaagtcaactggtgccgcattttccatccggaaaccagctgcaccgctccctgctcccaagccggagaagccataccagtacaagccccgggatcctgttcaagccacccccgtccgacctccattcacggctcagcaattcacgccagcatctttacccccttatacacatcaacagtttgcgcccacgggtgcgccgtatactaatactttcttccatcatacttcatcacagcccgccacgaaatcaacaaacttctctgcatcgccacagacgccatctgcatccgccccattctataattatcagcaacctcttacttccgctgctcaagaaaatcagcgatcgcagcagcaatttcatcccagtgtgaaggtccctcaacctccacgcccgcaacaacaggcagcaaacccaaccaacgcggtgtcacaaccgacataccaacctaatcagccgatcttgcaagttgcacctcagccgtcccagcacagtgcattccattatggccaacagtcacagccaacacaacaatccactgcaaagcaagcttcaactgctccgatatacacgctcccgcagcctgtttcaaatgcagtgaccaaattgcccgcaacttctgcttcgcaacctggatcacgacggccttctctacctcgtcctgtgccgcctccgagcagcggcggtcatgcacggaacaagtcctctgtaagcagccttagtgggcgctacggtctcgcttctggccagaggatgggcactcccccggcttcgtatggccattctagaacgggctcgatgactcagtcacctttcagtcacggtttctcgcagcctaagggtctcgagtctccacagaatggtccaattttccagtcgcaggccagagcaagatcaagttcgctagcgtccactatctctctcaaagctcctatgacatcgtccgctatacgcccaagctcttcgacttccgcccagaagctagccagtcacctgcaatctgtcatctcatcgaatgcaccaaaggattcacctcaggatatcacacataaatatcccttcttccaggtgaactgcaatagggactcggcgcaatacagaacgccatacgctccatggggcgggtttacgaatggctacgaatgcaatcccagcgcgcacctaacgcaaacatccgatgcgcttttcgctattggacggcaatcaaatagatcaaatggaacgacacccggcttgtcagcagtgcctcaaagttatggcggaaatacacagtcttctatcgagccagatccattccagatgcaacactcaccgggtctgccacccaattcaggtcgcctagtgtctttgcccctaggattttcccccacaagtaatccagcgttctcgcctattacagctacaccgatggtgcaaggtctgtccaatgaccgcaaagggtcattcagcagttcctaccactgggatggaaactcgaatgctagccccggcctgcatccagctattcgggctcggtacgcatcgatgcttcaaagaaatgatctcaaagcagaagagccgtctggcaatagtaaatccaatggatgcgaagagccagctttgaagatcgtgcctgtaataacatcgcgcatgccgaactcggtgtctccatctactcctatccaaaacgcgacgccaacggtagcgtcccaggcctctgcctctcggcctgtgtctgttcacaatagcggctcgtccaagtcgaccactcccatcccccctccgctaattccatcgacacctgggtcagtcgggccggcgtccgccaagacgaatgctgtggtacctaagcagacccacattccggcgccgcggccgtgggaaacactgaggaaagtctcactccccacaccacagaccgcatcgcggcctcctccatctacgccggttgttgcgagtcctgtagggcccacagctacacctagcatgccgagcccatctccatacccgcctgttgaggtctcgaggcagctccctaccccgggcgtgcagcccagccatgttcagtctgccggcccgcggctatcccccttacagcagcatcaaccagctaccgtttccctactaccccaagcagccttccaccaacagtcaggtacatctcccgcagccgcagctgccgccaccgcagcattaccaagcgccacaggtatatcagcatcaacaattcccaggaccccaggcgacttacccttactccgctcccccgacgcagcatccgtatctggcgttcccaccgcaaccgcagcgtccaccgccgccatcacagaggacgctcccgaacccgtttacggggccgccccagtatccttaccagcagcactagcagaaccagcagatgcagggatgttatcgaaatcagagctaccagcagtagcagcgccgcaagggctcgggtcaggtgatcttcccgaggtgtcggacgggtcgatggagctagtggagagcatcattcgcaacgcgcagatggccagtggcctcttctcgttcgggagtggctag

SEQ ID NO: 721 - protein, 1872 aa, Muscodor strobelii
  misc_feature: SGI Peptide ID NO. 559818
  misc_feature (470)..(587): Pfam Id: PF02373 Pfam Desc: JmjC domain
  misc_feature (167)..(211): Pfam Id: PF02375 Pfam Desc: jmjN domain
  misc_feature (86)..(1060): NCBI GI: 171688886 Blast Desc: protein product [Podospora anserina] gi|170944405|emb|CAP70515.1| protein product [Podospora anserina]
  misc_feature (69)..(1129): NCBI GI: 261356999 Blast Desc: DNA damage-responsive transcriptional repressor RPH1 [Verticillium albo-atrum VaMs.102]
  misc_feature (92)..(1073): NCBI GI: 256730774 Blast Desc: NECHADRAFT_123068 [Nectria haematococca mpVI 77-13-4]
  misc_feature (87)..(1075): NCBI GI: 145605559 Blast Desc: MGG_09186 [Magnaporthe grisea 70-15] gi|145013378|gb|EDJ98019.1| MGG_09186 [Magnaporthe grisea 70-15]
  misc_feature (89)..(1085): NCBI GI: 46109352 Blast Desc: FG01558.1 [Gibberella zeae PH-1]
  misc_feature (129)..(1110): NCBI GI: 164427453 Blast Desc: NCU03505 [Neurospora crassa OR74A] gi|157071749|gb|EAA26571.2| conserved [Neurospora crassa OR74A]
  misc_feature (85)..(1089): NCBI GI: 116199811 Blast Desc: CHGG_08061 [Chaetomium globosum CBS 148.51] gi|88179340|gb|EAQ86808.1| CHGG_08061 [Chaetomium globosum CBS 148.51]
  misc_feature (129)..(1110): NCBI GI: 18376321 Blast Desc: related to regulator of deoxyribodipyrimidine photo-lyase PHR1 [Neurospora crassa]
  misc_feature (89)..(1033): NCBI GI: 154318594 Blast Desc: BC1G_02686 [Botryotinia fuckeliana B05.10] gi|150857816|gb|EDN33008.1| BC1G_02686 [Botryotinia fuckeliana B05.10]
  misc_feature (92)..(1058): NCBI GI: 156063728 Blast Desc: SS1G_01982 [Sclerotinia sclerotiorum 1980] gi|154697316|gb|EDN97054.1| SS1G_01982 [Sclerotinia sclerotiorum 1980]
  misc_feature: Useful for introducing or modulating the production of volatile compounds
MSAEAPALAADPSALPPFAAGHEDMDVDVDASLLPNVLPRPYDSTGHDDSGIQPGIKVVCPPLPLPLNHDTPPDDEHSHDHAHHLSPKPTGLHSPPDSNNAMKLDGSDSELSDIEDPTLEPDQLPSVHSHSQPYIQPESIPTANTEPEEEEEDIGEVTPDHWSGTVPVFKPDMHQFKDFKKFMAKIDSYGMKSGIVKVIPPEEWKEKLPQLDELVKQVRVREPIKQEIMGSNGTYRQVNILHQRAYNLPQWRQLCDQSEHQPPARRGERRAQAPPKPKAPAAPKSSTPRRAAAAAGGGRSTRSRNKKGGAKASAVEQDERPMTPVSPKPADDVVESVEQDPGTDIDDDEEDDAPRPAGRMGGSRQAKPKQPKEQSTSARRKFARREGSARIDEEAFKDFDYHMDISDYTPERCEELERIYWKTLTYAPPLYGADVLGTLFDDTTDTWNLNKLPNLLDVLGTKVPGVNTAYLYLGMWKATFAWHLEDVDLYSINYLHFGAPKQWYSISQGDARRFEAAMKSIWPTDAKACDQFLRHKAFLISPNHLQQYFNIKVNKCVSYPGEFVVTYPYGYHSGYNLGYNCAEAVNFALDSWLPMGKIAKKCECAQAQDSVWIDVHAIERKLRGEETDYEETEDEDDEEDEDEDEETGIPTPRSSHIRFKVSGGKRKRTATDKSERKTKKIRLRIKSHVEPPCCLCPHDIAGAELLPTDDKRKAHRLCAIYGAETWIETVDGKETVANVANISKARLDLKCLLCRSKRGACLQCSHKKCVRSYHATCAAAAGMFVEEAEIPIFSEDGIEYKEQAFAFTCRFHRAKRDRKLDANNFDDHKQTAEAASNVKEGDISQFQYFFRETVKKNGVEQFQYSKGEIFAGIIVENRVAEQTFLVDILPNGERVEVEWKWLVLEDPADLHLPHASAKAIPMPTSRKAKDQINANRKQVEELPRADDIFVDGGFTWAEFNHHDLERNRAQVKIDLSKQNQVWHYLGKFSTEARPQYTEDPKKQLHNCKSNFLDTIPRPPPPPPQPRKSTGAAFSIRKPAAPLPAPKPEKPYQYKPRDPVQATPVRPPFTAQQFTPASLPPYTHQQFAPTGAPYTNTFFHHTSSQPATKSTNFSASPQTPSASAPFYNYQQPLTSAAQENQRSQQQFHPSVKVPQPPRPQQQAANPTNAVSQPTYQPNQPILQVAPQPSQHSAFHYGQQSQPTQQSTAKQASTAPIYTLPQPVSNAVTKLPATSASQPGSRRPSLPRPVPPPSSGGHARNKSSVSSLSGRYGLASGQRMGTPPASYGHSRTGSMTQSPFSHGFSQPKGLESPQNGPIFQSQARARSSSLASTISLKAPMTSSAIRPSSSTSAQKLASHLQSVISSNAPKDSPQDITHKYPFFQVNCNRDSAQYRTPYAPWGGFTNGYECNPSAHLTQTSDALFAIGRQSNRSNGTTPGLSAVPQSYGGNTQSSIEPDPFQMQHSPGLPPNSGRLVSLPLGFSPTSNPAFSPITATPMVQGLSNDRKGSFSSSYHWDGNSNASPGLHPAIRARYASMLQRNDLKAEEPSGNSKSNGCEEPALKIVPVITSRMPNSVSPSTPIQNATPTVASQASASRPVSVHNSGSSKSTTPIPPPLIPSTPGSVGPASAKTNAVVPKQTHIPAPRPWETLRKVSLPTPQTASRPPPSTPVVASPVGPTATPSMPSPSPYPPVEVSRQLPTPGVQPSHVQSAGPRLSPLQQHQPATVSLLPQAAFHQQSGTSPAAAAAATAALPSATGISASTIPRTPGDLPLLRSPDAASVSGVPTATAASTAAITEDAPEPVYGAAPVSLPAALAEPADAGMLSKSELPAVAAPQGLGSGDLPEVSDGSMELVESIIRNAQMASGLFSFGSG

SEQ ID NO: 722 - DNA, 6633 bp, Muscodor strobelii
  misc_feature: SGI EST ID NO. CUFF.2889.0
  misc_feature: Variant of the nucleotide sequence at SEQ ID NO 720
agcagccaatcaacagagagtagacccacctgcgaacgccccccagcgatccccgaatggaccatgtccatttcgcacctctcatccctcgaacctcgcagcagccagtcgtccaattccatcgcacgccgccgcacctcgcacctcgcacctcgcacctcagccttagtactgcaggctagcattgcacacactgcacacctctccatacctgctgcacttgcactgcgttgcaattccaattcaatcctgccctttcgtctcggctgttgtcactcgcagaccacccgcgacggccaacgaccacgctcgacgtcgcaccgcggccgtgccatcgattgacactggtccccgtcgctcgactccgtccacaccacagcagctctacatcccagggccgagcgacacaacacctcggaggcagaggcgggtcagggcaccgccgacaccagcccgccgtccatgaggacaatcaatcgtcgcctcgatcgcatgtagtcccccgaccgccgccatgtctgccgaagcgcctgccctcgcggccgatccgtctgcgctgccccccttcgccgccggccacgaggacatggacgtcgatgtcgatgcttctctcctccccaacgtcctgccccggccttacgacagcactggccacgatgactcaggcattcagccgggcatcaaggtcgtctgtccaccactgccactcccactcaaccacgatactccacccgatgatgaacacagtcatgaccacgcacatcatctatcccctaaacccaccggtctgcactcgccgccagacagcaacaatgccatgaagctcgacggcagcgactccgagctcagcgacatcgaggacccgaccctcgaacctgaccagctgccctccgtccactcccactcccagccttacatccagcccgagtccattcccacagccaataccgagccggaagaggaagaagaagacatcggcgaggtcacgcccgaccattggtctggcaccgtgcccgtcttcaagcccgacatgcatcagttcaaggactttaagaaattcgtacgtctgcacataccgtcttcatccacccaccccctgtgatactgacacgccttttaccagatggcaaagatcgactcgtacggcatgaagtctggcatcgtcaaggtcatcccacctgaggaatggaaggagaagctgccccaactcgacgaactagtcaagcaagtcagggttcgtgaacccatcaagcaggagataatgggctccaacggcacctatcgccaggtgaacatcctgcaccagcgcgcctacaatctgccacaatggcgccagctctgcgaccagagcgaacatcaacctcctgccaggcgaggcgagcgacgtgcccaggcccctcccaaaccgaaagccccagctgccccgaaatcctctacgccaagacgtgctgctgctgccgccggtggaggacgcagcacaaggagccgaaacaagaaaggtggcgccaaggccagtgcagtcgagcaggacgagcggcccatgacccctgtctctcccaagcctgccgacgatgtcgtcgagtcggtcgaacaggatcccggaaccgacattgacgacgacgaggaagacgatgcccctcgtccggctggtcgcatgggcggtagcaggcaggccaagcccaagcagcctaaagagcagagcacgtctgcccgtcgcaagtttgcccgtcgggaaggctcagcccgaattgacgaggaagccttcaaagactttgattaccatatggacatttccgactacacccctgagagatgtgaagaactggagcgcatatactggaagaccctcacttatgcaccgccgctctatggtgccgatgtcctgggaactctgttcgatgataccacagacacatggaacctcaacaagcttcccaatctcctcgacgtgcttggcaccaaggtccctggtgtcaacacggcctatctctaccttggcatgtggaaggctacctttgcgtggcatctggaagacgttgatctgtacagtatcaactatctccatttcggtgccccaaaacagtggtatagtatctctcaaggtgatgcccgtcgatttgaagcggccatgaagagtatctggcctaccgacgcaaaggcttgcgaccagttcctccgtcacaaagcctttttgatctctcccaatcatcttcagcagtacttcaatatcaaggtcaacaaatgtgtgtcttaccccggagagtttgttgttacttatccctatggctaccactccggctacaatctcgggtacaattgcgcggaagctgtcaactttgctctcgactcctggttgcccatgggtaagatcgccaagaagtgcgaatgtgctcaggcccaggatagcgtctggattgatgtccacgcgatcgaacgtaagctacgcggtgaagaaacagattatgaggagactgaggacgaggatgacgaggaggacgaagacgaggacgaggaaactggcatacctactcctcgctcatcccacatcagattcaaagtgtctggagggaaacgcaaacgaacagcgacagacaagagcgaaaggaagacgaagaagatccgtcttcgtatcaagagccatgttgagccaccttgctgtctctgcccacacgacattgctggtgccgagttactgccgaccgacgacaaacgcaaagctcatcgtctctgtgccatctatggcgccgagacctggatcgagactgtcgatggaaaagaaaccgtcgccaacgtggccaacatcagcaaagctcgtctcgacctcaaatgtctgttgtgtcgttcgaagaggggcgcgtgtttgcagtgctcgcacaagaaatgtgtgcgctcataccatgcgacctgcgctgcagcggctgggatgttcgtcgaagaggctgaaatccctattttcagcgaagatggtatcgaatacaaagagcaggcatttgccttcacttgtcgtttccacagggcgaaacgcgaccgcaaattggatgcaaataacttcgatgatcacaagcagacagctgaagctgccagcaacgtaaaggagggtgacatcagccagttccaatatttcttcagggagacggtaaagaagaatggtgtcgagcagttccagtattccaaaggagagatatttgcaggtatcattgttgaaaacagggtcgccgagcagacattcctcgtcgatattttacctaatggtgaacgtgtcgaggtcgaatggaaatggctggttcttgaggatccggctgatttgcatctaccgcacgcctctgcaaaggccataccgatgcccacctcacgcaaagccaaggatcaaatcaatgcgaataggaaacaagttgaagagttacctcgagccgacgatatctttgtggacggcggcttcacatgggcagagttcaaccatcacgatctggagaggaatagggcccaagtcaagattgatctgtcgaagcagaaccaagtctggcattacctcggtaaattttccactgaggctcgtccgcagtacacagaagaccccaagaagcagcttcataactgcaagagcaatttcctggataccattcctcgacctccgccaccaccgcctcaaccccggaagtcaactggtgccgcattttccatccggaaaccagctgcaccgctccctgctcccaagccggagaagccataccagtacaagccccgggatcctgttcaagccacccccgtccgacctccattcacggctcagcaattcacgccagcatctttacccccttatacacatcaacagtttgcgcccacgggtgcgccgtatactaatactttcttccatcatacttcatcacagcccgccacgaaatcaacaaacttctctgcatcgccacagacgccatctgcatccgccccattctataattatcagcaacctcttacttccgctgctcaagaaaatcagcgatcgcagcagcaatttcatcccagtgtgaaggtccctcaacctccacgcccgcaacaacaggcagcaaacccaaccaacgcggtgtcacaaccgacataccaacctaatcagccgatcttgcaagttgcacctcagccgtcccagcacagtgcattccattatggccaacagtcacagccaacacaacaatccactgcaaagcaagcttcaactgctccgatatacacgctcccgcagcctgtttcaaatgcagtgaccaaattgcccgcaacttctgcttcgcaacctggatcacgacggccttctctacctcgtcctgtgccgcctccgagcagcggcggtcatgcacggaacaagtcctctgtaagcagccttagtgggcgctacggtctcgcttctggccagaggatgggcactcccccggcttcgtatggccattctagaacgggctcgatgactcagtcacctttcagtcacggtttctcgcagcctaagggtctcgagtctccacagaatggtccaattttccagtcgcaggccagagcaagatcaagttcgctagcgtccactatctctctcaaagctcctatgacatcgtccgctatacgcccaagctcttcgacttccgcccagaagctagccagtcacctgcaatctgtcatctcatcgaatgcaccaaaggattcacctcaggatatcacacataaatatcccttcttccaggtgaactgcaatagggactcggcgcaatacagaacgccatacgctccatggggcgggtttacgaatggctacgaatgcaatcccagcgcgcacctaacgcaaacatccgatgcgcttttcgctattggacggcaatcaaatagatcaaatggaacgacacccggcttgtcagcagtgcctcaaagttatggcggaaatacacagtcttctatcgagccagatccattccagatgcaacactcaccgggtctgccacccaattcaggtcgcctagtgtctttgcccctaggattttcccccacaagtaatccagcgttctcgcctattacagctacaccgatggtgcaaggtctgtccaatgaccgcaaagggtcattcagcagttcctaccactgggatggaaactcgaatgctagccccggcctgcatccagctattcgggctcggtacgcatcgatgcttcaaagaaatgatctcaaagcagaagagccgtctggcaatagtaaatccaatggatgcgaagagccagctttgaagatcgtgcctgtaataacatcgcgcatgccgaactcggtgtctccatctactcctatccaaaacgcgacgccaacggtagcgtcccaggcctctgcctctcggcctgtgtctgttcacaatagcggctcgtccaagtcgaccactcccatcccccctccgctaattccatcgacacctgggtcagtcgggccggcgtccgccaagacgaatgctgtggtacctaagcagacccacattccggcgccgcggccgtgggaaacactgaggaaagtctcactccccacaccacagaccgcatcgcggcctcctccatctacgccggttgttgcgagtcctgtagggcccacagctacacctagcatgccgagcccatctccatacccgcctgttgaggtctcgaggcagctccctaccccgggcgtgcagcccagccatgttcagtctgccggcccgcggctatcccccttacagcagcatcaaccagctaccgtttccctactaccccaagcagccttccaccaacagtcaggtacatctcccgcagccgcagctgccgccaccgcagcattaccaagcgccacaggtatatcagcatcaacaattcccaggaccccaggcgacttacccttactccgctcccccgacgcagcatccgtatctggcgttcccaccgcaaccgcagcgtccaccgccgccatcacagaggacgctcccgaacccgtttacggggccgccccagtatccttaccagcagcactagcagaaccagcagatgcagggatgttatcgaaatcagagctaccagcagtagcagcgccgcaagggctcgggtcaggtgatcttcccgaggtgtcggacgggtcgatggagctagtggagagcatcattcgcaacgcgcagatggccagtggcctcttctcgttcgggagtggctagacgctccgggtctctgactacatgctgatgaaggtttcatacggcgcaaaggcatgttgggcaacggggacacgagggcaacgatagatgatggcggtgttctcattttcgtaggcgtttggcgttgcatacatgacggtgaggtaattcgattgggatttcaagggtaaaagaacaggtgtacattgtcaggcgccctcgaaacgggtgcaatcgggtggcggaatggcgtttgtgcaaacacgtccagtcgagagctgtagctcttgctttctgagttgaaaagtaggtgttcgttcatgtatagtagtattgtgaagagagggcgttgcattgtcatacgctgcgctcgaaagacgttgcgagtctttcaaaggaatggcgactcaagtcgcagtgttagcatgtaggaaaatcaagtttaatggacttgtaat

SEQ ID NO: 723 - DNA, 2346 bp, Muscodor strobelii
  misc_feature: SGI cDNA ID NO. 559819
  misc_feature: Reduced expression when VOC is produced
  misc_feature: Encodes the peptide sequence at SEQ ID NO 724
atggctgacgctaggaacgcaaaggtcagcagatccgagcgcaagcgcagcaggagccctaccgtaaagacgagcgacactgacaccttcgttaagcgcgtaaaggtcgacaaggacgaagacgacaggaagctcgagtccaacccgtacctttcgcactggaacgacggcaacaatggctacagtggaaagtcgtcgcttgattcacctctgagggacttcaagcgacgtgagactacagccaagcaggcagctgcagccgaggatggtgatcacaacccatttaccggcgttgagcactcggagcgctacttctctatcctgaagtcgagacggaatttgcctgtccataagcagagacaagagttcctcgacctctaccagaaatcccagatcctcgtctttgtcggcgagacaggttctggtaagaccacacagatcccccagtacgtcgtctacgacgagttgcctcatcttaacaagaagatggtcgcctgtacccagccccgtcgagtcgctgccatgtccgttgcccagcgtgttgccgacgagctcgacgtcacccttggtgaagaagttggttatagcattcgtttcgaggaccgcactagctcgaagacgatactcaagtacatgaccgacggtatgctgctcagagaagctatgcatgaccacaacatgtctcgatacagttgtatcattctcgacgaagcccacgagcgtaccctcgccaccgatatcctcatggccctgctcaaagacgtcacgaagcgacgacccgacctcaagctcattgtcatgtctgctaccctcgatgcccagaagttccagcgctacttcctcgacgcacctcttctcgccgtgcctggtcgtactttccctgtcgagattttctatacccccgaacctgagaaggactacgttgagggtgccatcaggaccgtcctgcagatccatgcgagcgaagatgagggtgatatcttgctttttcttaccggtgaagaggaaattgaggatacgtgtcgaaagatttcattggaggtagacgaactcataagagagacggatgctggcccaatggttgtgtatcctctctacggtaccctgcctcctcatcagcagcagcgcattttcgacccgccgccagtgaaccagagaaagggcggtcgtccgggtcgcaagtgcatcatttctaccaatattgccgagacctccctgaccatcgacggcattgtttacgtggtggaccccggttttagcaagcaaaagatctacaacccccggctcagggtcgagtcactcctcgtttctgccatttcgaaggcctcggcacagcagagagccggtcgtgctggtcgtacaaaacctggaaagtgctttcgtctctatacggaaaaagctttcaaggaggaattgattgagcagacctaccctgagattcttcggtctaatctcgcgaatacggttctcgagctgaagaagcttggtgtacaggatctagtgcacttcgacctcatggatcctcctgccccggagaccatgatgcgagcgctcgaggaactcaattatctcgcctgcctagacgacgagggcgagttgacgcagctcggcagcctcgcctccgaatttcctcttgaccctgccctggccgttatgttgatctccagccccgaattctattgctcaaatgagatgctctcactcaccgcgctcctctcggtccctcagatcttcgtccggcccgcccagcgaagaagagaagcggacgagatgaagaatctcttcaagcacgcagacggcgaccatctcaccatgctgaatgtataccacgccttcaaaggggtaataggccggggcgaggacggcaagaagtggtgccacgagcactacctttccttccgacatctctcatcggcggataatgtccgtgctcagttgaagcgaatcatggagacccaaggccttgaactccttagtacggatttcagcgacaagagctactataccaatatccgacgtgcattggtcgcaggcttcttcatgcaggttgccaagagagagaacaataaggtttacaggaccctgaaggacaataattcggcggtcatgttgcatccgagtacggtgttgggcgcggattatgactgggtggtatacaacgagtttgtgctcacgagtaagcagtatgttagaactgttacgggaatcaggcctgagtggcttttagaactcgcgccccagtactatgacctggactcctgggaaggtcagaaagatgtcaagatggcgctcaagcaagtcgccgacaagatgcgaaggagggctgctatgaaggccggccgttga

SEQ ID NO: 724 - protein, 781 aa, Muscodor strobelii
  misc_feature: SGI Peptide ID NO. 559819
  misc_feature (644)..(748): Pfam Id: PF07717 Pfam Desc: Domain of function (DUF1605)
  misc_feature (516)..(606): Pfam Id: PF04408 Pfam Desc: Helicase associated domain (HA2)
  misc_feature (355)..(455): Pfam Id: PF00271 Pfam Desc: Helicase conserved C-terminal domain
  misc_feature (362)..(455): Pfam Id: PF00271 Pfam Desc: Helicase conserved C-terminal domain
  misc_feature (31)..(781): NCBI GI: 189188938 Blast Desc: pre-mRNA splicing factor ATP-dependent RNA helicase PRP16 [Pyrenophora tritici-repentis Pt-1C-BFP] gi|187972414|gb|EDU39913.1| pre-mRNA splicing factor RNA helicase
  misc_feature (25)..(779): NCBI GI: 67515703 Blast Desc: AN0133.2 [Aspergillus nidulans FGSC A4] gi|40746155|gb|EAA65311.1| AN0133.2 [Aspergillus nidulans FGSC A4] gi|259489671|tpe|CBF90134.1| TPA: pre-mRNA splicing factor
  misc_feature (26)..(781): NCBI GI: 154286000 Blast Desc: pre-mRNA splicing factor ATP-dependent RNA helicase PRP43 [Ajellomyces capsulatus NAm1] gi|150407436|gb|EDN02977.1| pre-mRNA splicing factor ATP-dependent RNA helicase PRP43 NAm1]
  misc_feature (74)..(773): NCBI GI: 254567241 Blast Desc: RNA helicase in the DEAH-box family [Pichia pastoris GS115] gi|238030527|emb|CAY68451.1| RNA helicase in the DEAH-box family [Pichia pastoris GS115]
  misc_feature (68)..(772): NCBI GI: 50407806 Blast Desc: DEHA0A09581g [Debaryomyces hansenii CBS767] gi|49652401|emb|CAG84696.1| DEHA2A09372p [Debaryomyces hansenii]
  misc_feature (75)..(781): NCBI GI: 260946123 Blast Desc: pre-mRNA splicing factor RNA helicase PRP43 [Clavispora lusitaniae ATCC 42720] gi|238849213|gb|EEQ38677.1| pre-mRNA splicing factor RNA helicase PRP43 [Clavispora ATCC
  misc_feature (43)..(781): NCBI GI: 19112729 Blast Desc: ATP-dependent RNA helicase Prp43 [Schizosaccharomyces pombe 972h-] gi|3913432|sp|O42945.1|DHX15_SCHPO RecName: Full= pre-mRNA-splicing factor ATP-dependent RNA helicase prp43 RNA
  misc_feature (76)..(774): NCBI GI: 50546941 Blast Desc: YALI0B15642p [Yarrowia lipolytica] gi|49646806|emb|CAG83191.1| YALI0B15642p [Yarrowia lipolytica]
  misc_feature (71)..(773): NCBI GI: 6321318 Blast Desc: Prp43p [Saccharomyces cerevisiae] gi|1723910|sp|P53131.1|PRP43_YEAST RecName: Full=Pre-mRNA-splicing factor ATP-dependent RNA helicase PRP43;
  misc_feature (71)..(773): NCBI GI: 255719738 Blast Desc: KLTH0H06204p [Lachancea thermotolerans] gi|238942115|emb|CAR30287.1| KLTH0H06204p [Lachancea thermotolerans]
  misc_feature: Useful for introducing or modulating the production of volatile compounds
MADARNAKVSRSERKRSRSPTVKTSDTDTFVKRVKVDKDEDDRKLESNPYLSHWNDGNNGYSGKSSLDSPLRDFKRRETTAKQAAAAEDGDHNPFTGVEHSERYFSILKSRRNLPVHKQRQEFLDLYQKSQILVFVGETGSGKTTQIPQYVVYDELPHLNKKMVACTQPRRVAAMSVAQRVADELDVTLGEEVGYSIRFEDRTSSKTILKYMTDGMLLREAMHDHNMSRYSCIILDEAHERTLATDILMALLKDVTKRRPDLKLIVMSATLDAQKFQRYFLDAPLLAVPGRTFPVEIFYTPEPEKDYVEGAIRTVLQIHASEDEGDILLFLTGEEEIEDTCRKISLEVDELIRETDAGPMVVYPLYGTLPPHQQQRIFDPPPVNQRKGGRPGRKCIISTNIAETSLTIDGIVYVVDPGFSKQKIYNPRLRVESLLVSAISKASAQQRAGRAGRTKPGKCFRLYTEKAFKEELIEQTYPEILRSNLANTVLELKKLGVQDLVHFDLMDPPAPETMMRALEELNYLACLDDEGELTQLGSLASEFPLDPALAVMLISSPEFYCSNEMLSLTALLSVPQIFVRPAQRRREADEMKNLFKHADGDHLTMLNVYHAFKGVIGRGEDGKKWCHEHYLSFRHLSSADNVRAQLKRIMETQGLELLSTDFSDKSYYTNIRRALVAGFFMQVAKRENNKVYRTLKDNNSAVMLHPSTVLGADYDWVVYNEFVLTSKQYVRTVTGIRPEWLLELAPQYYDLDSWEGQKDVKMALKQVADKMRRRAAMKAGR

SEQ ID NO: 725 - DNA, 3326 bp, Muscodor strobelii
  misc_feature: SGI EST ID NO. CUFF.2075.1
  misc_feature: Variant of the nucleotide sequence at SEQ ID NO 723
gcgatcaagaaagtcaccaggtggtggggctgccaaaacatccagctttcttaccttgcaacaaaataaggcagaggaacaacaccggcaacaacagtcgcgagtcctggtcgtcgcgtctgcactccacttgctgcgcgtgttgtctcgtcttctctactcgcacctaaccctggccgcagaccatctgatcaatccaagatatcaaactcgcggcttcaggcttcgagctctaaggcaaccaacagcaaggagagagatcagaccaaatccagctggacaccagtttgcgccgcgcgcaaggctctcatcatggctgacgctaggaacgcaaagcgcgtaaaggtcgacaaggacgaagacgacaggaagctcgagtccaacccgtacctttcgcactggaacgacggcaacaatggctacagtggaaagtcgtcgcttgattcacctctgagggacttcaagcgacgtgagactacagccaagcaggcagctgcagccgaggatggtgatcacaacccatttaccggcgttgagcactcggagcgctacttctctatcctgaagtcgagacggaatttgcctgtccataagcagagacaagagttcctcgacctctaccagaaatcccagatcctcgtctttgtcggcgagacaggttctggtaagaccacacagatcccccagtacgtcgtctacgacgagttgcctcatcttaacaagaagatggtcgcctgtacccagccccgtcgagtcgctgccatgtccgttgcccagcgtgttgccgacgagctcgacgtcacccttggtgaagaagttggttatagcattcgtttcgaggaccgcactagctcgaagacgatactcaagtacatgaccgacggtatgctgctcagagaagctatgcatgaccacaacatgtctcgatacagttgtatcattctcgacgaagcccacgagcgtaccctcgccaccgatatcctcatggccctgctcaaagacgtcacgaagcgacgacccgacctcaagctcattgtcatgtctgctaccctcgatgcccagaagttccagcgctacttcctcgacgcacctcttctcgccgtgcctggtcgtactttccctgtcgagattttctatacccccgaacctgagaaggactacgttgagggtgccatcaggaccgtcctgcagatccatgcgagcgaagatgagggtgatatcttgctttttcttaccggtgaagaggaaattgaggatacgtgtcgaaagatttcattggaggtagacgaactcataagagagacggatgctggcccaatggttgtgtatcctctctacggtaccctgcctcctcatcagcagcagcgcattttcgacccgccgccagtgaaccagagaaagggcggtcgtccgggtcgcaagtgcatcatttctaccaatattgccgagacctccctgaccatcgacggcattgtttacgtggtggaccccggttttagcaagcaaaagatctacaacccccggctcagggtcgagtcactcctcgtttctgccatttcgaaggcctcggcacagcagagagccggtcgtgctggtcgtacaaaacctggaaagtgctttcgtctctatacggaaaaagctttcaaggaggaattgattgagcagacctaccctgagattcttcggtctaatctcgcgaatacggttctcgagctgaagaagcttggtgtacaggatctagtgcacttcgacctcatggatcctcctgccccggagaccatgatgcgagcgctcgaggaactcaattatctcgcctgcctagacgacgagggcgagttgacgcagctcggcagcctcgcctccgaatttcctcttgaccctgccctggccgttatgttgatctccagccccgaattctattgctcaaatgagatgctctcactcaccgcgctcctctcggtccctcagatcttcgtccggcccgcccagcgaagaagagaagcggacgagatgaagaatctcttcaagcacgcagacggcgaccatctcaccatgctgaatgtataccacgccttcaaaggggtaataggccggggcgaggacggcaagaagtggtgccacgagcactacctttccttccgacatctctcatcggcggataatgtccgtgctcagttgaagcgaatcatggagacccaaggccttgaactccttagtacggatttcagcgacaagagctactataccaatatccgacgtgcattggtcgcaggcttcttcatgcaggttgccaagagagagaacaataaggtttacaggaccctgaaggacaataattcggcggtcatgttgcatccgagtacggtgttgggcgcggattatgactgggtggtatacaacgagtttgtgctcacgagtaagcagtatgttagaactgttacgggaatcaggcctgagtggcttttagaactcgcgccccagtactatgacctggactcctgggaaggtcagaaagatgtcaagatggcgctcaagcaagtcgccgacaagatgcgaaggagggctgctatgaaggccggccgttgagtgacgtcggcgcaatgctcacttccacgatagcatccgcctattcgtacttctgtcaaccgtgtgtttgagtttgagttctgggtctcaagctgtgaactggattattgtaggaatagagggagagagccccgtatttgtttgatcactggcaggagaagagaagacaaaagtttgggggggcatgaggatggacatggccgggttgttattggaacacccagacgtcgaccctaataccagcaccgacactggcaagactgcgcttcacatcgcagggccgactggattcaacgatacatcggatggattgttgctggtgtaccttactcttttgcgcgagctgagtctcaaggcctacgagatttccgatcgtctgcacaggggcagcagacttcatcggatgatggctgtacagggcgagctgttgaaatcagtaaatggggaagtttctgtacgcatgtggctccccgtcagattagcccttctcctctatttgttccactagagcagattggcagatagatagagggctgttaggagctggccagctggactacgcactaccctacttatgtacagaatagccatggcaggggagtgatagataggtaaagggctcgagctgatagacgagaattgtcacagcttggtcctgatatacaccgaaaacactgagattgatgatacctcgtctgtgcaaatgcggtagacacttataagtgaagtatggatttcgg

SEQ ID NO: 726 - DNA, 1032 bp, Muscodor strobelii
  misc_feature: SGI cDNA ID NO. 559820
  misc_feature: Encodes the peptide sequence at SEQ ID NO 727
atggctcacgatcatcgtaagtcattggctcagaaagcccttctcatgatacagcccctgacctactcagcgtacaagcagctccgcctccctagaagtgcgcctgttgagttgcgcccctcgcctggaaaagggtacggtattttcgccattcggaacatagccaagggcgagacgattcttcatgataaacctctcatcgcgtttgatatgccacaatctaaaatccaccatggtcacatcatccaagcgctcagccgactcaatcgttccgacaaggagctgttcaattgcctggccggtactggttccgttcagtccggcgggacgccggaggaagagatcttccacaataattgctggtattacagcggattgtgcggcatgtttctgctgatgtcccgaatcaatcattcctgtgtcccgagctccgattgggatattgatgaatcgcactcagtgatgacgataatctcgagtcgtcagatttcggcaggagaagagatcacaaccagctactattctaatttcatgtacaaggcttctgcccaacgccgcgagctgacggagcggcactggggctttgcttgcgcttgccaagcctgccggattggaaccccatttcacacggcaagcgagttacgccgtaccatgatggccgtccttgaatacctgatgtgtgggccctatgctaatgtcccagagctgcctaagaacgtcaccattccgcatcatcttgcgactaagagcggaaagctccccttgggcgtaggattctattatcataccatatttgtctgcctccttgacacggagaacgcgctcagcactttcgaggccgagaagcaccagagcgaacacgaaaagaatggaagacggctgttgatcatagcacgtcttcgtagggatcctatgccgctggtcgaggacatcctagcgaagagaacttggaacgataaagccgctttggttatgggccagatgattggcgatctcgatttcggtcccggcagactcccaatcgttcattag

SEQ ID NO: 727 - protein, 343 aa, Muscodor strobelii
  misc_feature: SGI Peptide ID NO. 559820
  misc_feature (28)..(61): Pfam Id: PF00856 Pfam Desc: SET domain
  misc_feature (25)..(272): NCBI GI: 242826490 Blast Desc: SET domain containing protein [Talaromyces stipitatus ATCC 10500] gi|218712470|gb|EED11896.1| SET domain containing protein [Talaromyces stipitatus ATCC 10500]
  misc_feature (25)..(228): NCBI GI: 238842011 Blast Desc: [Microsporum canis CBS 113480]
  misc_feature (27)..(228): NCBI GI: 255949710 Blast Desc: Pc22g17090 [Penicillium chrysogenum Wisconsin 54-1255] gi|211592639|emb|CAP98997.1| Pc22g17090 [Penicillium chrysogenum Wisconsin 54-1255]
  misc_feature (24)..(276): NCBI GI: 212528162 Blast Desc: PMAA_025740 [Penicillium marneffei ATCC 18224] gi|210073636|gb|EEA27723.1| PMAA_025740 [Penicillium marneffei ATCC 18224]
  misc_feature (25)..(144): NCBI GI: 242759817 Blast Desc: TSTA_059740 [Talaromyces stipitatus ATCC 10500] gi|218723059|gb|EED22476.1| TSTA_059740 [Talaromyces stipitatus ATCC 10500]
  misc_feature (38)..(223): NCBI GI: 189200222 Blast Desc: conserved [Pyrenophora tritici-repentis Pt-1C-BFP] gi|187983547|gb|EDU49035.1| conserved [Pyrenophora tritici-repentis Pt-1C-BFP]
  misc_feature (20)..(232): NCBI GI: 116200772 Blast Desc: CHGG_10931 [Chaetomium globosum CBS 148.51] gi|88175645|gb|EAQ83113.1| CHGG_10931 [Chaetomium globosum CBS 148.51]
  misc_feature (38)..(218): NCBI GI: 213407994 Blast Desc: conserved [Schizosaccharomyces japonicus yFS275] gi|212002815|gb|EEB08475.1| conserved [Schizosaccharomyces japonicus yFS275]
  misc_feature (37)..(264): NCBI GI: 145605910 Blast Desc: [Magnaporthe grisea 70-15] gi|145013663|gb|EDJ98304.1| [Magnaporthe grisea 70-15]
  misc_feature (41)..(202): NCBI GI: 189197821 Blast Desc: conserved [Pyrenophora tritici-repentis Pt-1C-BFP] gi|187981196|gb|EDU47822.1| conserved [Pyrenophora tritici-repentis Pt-1C-BFP]
  misc_feature (40)..(226): SWISSPROT Homolog: EC 2.1.1.43 Histone-lysine N-methyltransferase
MAHDHRKSLAQKALLMIQPLTYSAYKQLRLPRSAPVELRPSPGKGYGIFAIRNIAKGETILHDKPLIAFDMPQSKIHHGHIIQALSRLNRSDKELFNCLAGTGSVQSGGTPEEEIFHNNCWYYSGLCGMFLLMSRINHSCVPSSDWDIDESHSVMTIISSRQISAGEEITTSYYSNFMYKASAQRRELTERHWGFACACQACRIGTPFHTASELRRTMMAVLEYLMCGPYANVPELPKNVTIPHHLATKSGKLPLGVGFYYHTIFVCLLDTENALSTFEAEKHQSEHEKNGRRLLIIARLRRDPMPLVEDILAKRTWNDKAALVMGQMIGDLDFGPGRLPIVH

SEQ ID NO: 728 - DNA, 647 bp, Muscodor strobelii
  misc_feature: SGI EST ID NO. CUFF.2054.0
  misc_feature: Variant of the nucleotide sequence at SEQ ID NO 726
ctccttgacacggagaacgcgctcagcactttcgaggccgagaagcaccagagcgaacacgaaaagaatggaagacggctgttgatcatagcacgtcttcgtagggatcctatgccgctggtcgaggacatcctagcgaagagaacttggaacgataaagccgctttggttatgggccagatgattggcgatctcgatttcggtcccggcagactcccaatcgttcattagttacgaaatggcccatttactcgtgttccttgcggtgatacgggacgcctctcggagtatgatacagtggttgagacatgtatatataccagcttgatccgctggcatgttctggtgtgaaaagaaatcgcttctcactaatttgtaaattattttatgtatcaaatagagatgacgcctaggctaggacggtctggcgtctgaactaacagccttccggtacatgtcttaggtattgcctcgctcaggctagggtccacgactacagaaaaagataagaatagtgagctattaaaacttccaacgcaaaactctctgttcatctgctgatctgtccatcccctggcatcaaggacgacagcggtcaggttcccaccttggttgtcagctgtgaaaacgtttaccaggtggacttt

SEQ ID NO: 729 - DNA, 501 bp, Muscodor strobelii
  misc_feature: SGI cDNA ID NO. 559821
  misc_feature: Encodes the peptide sequence at SEQ ID NO 730
atgtacaaggcttctgcccaacgccgcgagctgacggagcggcactggggctttgcttgcgcttgccaagcctgccggattggaaccccatttcacacggcaagcgagttacgccgtaccatgatggccgtccttgaatacctgatgtgtgggccctatgctaatgtcccagagctgcctaagaacgtcaccattccgcatcatcttgcgactaagagcggaaagctccccttgggcgtaggattctattatcataccatatttgtctgcctccttgacacggagaacgcgctcagcactttcgaggccgagaagcaccagagcgaacacgaaaagaatggaagacggctgttgatcatagcacgtcttcgtagggatcctatgccgctggtcgaggacatcctagcgaagagaacttggaacgataaagccgctttggttatgggccagatgattggcgatctcgatttcggtcccggcagactcccaatcgttcattag

SEQ ID NO: 730 - protein, 166 aa, Muscodor strobelii
  misc_feature: SGI Peptide ID NO. 559821
MYKASAQRRELTERHWGFACACQACRIGTPFHTASELRRTMMAVLEYLMCGPYANVPELPKNVTIPHHLATKSGKLPLGVGFYYHTIFVCLLDTENALSTFEAEKHQSEHEKNGRRLLIIARLRRDPMPLVEDILAKRTWNDKAALVMGQMIGDLDFGPGRLPIVH

SEQ ID NO: 731 - DNA, 647 bp, Muscodor strobelii; identical to SEQ ID NO: 728
  misc_feature: SGI EST ID NO. CUFF.2054.0
  misc_feature: Variant of the nucleotide sequence at SEQ ID NO 729

SEQ ID NO: 732 - DNA, 1092 bp, Muscodor strobelii
  misc_feature: SGI cDNA ID NO. 559822
  misc_feature: Encodes the peptide sequence at SEQ ID NO 733
atggcgccccttggaatcgcgctcattggtagcgggatttttatgaaagagcaacatgtccccgccgctcttgcctgcccactagttgagatcaaggcagtctggtcacgttcatcgaagtcggcggaagaaaccgcaaagctcgtgacaccatattctggagttcaagtctattcatcggattctggccctggcaagacctacgatgacctactgtcacgctccgacatcagcgccctgatcattgctctgccaattgtggaccagcctagcttcatcgagaaaggtttggctgccgggaagcgatacggtactgacttctttgtagtgagtgacattctggccgagaagcctatcgccaaggatgtcgaaactgctgttaagcttatacagtactacaaaaaggtgtcgactgagactaaggcaactctagctattgcggagaacttccgcttctttgaaagcttcaaatatggtgccgaacgaatcaaacaacttggtaacatgaccggcttcgtggttaggattggttcaatgatggatactggcaataagtactacaatactgcctggagaacagtccctgattatcagggtgggttcctcttagatgggggcgtccacaacaccgcggctcttagggagctcctagggaacgagcacagcgtcagcagcttgatggcccatactacattagtctccagtcatcttcctccggtagattccatcaacgcgatcatccaaaccagatctggcgtagtcgggtcatatattcacagtgctggaacgacaatgagcgctcacgagtatctcgtctcctgcgaacatgggtacgtgaaggttgaacctgataaggtgactacggtcgttggagttggagcagacgcgacatccacagagaggttatgggggagaagctccggggtgcaagaggaagtaaaagcatgggctgaggggctagtgtccgggaaaccaaaccctcgccagagccctgagctcgcactaggagatttggaactcatggagaagatgctcacaagtggtgatcatgctggtgagagacagcagctgcaattccagcacatcgtttag

SEQ ID NO: 733 - protein, 363 aa, Muscodor strobelii
  misc_feature: SGI Peptide ID NO. 559822
  misc_feature (4)..(150): Pfam Id: PF01408 Pfam Desc: Oxidoreductase family, NAD-binding Rossmann fold
  misc_feature (4)..(85): Pfam Id: PF01408 Pfam Desc: Oxidoreductase family, NAD-binding Rossmann fold
  misc_feature (1)..(360): NCBI GI: 256726259 Blast Desc: NECHADRAFT_70521 [Nectria haematococca mpVI 77-13-4]
  misc_feature (4)..(360): NCBI GI: 154310483 Blast Desc: BC1G_07162 [Botryotinia fuckeliana B05.10] gi|150851493|gb|EDN26686.1| BC1G_07162 [Botryotinia fuckeliana B05.10]
  misc_feature (4)..(360): NCBI GI: 156055484 Blast Desc: SS1G_05094 [Sclerotinia sclerotiorum 1980] gi|154702878|gb|EDO02617.1| SS1G_05094 [Sclerotinia sclerotiorum 1980]
  misc_feature (12)..(360): NCBI GI: 255952937 Blast Desc: Pc21g01510 [Penicillium chrysogenum Wisconsin 54-1255] gi|211588932|emb|CAP95048.1| Pc21g01510 [Penicillium chrysogenum Wisconsin 54-1255]
  misc_feature (4)..(360): NCBI GI: 242777614 Blast Desc: oxidoreductase family, NAD-binding Rossmann fold protein [Talaromyces stipitatus ATCC 10500] gi|218722689|gb|EED22107.1| oxidoreductase family, NAD-binding
  misc_feature (4)..(360): NCBI GI: 119482149 Blast Desc: NFIA_091650 [Neosartorya fischeri NRRL 181] gi|119409257|gb|EAW19206.1| [Neosartorya fischeri NRRL 181]
  misc_feature (4)..(360): NCBI GI: 212533253 Blast Desc: oxidoreductase family, NAD-binding Rossmann fold protein [Penicillium marneffei ATCC 18224] gi|210072147|gb|EEA26236.1| oxidoreductase family, NAD-binding
  misc_feature (4)..(360): NCBI GI: 238502629 Blast Desc: oxidoreductase family, NAD-binding Rossmann fold protein [Aspergillus flavus NRRL3357] gi|220691358|gb|EED47706.1| oxidoreductase family, NAD-binding Rossmann fold protein flavus
  misc_feature (4)..(353): NCBI GI: 189199120 Blast Desc: conserved [Pyrenophora tritici-repentis Pt-1C-BFP] gi|187982996|gb|EDU48484.1| conserved [Pyrenophora tritici-repentis Pt-1C-BFP]
  misc_feature (4)..(360): NCBI GI: 169775965 Blast Desc: [Aspergillus oryzae RIB40] gi|83771184|dbj|BAE61316.1| protein product [Aspergillus oryzae]
MAPLGIALIGSGIFMKEQHVPAALACPLVEIKAVWSRSSKSAEETAKLVTPYSGVQVYSSDSGPGKTYDDLLSRSDISALIIALPIVDQPSFIEKGLAAGKRYGTDFFVVSDILAEKPIAKDVETAVKLIQYYKKVSTETKATLAIAENFRFFESFKYGAERIKQLGNMTGFVVRIGSMMDTGNKYYNTAWRTVPDYQGGFLLDGGVHNTAALRELLGNEHSVSSLMAHTTLVSSHLPPVDSINAIIQTRSGVVGSYIHSAGTTMSAHEYLVSCEHGYVKVEPDKVTTVVGVGADATSTERLWGRSSGVQEEVKAWAEGLVSGKPNPRQSPELALGDLELMEKMLTSGDHAGERQQLQFQHIV

SEQ ID NO: 734 - DNA, 5483 bp, Muscodor strobelii
  misc_feature: SGI EST ID NO. CUFF.2143.0
  misc_feature: Variant of the nucleotide sequence at SEQ ID NO 732
gcggggtgcgcaatcctcattgaagccaacttatcattacctagccacaggtattaatctctgtcgatcgctcacttttgcatcattctctccttctcatattcactattccggacgtttgaccatcaacaacgccgctgaatagcgtatgtgcgcctagagaagaattatctgcttgattactatacgtgcggctcgatattggccaaggatggcgccccttggaatcgcgctcattggtagcgggatttttatgaaagagcaacatgtccccgccgctcttgcctgcccactagttgagatcaaggcagtctggtcacgttcatcgaagtcggcggaagaaaccgcaaagctcgtgacaccatattctggagttcaagtctattcatcggattctggccctggcaagacctacgatgacctactgtcacgctccgacatcagcgccctgatcattgctctgccaattgtggaccagcctagcttcatcgagaaaggtttggctgccgggaagcggtacgtgtagaaagaccctacgcgagttggtttttgattgtattcctaagatacggtactgacttctttgtagtgagtggtctgtcctgtaactatcagaaaccagcccgttgtcttaagacccgcggccctgcaaaaagtcgtgaaaataaactaacccaatactagacattctggccgagaagcctatcgccaaggatgtcgaaactgctgttaagcttatacagtactacaaaaaggtgtcgactgagactaaggcaactctagctattgcggagaacttccgcttctttgaaagcttcaaatatggtgccgaacgaatcaaacaacttggtaacatgaccggcttcgtggttaggattggttcaatgatggatactggcaataagtactacaatactgcctggagaacagtccctgattatcagggtgggttcctcttagatgggggcgtccacaacaccgcggctcttagggagctcctagggaacgagcacagcgtcagcagcttgatggcccatactacattagtctccagtcatcttcctccggtagattccatcaacgcgatcatccaaaccagatctggcgtagtcgggtcatatattcacagtgctggaacgacaatgagcgctcacgagtatctcgtctcctgcgaacatgggtacgtgaaggttgaacctgataaggtgactacggtcgttggagttggagcagacgcgacatccacagagaggttatgggggagaagctccggggtgcaagaggaagtaaaagcatgggctgaggggctagtgtccgggaaaccaaaccctcgccagagccctgagctcgcactaggagatttggaactcatggagaagatgctcacaagtggtgatcatgctggtgagagacagcagctgcaattccagcacatcgtttagattaaagcacgcttgaaaaatttagaagataatatcatagcttgctaggctggtctgcaactacgagcttctctaaaccttctcgtagctgcttattcatgccattaacgttcggtcgagcggtcgagcggtcgacaaaaacatgtacaaattcgccgacagctttcacttgctccacattcttctcaaaaagggctacttcataaacgacactcgatttgctgagcttattcactcgtaagcagaggtctgcgactttaggatacgagatagctgaaaagtagtcggtgtgtgtatgcgccatgagcgggtgttgtgcagatgtgggaggatgcaatccacaatagtccattagatatgagttgatgatggagtcgaaactgttacgcggtatgcatgtcagaggcatgatgcatgcactgtggtcagacattcgcgatgatatctacttacaggaaattatagactgaattgttcatgtggtcgtacatgtcgttatcgctccttgttagaggtgagctcagtacagcgggtcgccggctaagagatctcagctcaccatcttgttctgtactctagagagaaagggtaatcggctcttatgcggccctttagagccttggaagacgccatgtttatcctcactcggtgagcctgaggtccttgtttacaagtaaaagccaaagcaagtggacttcaacgaaatgctgctaatataatttaatagagtaagtagccgctagctcacgttgccgaggccgactgaatggaggtcgaaggaggtacatagctggcagtcccgccagtccggctgcggattgtcggctgttttagcagctgtcatttccatggaggtggactgctagtagtgcgcggggagcatttgcagggtcgtggatactgccagctttaaccgccaaaatttccaatccccaactgcacctaaactacgatattcgactgcaatcactgcaataacaccaatacactcgattcctctccggatctacctccctgtcacggccgtcatcagaattgctagtatagcaagctggccctcacaatctggggcgtgaggagcgcccgtcacgtgaggggccttgcgttgtcacgatctatcatgactccctcacaggttattggcagcgacaacgctagcttcgagatttcaccggtcgcgctccctcccgttgagtcgctctctctagaaaaaccgaagtcgaaagcgaagtcgaaaaaccataagacccagattgtcgaagtaccaactaatgctctaccacctccatactactttgagagcggcttgcggcgagtcgcaccctaccactatacatacaatacttggtgcaagcaacgttggagggaccgcggaattctagacgtttttgagagcgaatttcgagaccgcccgctcccatattataaacaagccatcgagacaggtaaggtgcgcgtaaatgggaagcagacgacccccaacgcacttttaaggaacggcgatctgatctctcacatcattcatcgccatgagccgcccatatccgccgcgcccataggtattctccatgaggacgatgacatgatcgtgatcaataagccatcgggtataccagttcatcccgcaggccgttataattataactctgtgatagagatcatgaaagccgagcgcgggcctgaatggatcgcgtatccttgcaacagattagatagactcactagtggtatcatgttcgtggccaagaacccgaaatcggcggaatcgctgggtgagcagatcaaggcgcgatctgtacgcaaggaatacattgccagggtgattggcaacttccccgatggcgaagtggtctgtaacgagcccattttacaaatttctcccaaactaggactcaacaggatacgagcaaacgggaagtttgccaaaactgtcttcaagaaacttgcatactatcccccaagcgagtcacaaccacgaccgactacaaatgacgaccctaattcacaacagaagttcgataagccgtggttgcaaatggaaggctattccattgtgcgttgcctcccggtcactggccgcacacatcagcttcgggttcatcttcaacatttgggccatccgatagaaaacgacccgatctatgcaaaccgaggggtctgggggatcaagcttggttgcaatgatcccgatgccgtcgaaaacagcgacgaggacataatcacgcgtcttaatcgtatggggaaggaggatgtggcagatgcggtcgcctaccacgacgagatggtcgatcaatattataagaaaaaggcagaaaagatgtcgggggaactttgcgaaatttgcgatactccgttatacactgatccgggtgagcaagaactatcactctggttacatagcctgcgctatgaggacgctggaggaagctggaaatacgtgagtccgttgccagattgggctctgccgcccacaggtgtctcaggccctacagaagtaggcgagatggacgacttagtcgatgcagtgaaggatgcgaatcctgagcttgcatctgataccaaaaaggcgtaaatcatcgcctttaataaagcggtcttgtcatttgacgtatcacgcttccgatttaatacagctggttctgtgttgcgacgtgacatgcacctattcattgtttgtcttgtgataccgtaataaggagcgatattgaccacgtacacatatttccgagtagactaaacgtcatggcactctgctccaagattttccaatacatctacgaacgaagacgaggggatcgattttttgtctcaatggtcaaaaagtttttgatcaacaaacatgacttgagcttgaataatttggaggccagacattgtgttgcctcggtgaagatttggccttctagaatattcaccggagagaatcacaaccccttcgccatggacttttctcggacagacggcttgcttctttttgctgccatgcggacgaaaacaaacggtaagattgacaccagaactcacattctatcgtagtatcagctgaattcatcgtaggtgcattgctcactcagcttccagattcgcatcagctttcctgattcgtatatactcaacttcgccacggcacgtgttcgtgcctctgctgcatctctgaccccttcgttgctaacccacattcttctaggctctagataatcgacgtcgacattatcaacattctcgagtccgtgctcccgctcgccagcttatcgtccacgagttcggacaacggtcggtgaaacgagcgactgagttagtgtaaacttaaaacttgtagatagagactctcttcgcgagcccaattcatattgtgggggaccgtttgcaagatactatcgagtatgtcatggcaccgttagccccaaggtctggctcccttgtctcagcatccctagcgtttcttagcttctcgaagcagatatcgaggccttgcaggcacaccagagttcgctcgtcgcaaactcaaagctttcgaggaacgggtttcctattgcgggacttttccgatttcttctagaagaaatacacgtggcatgtggtgagagtgacggttcaagactgctttctctgtattggcagaagttcgtgcatcgagatttttacaagggtgatatagaagatactgctcaagcaacgtcattgtggcttgcctctgtgtgcggcttaggatcgacgaaatcggtgatcaaaggtcgagattcctcacctagctcaatgctctactgccgtcgtttgtattagcacaaaatttagcattattgacagtctactgttttttcagggcaagtctagcaagtgggcagttatgatcggaacattccttgatccacatggctagctggccgcaaatggtttcatgcaggccgctgctcatcatcagagaggctaccgacgctattgtcgccgttacgagcttggcttgtgcatacgtattccagacctccaaaacacaccacagtattagagaaatgcccgttggaggtaaaccggcaacccggt

SEQ ID NO: 735 - DNA, 471 bp, Muscodor strobelii
  misc_feature: SGI cDNA ID NO. 559823
  misc_feature: Encodes the peptide sequence at SEQ ID NO 736
atggcgtcttccaaggctctaaagggccgcataagagccgattaccctttctctctagagtacagaacaagatggagcgataacgacatgtacgaccacatgaacaattcagtctataatttccttttcgactccatcatcaactcatatctaatggactattgtggattgcatcctcccacatctgcacaacacccgctcatggcgcatacacacaccgactacttttcagctatctcgtatcctaaagtcgcagacctctgcttacgagtgaataagctcagcaaatcgagtgtcgtttatgaagtagccctttttgagaagaatgtggagcaagtgaaagctgtcggcgaatttgtacatgtttttgtcgaccgctcgaccgctcgaccgaacgttaatggcatgaataagcagctacgagaaggtttagagaagctcgtagttgcagaccagcctagcaagctatga

SEQ ID NO: 736 - protein, 156 aa, Muscodor strobelii
  misc_feature: SGI Peptide ID NO. 559823
  misc_feature (2)..(149): NCBI GI: 46111495 Blast Desc: FG02629.1 [Gibberella zeae PH-1]
  misc_feature (2)..(154): NCBI GI: 261355760 Blast Desc: thioesterase family protein [Verticillium albo-atrum VaMs.102]
  misc_feature (5)..(148): NCBI GI: 189200268 Blast Desc: thioesterase family protein [Pyrenophora tritici-repentis Pt-1C-BFP] gi|187983570|gb|EDU49058.1| thioesterase family protein [Pyrenophora tritici-repentis
  misc_feature (1)..(153): NCBI GI: 242817546 Blast Desc: thioesterase family protein [Talaromyces stipitatus ATCC 10500] gi|218713442|gb|EED12866.1| thioesterase family protein [Talaromyces stipitatus ATCC 10500]
  misc_feature (8)..(156): NCBI GI: 238841352 Blast Desc: thioesterase family protein [Microsporum canis CBS 113480]
  misc_feature (3)..(148): NCBI GI: 156055474 Blast Desc: SS1G_05089 [Sclerotinia sclerotiorum 1980] gi|154702873|gb|EDO02612.1| SS1G_05089 [Sclerotinia sclerotiorum 1980]
  misc_feature (10)..(152): NCBI GI: 258566760 Blast Desc: conserved [Uncinocarpus reesii 1704] gi|237905570|gb|EEP79971.1| conserved [Uncinocarpus reesii 1704]
  misc_feature (8)..(156): NCBI GI: 119175235 Blast Desc: CIMG_09504 [Coccidioides immitis RS]
  misc_feature (6)..(156): NCBI GI: 121716807 Blast Desc: thioesterase family protein [Aspergillus clavatus NRRL 1] gi|119404072|gb|EAW14489.1| thioesterase family protein [Aspergillus clavatus NRRL 1]
  misc_feature (8)..(156): NCBI GI: 240107072 Blast Desc: thioesterase family protein [Coccidioides posadasii C735 delta SOWgp]
MASSKALKGRIRADYPFSLEYRTRWSDNDMYDHMNNSVYNFLFDSIINSYLMDYCGLHPPTSAQHPLMAHTHTDYFSAISYPKVADLCLRVNKLSKSSVVYEVALFEKNVEQVKAVGEFVHVFVDRSTARPNVNGMNKQLREGLEKLVVADQPSKL

SEQ ID NO: 737 - DNA, 5481 bp, Muscodor strobelii
  misc_feature: SGI EST ID NO. CUFF.2144.1
  misc_feature: Variant of the nucleotide sequence at SEQ ID NO 735
accgggttgccggtttacctccaacgggcatttctctaatactgtggtgtgttttggaggtctggaatacgtatgcacaagccaagctcgtaacggcgacaatagcgtcggtagcctctctgatgatgagcagcggcctgcatgaaaccatttgcggccagctagccatgtggatcaaggaatgttccgatcataactgcccacttgctagacttgccctgaaaaaacagtagactgtcaataatgctaaattttgtgctaatacaaacgacggcagtagagcattgagctaggtgaggaatctcgacctttgatcaccgatttcgtcgatcctaagccgcacacagaggcaagccacaatgacgttgcttgagcagtatcttctatatcacccttgtaaaaatctcgatgcacgaacttctgccaatacagagaaagcagtcttgaaccgtcactctcaccacatgccacgtgtatttcttctagaagaaatcggaaaagtcccgcaataggaaacccgttcctcgaaagctttgagtttgcgacgagcgaactctggtgtgcctgcaaggcctcgatatctgcttcgagaagctaagaaacgctagggatgctgagacaagggagccagaccttggggctaacggtgccatgacatactcgatagtatcttgcaaacggtcccccacaatatgaattgggctcgcgaagagagtctctatctacaagttttaagtttacactaactcagtcgctcgtttcaccgaccgttgtccgaactcgtggacgataagctggcgagcgggagcacggactcgagaatgttgataatgtcgacgtcgattatctagagcctagaagaatgtgggttagcaacgaaggggtcagagatgcagcagaggcacgaacacgtgccgtggcgaagttgagtatatacgaatcaggaaagctgatgcgaatctggaagctgagtgagcaatgcacctacgatgaattcagctgatactacgatagaatgtgagttctggtgtcaatcttaccgtttgttttcgtccgcatggcagcaaaaagaagcaagccgtctgtccgagaaaagtccatggcgaaggggttgtgattctctccggtgaatattctagaaggccaaatcttcaccgaggcaacacaatgtctggcctccaaattattcaagctcaagtcatgtttgttgatcaaaaactttttgaccattgagacaaaaaatcgatcccctcgtcttcgttcgtagatgtattggaaaatcttggagcagagtgccatgacgtttagtctactcggaaatatgtgtacgtggtcaatatcgctccttattacggtatcacaagacaaacaatgaataggtgcatgtcacgtcgcaacacagaaccagctgtattaaatcggaagcgtgatacgtcaaatgacaagaccgctttattaaaggcgatgatttacgcctttttggtatcagatgcaagctcaggattcgcatccttcactgcatcgactaagtcgtccatctcgcctacttctgtagggcctgagacacctgtgggcggcagagcccaatctggcaacggactcacgtatttccagcttcctccagcgtcctcatagcgcaggctatgtaaccagagtgatagttcttgctcacccggatcagtgtataacggagtatcgcaaatttcgcaaagttcccccgacatcttttctgcctttttcttataatattgatcgaccatctcgtcgtggtaggcgaccgcatctgccacatcctccttccccatacgattaagacgcgtgattatgtcctcgtcgctgttttcgacggcatcgggatcattgcaaccaagcttgatcccccagacccctcggtttgcatagatcgggtcgttttctatcggatggcccaaatgttgaagatgaacccgaagctgatgtgtgcggccagtgaccgggaggcaacgcacaatggaatagccttccatttgcaaccacggcttatcgaacttctgttgtgaattagggtcgtcatttgtagtcggtcgtggttgtgactcgcttgggggatagtatgcaagtttcttgaagacagttttggcaaacttcccgtttgctcgtatcctgttgagtcctagtttgggagaaatttgtaaaatgggctcgttacagaccacttcgccatcggggaagttgccaatcaccctggcaatgtattccttgcgtacagatcgcgccttgatctgctcacccagcgattccgccgatttcgggttcttggccacgaacatgataccactagtgagtctatctaatctgttgcaaggatacgcgatccattcaggcccgcgctcggctttcatgatctctatcacagagttataattataacggcctgcgggatgaactggtatacccgatggcttattgatcacgatcatgtcatcgtcctcatggagaatacctatgggcgcggcggatatgggcggctcatggcgatgaatgatgtgagagatcagatcgccgttccttaaaagtgcgttgggggtcgtctgcttcccatttacgcgcaccttacctgtctcgatggcttgtttataatatgggagcgggcggtctcgaaattcgctctcaaaaacgtctagaattccgcggtccctccaacgttgcttgcaccaagtattgtatgtatagtggtagggtgcgactcgccgcaagccgctctcaaagtagtatggaggtggtagagcattagttggtacttcgacaatctgggtcttatggtttttcgacttcgctttcgacttcggtttttctagagagagcgactcaacgggagggagcgcgaccggtgaaatctcgaagctagcgttgtcgctgccaataacctgtgagggagtcatgatagatcgtgacaacgcaaggcccctcacgtgacgggcgctcctcacgccccagattgtgagggccagcttgctatactagcaattctgatgacggccgtgacagggaggtagatccggagaggaatcgagtgtattggtgttattgcagtgattgcagtcgaatatcgtagtttaggtgcagttggggattggaaattttggcggttaaagctggcagtatccacgaccctgcaaatgctccccgcgcactactagcagtccacctccatggaaatgacagctgctaaaacagccgacaatccgcagccggactggcgggactgccagctatgtacctccttcgacctccattcagtcggcctcggcaacgtgagctagcggctacttactctattaaattatattagcagcatttcgttgaagtccacttgctttggcttttacttgtaaacaaggacctcaggctcaccgagtgaggataaacatggcgtcttccaaggctctaaagggccgcataagagccgattaccctttctctctagagtacagaacaagatggagcgataacgacatgtacgaccacatgaacaattcagtctataatttccttttcgactccatcatcaactcatatctaatggactattgtggattgcatcctcccacatctgcacaacacccgctcatggcgcatacacacaccgactacttttcagctatctcgtatcctaaagtcgcagacctctgcttacgagtgaataagctcagcaaatcgagtgtcgtttatgaagtagccctttttgagaagaatgtggagcaagtgaaagctgtcggcgaatttgtacatgtttttgtcgaccgctcgaccgctcgaccgaacgttaatggcatgaataagcagctacgagaaggtttagagaagctcgtagttgcagaccagcctagcaagctatgatattatcttctaaatttttcaagcgtgctttaatctaaacgatgtgctggaattgcagctgctgtctctcaccagcatgatcaccacttgtgagcatcttctccatgagttccaaatctcctagtgcgagctcagggctctggcgagggtttggtttcccggacactagcccctcagcccatgcttttacttcctcttgcaccccggagcttctcccccataacctctctgtggatgtcgcgtctgctccaactccaacgaccgtagtcaccttatcaggttcaaccttcacgtacccatgttcgcaggagacgagatactcgtgagcgctcattgtcgttccagcactgtgaatatatgacccgactacgccagatctggtttggatgatcgcgttgatggaatctaccggaggaagatgactggagactaatgtagtatgggccatcaagctgctgacgctgtgctcgttccctaggagctccctaagagccgcggtgttgtggacgcccccatctaagaggaacccaccctgataatcagggactgttctccaggcagtattgtagtacttattgccagtatccatcattgaaccaatcctaaccacgaagccggtcatgttaccaagttgtttgattcgttcggcaccatatttgaagctttcaaagaagcggaagttctccgcaatagctagagttgccttagtctcagtcgacacctttttgtagtactgtataagcttaacagcagtttcgacatccttggcgataggcttctcggccagaatgtctagtattgggttagtttattttcacgactttttgcagggccgcgggtcttaagacaacgggctggtttctgatagttacaggacagaccactcactacaaagaagtcagtaccgtatcttaggaatacaatcaaaaaccaactcgcgtagggtctttctacacgtaccgcttcccggcagccaaacctttctcgatgaagctaggctggtccacaattggcagagcaatgatcagggcgctgatgtcggagcgtgacagtaggtcatcgtaggtcttgccagggccagaatccgatgaatagacttgaactccagaatatggtgtcacgagctttgcggtttcttccgccgacttcgatgaacgtgaccagactgccttgatctcaactagtgggcaggcaagagcggcgggctagttatctctcgttagtgcatggattctcgtgaggcgcccgtgcggtctagactcgcttcgccaggggccacttcagcggtaaccttcagctacgacgcattacgacgatagaagagcactcacgacatgttgctctttcataaaaatcccgctaccaatgagcgcgattccaaggggcgccatccttggccaatatcgagccgcacgtatagtaatcaagcagataattcttctctaggcgcacatacgctattcagcggcgttgttgatggtcaaacgtccggaatagtgaatatgagaaggagagaatgatgcaaaagtgagcgatcgacagagattaatacctgtggctaggtaatgataagttggcttcaatgaggattgcgcaccccgc

SEQ ID NO: 738 - DNA, 1452 bp, Muscodor strobelii
  misc_feature: SGI cDNA ID NO. 559824
  misc_feature: Encodes the peptide sequence at SEQ ID NO 739
atgactccctcacaggttattggcagcgacaacgctagcttcgagatttcaccggtcgcgctccctcccgttgagtcgctctctctagaaaaaccgaagtcgaaagcgaagtcgaaaaaccataagacccagattgtcgaagtaccaactaatgctctaccacctccatactactttgagagcggcttgcggcgagtcgcaccctaccactatacatacaatacttggtgcaagcaacgttggagggaccgcggaattctagacgtttttgagagcgaatttcgagaccgcccgctcccatattataaacaagccatcgagacaggtaaggtgcgcgtaaatgggaagcagacgacccccaacgcacttttaaggaacggcgatctgatctctcacatcattcatcgccatgagccgcccatatccgccgcgcccataggtattctccatgaggacgatgacatgatcgtgatcaataagccatcgggtataccagttcatcccgcaggccgttataattataactctgtgatagagatcatgaaagccgagcgcgggcctgaatggatcgcgtatccttgcaacagattagatagactcactagtggtatcatgttcgtggccaagaacccgaaatcggcggaatcgctgggtgagcagatcaaggcgcgatctgtacgcaaggaatacattgccagggtgattggcaacttccccgatggcgaagtggtctgtaacgagcccattttacaaatttctcccaaactaggactcaacaggatacgagcaaacgggaagtttgccaaaactgtcttcaagaaacttgcatactatcccccaagcgagtcacaaccacgaccgactacaaatgacgaccctaattcacaacagaagttcgataagccgtggttgcaaatggaaggctattccattgtgcgttgcctcccggtcactggccgcacacatcagcttcgggttcatcttcaacatttgggccatccgatagaaaacgacccgatctatgcaaaccgaggggtctgggggatcaagcttggttgcaatgatcccgatgccgtcgaaaacagcgacgaggacataatcacgcgtcttaatcgtatggggaaggaggatgtggcagatgcggtcgcctaccacgacgagatggtcgatcaatattataagaaaaaggcagaaaagatgtcgggggaactttgcgaaatttgcgatactccgttatacactgatccgggtgagcaagaactatcactctggttacatagcctgcgctatgaggacgctggaggaagctggaaatacgtgagtccgttgccagattgggctctgccgcccacaggtgtctcaggccctacagaagtaggcgagatggacgacttagtcgatgcagtgaaggatgcgaatcctgagcttgcatctgataccaaaaaggcgtaa

SEQ ID NO: 739 - protein, 483 aa, Muscodor strobelii
  misc_feature: SGI Peptide ID NO. 559824
  misc_feature (154)..(330): Pfam Id: PF00849 Pfam Desc: RNA pseudouridylate synthase
  misc_feature (154)..(279): Pfam Id: PF00849 Pfam Desc: RNA pseudouridylate synthase
  misc_feature (307)..(330): Pfam Id: PF00849 Pfam Desc: RNA pseudouridylate synthase
  misc_feature (49)..(478): NCBI GI: 145612127 Blast Desc: MGG_08117 [Magnaporthe grisea 70-15] gi|145019360|gb|EDK03588.1| MGG_08117 [Magnaporthe grisea 70-15]
  misc_feature (24)..(477): NCBI GI: 154302617 Blast Desc: BC1G_09885 [Botryotinia fuckeliana B05.10] gi|150855374|gb|EDN30566.1| BC1G_09885 [Botryotinia fuckeliana B05.10]
  misc_feature (54)..(472): NCBI GI: 116201645 Blast Desc: CHGG_08707 [Chaetomium globosum CBS 148.51] gi|88177225|gb|EAQ84693.1| CHGG_08707 [Chaetomium globosum CBS 148.51]
  misc_feature (54)..(477): NCBI GI: 46111497 Blast Desc: FG02630.1 [Gibberella zeae PH-1]
  misc_feature (48)..(469): NCBI GI: 85075514 Blast Desc: NCU03846 [Neurospora crassa OR74A] gi|28916789|gb|EAA26544.1| NCU03846 [Neurospora crassa OR74A]
  misc_feature (54)..(477): NCBI GI: 256726258 Blast Desc: [Nectria haematococca mpVI 77-13-4]
  misc_feature (54)..(471): NCBI GI: 171678031 Blast Desc: protein product [Podospora anserina] gi|170937084|emb|CAP61743.1| protein product [Podospora anserina]
  misc_feature (15)..(478): NCBI GI: 261355761 Blast Desc: DRAP deaminase [Verticillium albo-atrum VaMs.102]
  misc_feature (100)..(477): NCBI GI: 156055472 Blast Desc: SS1G_05088 [Sclerotinia sclerotiorum 1980] gi|154702872|gb|EDO02611.1| SS1G_05088 [Sclerotinia sclerotiorum 1980]
  misc_feature (48)..(464): NCBI GI: 189200266 Blast Desc: DRAP deaminase [Pyrenophora tritici-repentis Pt-1C-BFP] gi|187983569|gb|EDU49057.1| DRAP deaminase [Pyrenophora tritici-repentis Pt-1C-BFP]
  misc_feature (63)..(450): SWISSPROT Homolog: EC 3.5.4.26 Diaminohydroxyphosphoribosylaminopyrimidine deaminase
MTPSQVIGSDNASFEISPVALPPVESLSLEKPKSKAKSKNHKTQIVEVPTNALPPPYYFESGLRRVAPYHYTYNTWCKQRWRDRGILDVFESEFRDRPLPYYKQAIETGKVRVNGKQTTPNALLRNGDLISHIIHRHEPPISAAPIGILHEDDDMIVINKPSGIPVHPAGRYNYNSVIEIMKAERGPEWIAYPCNRLDRLTSGIMFVAKNPKSAESLGEQIKARSVRKEYIARVIGNFPDGEVVCNEPILQISPKLGLNRIRANGKFAKTVFKKLAYYPPSESQPRPTTNDDPNSQQKFDKPWLQMEGYSIVRCLPVTGRTHQLRVHLQHLGHPIENDPIYANRGVWGIKLGCNDPDAVENSDEDIITRLNRMGKEDVADAVAYHDEMVDQYYKKKAEKMSGELCEICDTPLYTDPGEQELSLWLHSLRYEDAGGSWKYVSPLPDWALPPTGVSGPTEVGEMDDLVDAVKDANPELASDTKKA

SEQ ID NO: 740 - DNA, 5483 bp, Muscodor strobelii; identical to SEQ ID NO: 734
  misc_feature: SGI EST ID NO. CUFF.2143.0
  misc_feature: Variant of the nucleotide sequence at SEQ ID NO 738

SEQ ID NO: 741 - DNA, 738 bp, Muscodor strobelii
  misc_feature: SGI cDNA ID NO. 559825
  misc_feature: Reduced expression when VOC is produced
  misc_feature: Encodes the peptide sequence at SEQ ID NO 742
atgacgaaatccacgacaagttcgaccaaaggcgggaaacgaaagggtactcggagtgtgtcgactctcactccttcgcagcttgcccgaaagcgcgccaatgaccgggaagctcagcgagccataagagcgcgcactaaggagcatatcgaaaatctcgagagggaaattgacgagttgagaagccgtcaaaatcgtgaccagactgttcaagatctacttcgaaggaacaagggtcttgaggaagaggttcgccgattgcgtgaaagcctagggattagaagcaccggtcctagtcttccttacgagtcttcatacagctccagttcacagccatctccctttgctcattctactacaccagactaccccgctgtgtcggatctatctccttatagcagcgtgccggatacgacagatgtatggccgtcgtctgtaccatgctctgtgccatcaacagtttctagcccttcttcgtccggtgccacagaagactttggaagcaattatctaccaaccagtatgccatcaacaaatatgcttgaaagatcaagcataccgccagtaatgaactctcccactgtgtcttgcatgagcggcgatatgggatacgacaatgtcaagtctgaatttggatgccctccccaggtgggaatcgtgccaatcactcctccatacagtcacccgccatggaacatgtacccaatgtactaccgagcctccccagcggcaatgtga

SEQ ID NO: 742 - protein, 245 aa, Muscodor strobelii
  misc_feature: SGI Peptide ID NO. 559825
  misc_feature (1)..(180): NCBI GI: 46111499 Blast Desc: FG02631.1 [Gibberella zeae PH-1]
  misc_feature (16)..(216): NCBI GI: 256725088 Blast Desc: NECHADRAFT_55211 [Nectria haematococca mpVI 77-13-4]
  misc_feature (1)..(209): NCBI GI: 261355762 Blast Desc: conserved [Verticillium albo-atrum VaMs.102]
  misc_feature (5)..(209): NCBI GI: 85075518 Blast Desc: NCU03847 [Neurospora crassa OR74A] gi|28916790|gb|EAA26545.1| [Neurospora crassa OR74A]
  misc_feature (28)..(228): NCBI GI: 145612131 Blast Desc: MGG_08118 [Magnaporthe grisea 70-15] gi|145019362|gb|EDK03590.1| MGG_08118 [Magnaporthe grisea 70-15]
  misc_feature (1)..(91): NCBI GI: 171678029 Blast Desc: protein product [Podospora anserina] gi|170937083|emb|CAP61742.1| protein product [Podospora anserina]
  misc_feature (4)..(241): NCBI GI: 119494948 Blast Desc: bZIP transcription factor, [Neosartorya fischeri NRRL 181] gi|119412434|gb|EAW22375.1| bZIP transcription factor, [Neosartorya fischeri NRRL 181]
  misc_feature (4)..(241): NCBI GI: 70996200 Blast Desc: bZIP transcription factor [Aspergillus fumigatus Af293] gi|66850490|gb|EAL90817.1| bZIP transcription factor, [Aspergillus fumigatus Af293] gi|159131608|gb|EDP56721.1| bZIP
  misc_feature (11)..(118): NCBI GI: 156055470 Blast Desc: SS1G_05087 [Sclerotinia sclerotiorum 1980] gi|154702871|gb|EDO02610.1| SS1G_05087 [Sclerotinia sclerotiorum 1980]
  misc_feature (14)..(92): NCBI GI: 154302621 Blast Desc: BC1G_09887 [Botryotinia fuckeliana B05.10] gi|150855376|gb|EDN30568.1| BC1G_09887 [Botryotinia fuckeliana B05.10]
  misc_feature: Useful for introducing or modulating the production of volatile compounds
MTKSTTSSTKGGKRKGTRSVSTLTPSQLARKRANDREAQRAIRARTKEHIENLEREIDELRSRQNRDQTVQDLLRRNKGLEEEVRRLRESLGIRSTGPSLPYESSYSSSSQPSPFAHSTTPDYPAVSDLSPYSSVPDTTDVWPSSVPCSVPSTVSSPSSSGATEDFGSNYLPTSMPSTNMLERSSIPPVMNSPTVSCMSGDMGYDNVKSEFGCPPQVGIVPITPPYSHPPWNMYPMYYRASPAAM

SEQ ID NO: 743 - DNA, 2800 bp, Muscodor strobelii
  misc_feature: SGI EST ID NO. CUFF.2343.1
  misc_feature: Variant of the nucleotide sequence at SEQ ID NO 741
ggcgagcaagcgtggacggcgaacctcacctcggccacctgtgcaccacaccattcatgattgacagggtgctagcttccaacgcatctgggtcatgagtgggtcatactatgaactgcccaagaattggctagatgctgcattgcgcttccagctgccggccgtgttcgcaccccatccgatgtcattatataactcctgcaacgccagctgaaccctagcctgatcttgatactctatctctaatcatcttgaccatattcctgctctttccttaacttgagagcatctgacgaacagcctcctactattaggcatcgattaagagagtagtacaggagacatggcacatcttcaacacactctacctccatcatctcgaaacacatctcccacaacatcaaacccaggttcaccaggaagtatgacgaaatccacgacaagttcgaccaaaggcgggaaacgaaagggtactcggagtgtgtcgactctcactccttcgcagcttgcccgaaagcgcgccaatgaccgggaagctcagcgagccataagagcgcgcactaaggagcatatcgaaaatctcgagagggaaattgacgagttgagaagccgtcaaaatcgtgaccagactgttcaagatctacttcgaaggaacaagggtcttgaggaagaggttcgccgattgcgtgaaagcctagggattagaagcaccggtcctagtcttccttacgagtcttcatacagctccagttcacagccatctccctttgctcattctactacaccagactaccccgctgtgtcggatctatctccttatagcagcgtgccggatacgacagatgtatggccgtcgtctgtaccatgctctgtgccatcaacagtttctagcccttcttcgtccggtgccacagaagactttggaagcaattatctaccaaccagtatgccatcaacaaatatgcttgaaagatcaagcataccgccagtaatgaactctcccactgtgtcttgcatgagcggcgatatgggatacgacaatgtcaagtctggtaaatactctccctggcttgttgatgaagcagagctgaggtctaatcagctgtttctagaatttggatgccctccccaggtgggaatcgtgccaatcactcctccatacagtcacccgccatggaacatgtacccaatgtactaccgagcctccccagcggcaatgtgaatcagcgccctggtctctcgtactttgagactcctgttttgacgttaaacgcctcttgtcaaaacgatgcgttgatattgggatatatcgctgactgtcgacgcttgatgaacatgtctggcaatcctccgcatcgagaggtcattctaggcccccagcacccaaacattcggccactactccatgagcatacaaatctcatacagatgcttggcttgcaaccacatccgttgcaaacccctgcatcccaccctgttgttgatttgataatatcaatatttgacaatgtacatttaagactacccttggaacgcatcgggtgctttatgctgttccaagggttgatcgcgtggttagtgcaaccaagtcgagagacatatatcggattgagagattttctacctcctcagttcatacagcagactacagcacatcctcaatggatggactttgtcatatggcctcgactgcggacagcacttatacagagacagagcatatatgacaatgacgagtttcgtcgtatttactgcgaaaatttacgcctcgagaactggtctggtactatttccgacgcgttcacggttgacttttctacgggttcaatatacgcaactgataacttcgtcggacatgtgtggggtttacaaaactgggcaattcatgaaaacttcgttcggcgttatcctgaactaaaatctttcattgggcgggtggctgggtcggatgggcaagacttgtaggtcattccactggcgttttagaatttggttatttacggaaaccggatataaggaatgggagcttgcaggtggacagcaaaccaaagggtatgataccatgtaaaaaacggcgttatgtacccttactacaggatatgattttttttacacatttagacatccaatacatgagctaatggaaacagtccaatcgtgctactgtcagttccgtctttacactctgtgcttacaacagatttgcaattttatttcgtaacctcctcaaatcgacaagacaacccctctcgttaggatctctttaattacatatttgattgcgcccatatagtctttagacattctctcatatcttcgacgatcgagtcaagatctgtagtacgtctccgcagacagccaaggaatgtggtgttggcgaatggaaatagtcgcatttcatcacaataccctaccaaagaccattttatgacaccctccacaagagctccgtgctctgtagtctcagggtaactagcgggcaccaaatctctgtcgtcgtcagggtcgctggccaagatttttagcgaggacccgagaaactcttcggtctggctctgcgctcttaggcgagtacctcgaaaacgaatggggaggtatcgcgtcttcactagcgtagtatggaacctactcctcaacaaagccgatagtcaacaatggtgaggtagctagctatgagggaattctcacactgcctggttcggcgattacactatgtagtatcgaacagggaggattctgccatgctcggtgcttcggcaagaagatgtgcagacgaattatacaagaaacagaaacttgc

SEQ ID NO: 744 - DNA, 1050 bp, Muscodor strobelii
  misc_feature: SGI cDNA ID NO. 559826
  misc_feature: Encodes the peptide sequence at SEQ ID NO 745
atgttattgtcaaaatcaattatagcggccttggtggtgggagtcgcagctctgaaaccatggacggattgggaacacggccgggttacgcttgaagatgtttcaattcactaccgctatgcaggctccggcccaccacttctgcttctacacggaactcctcaatacagtctggcatggcaatggatgggtccaattctcgctgaaaactatacagtgattgcacctgacaatcgcggatgtggtgacagcagcatcccgtcaagcgggaactattccgcgacggcgtccgctgctgatctcaaagggcttctggacttcttgaacatcacgtcaacatacgtattctcgcatgataagggcgtgggtcctgcgacggcgttggcgatccagcacccaggtctagtgaaacggctaggagtctcggagtttttgtaccccggattcggatacgaagcgaactctgcacctgctccgttcgttgacgtgtatgggaattctcaattggcattcttgtatatcgcggatctggctgagctctttctccgtgaccgtgagaaacagtttgttgagtggtattattatcacggtagttactctggcccgttgtctatcagtgaggacaccgtcaatcaatacgccaccagtttacgcaagcctggatttctgagagccctgttcggaccgtttagtggagagagcattgctgcggacaatagcttcttcacgggtacacttgggcttaagaagctggatatacccacccttggtctaggcggtgaggcgagtctaggcatttcagcactactggagcaagtcttcggaccacttttcagtgatctcgagctagacatagtgccccaggcgggtcactggatcggtgacgagaatccatcatggaccgcgaatcgtattgtccagttcctggctaatgatagcaccccactgcccgatatcgatttatcctacctcaagaacaaggtcactttgaaggttggcttatatggaacataccgaaatgcggagttggcaggtttcaagttcaactaa

SEQ ID NO: 745 - protein, 349 aa, Muscodor strobelii
  misc_feature: SGI Peptide ID NO. 559826
  misc_feature (71)..(307): Pfam Id: PF00561 Pfam Desc: alpha/beta hydrolase fold
  misc_feature (71)..(139): Pfam Id: PF00561 Pfam Desc: alpha/beta hydrolase fold
  misc_feature (2)..(343): NCBI GI: 242773412 Blast Desc: hydrolase, [Talaromyces stipitatus ATCC 10500] gi|218721854|gb|EED21272.1| hydrolase, [Talaromyces stipitatus ATCC 10500]
  misc_feature (8)..(343): NCBI GI: 46124175 Blast Desc: FG06465.1 [Gibberella zeae PH-1]
  misc_feature (8)..(343): NCBI GI: 256728344 Blast Desc: NECHADRAFT_87675 [Nectria haematococca mpVI 77-13-4]
  misc_feature (17)..(297): NCBI GI: 171685444 Blast Desc: protein product [Podospora anserina] gi|170942683|emb|CAP68336.1| protein product [Podospora anserina]
  misc_feature (115)..(308): NCBI GI: 256720321 Blast Desc: NECHADRAFT_18964 [Nectria haematococca mpVI 77-13-4]
  misc_feature (22)..(310): NCBI GI: 222081023 Blast Desc: alpha/beta hydrolase protein [Agrobacterium radiobacter K84] gi|221725702|gb|ACM28791.1| alpha/beta hydrolase protein [Agrobacterium radiobacter K84]
  misc_feature (34)..(309): NCBI GI: 90569595 Blast Desc: alpha/beta hydrolase family protein [Pseudomonas aeruginosa]
  misc_feature (22)..(311): NCBI GI: 222081044 Blast Desc: 3-oxoadipate enol-lactone hydrolase/4-carboxymuconolactone decarboxylase protein [Agrobacterium radiobacter K84] gi|221725723|gb|ACM28812.1| K84]
  misc_feature (27)..(311): NCBI GI: 256789315 Blast Desc: hydrolase [Streptomyces lividans TK24]
  misc_feature (31)..(310): NCBI GI: 218661683 Blast Desc: alpha/beta hydrolase fold protein [Rhizobium etli IE4771]
  misc_feature (22)..(310): SWISSPROT Homolog: EC 3.3.2.10 Soluble epoxide hydrolase
MLLSKSIIAALVVGVAALKPWTDWEHGRVTLEDVSIHYRYAGSGPPLLLLHGTPQYSLAWQWMGPILAENYTVIAPDNRGCGDSSIPSSGNYSATASAADLKGLLDFLNITSTYVFSHDKGVGPATALAIQHPGLVKRLGVSEFLYPGFGYEANSAPAPFVDVYGNSQLAFLYIADLAELFLRDREKQFVEWYYYHGSYSGPLSISEDTVNQYATSLRKPGFLRALFGPFSGESIAADNSFFTGTLGLKKLDIPTLGLGGEASLGISALLEQVFGPLFSDLELDIVPQAGHWIGDENPSWTANRIVQFLANDSTPLPDIDLSYLKNKVTLKVGLYGTYRNAELAGFKFN

SEQ ID NO: 746 - DNA, 298 bp, Muscodor strobelii
  misc_feature: SGI EST ID NO. CUFF.2092.0
  misc_feature: Variant of the nucleotide sequence at SEQ ID NO 744
aggcatttcagcactactggagcaagtcttcggaccacttttcagtgatctcgagctagacatagtgccccaggcgggtcactggatcggtgacgagaatccatcatggaccgcgaatcgtattgtccagttcctggctaatgatagcaccccactgcccgatatcgatttatcctacctcaagaacaaggtcactttgaaggttggcttatatggaacataccgaaatgcggagttggcaggtttcaagttcaactaatgcgcacgcaagtcatcgtgtagttgaagtatcccacag

SEQ ID NO: 747 - DNA, 369 bp, Muscodor strobelii
  misc_feature: SGI cDNA ID NO. 559827
  misc_feature: Reduced expression when VOC is produced
  misc_feature: Encodes the peptide sequence at SEQ ID NO 748
atgccttctttcactcagatcatctttgccctcaccgctacaggcagcgctctagcggtacccacattctcttcttccatcgccaaccggtcatctaccggtgatatgacctactacgaacctggactcggcgcctgtggctggacaaactcagactccgaaaacgtcgtcgcactatcaacggctgactacggcagcaactgcggcaagagtatcacaatcaccaaggacgggaagacagcacacgccaaggttgtcgacaagtgcccatcgtgtgcttccggatcaatcgacgtctcgtctaccgtgttctctcagctggctgatgaatcggtgggacggactactgtttcctggtcttttaactaa

SEQ ID NO: 748 - protein, 122 aa, Muscodor strobelii
  misc_feature: SGI Peptide ID NO. 559827
  misc_feature (56)..(119): Pfam Id: PF03330 Pfam Desc: Rare lipoprotein A (RlpA)-like double-psi beta-barrel
  misc_feature (7)..(121): NCBI GI: 156047950 Blast Desc: SS1G_08706 [Sclerotinia sclerotiorum 1980] gi|154693103|gb|EDN92841.1| SS1G_08706 [Sclerotinia sclerotiorum 1980]
  misc_feature (3)..(121): NCBI GI: 154291876 Blast Desc: BC1G_14954 [Botryotinia fuckeliana B05.10] gi|150846562|gb|EDN21755.1| BC1G_14954 [Botryotinia fuckeliana B05.10]
  misc_feature (33)..(121): NCBI GI: 170117527 Blast Desc: riboflavine-aldehyde-forming enzyme [Laccaria bicolor S238N-H82] gi|164635086|gb|EDQ99399.1| riboflavine-aldehyde-forming enzyme [Laccaria bicolor S238N-H82]
  misc_feature (30)..(121): NCBI GI: 71005388 Blast Desc: UM01213.1 [Ustilago maydis 521] gi|46096587|gb|EAK81820.1| UM01213.1 [Ustilago maydis 521]
  misc_feature (27)..(121): NCBI GI: 55700561 Blast Desc: riboflavin-aldehyde forming enzyme [Agaricus bisporus]
  misc_feature (27)..(121): NCBI GI: 55651507 Blast Desc: riboflavin aldehyde-forming enzyme [Agaricus bisporus]
  misc_feature (4)..(121): NCBI GI: 134118782 Blast Desc: CNBN0740 [Cryptococcus neoformans var. neoformans B-3501A] gi|50254498|gb|EAL17247.1| CNBN0740 [Cryptococcus neoformans var. neoformans B-3501A]
  misc_feature (26)..(121): NCBI GI: 170115242 Blast Desc: expansin family protein [Laccaria bicolor S238N-H82] gi|164636292|gb|EDR00589.1| expansin family protein [Laccaria bicolor S238N-H82]
  misc_feature (15)..(122): NCBI GI: 242209565 Blast Desc: [Postia placenta Mad-698-R] gi|242215881|ref|XP_002473752.1| [Postia placenta Mad-698-R] gi|220727147|gb|EED81076.1| [Postia placenta Mad-698-R] [Postia
  misc_feature (33)..(122): NCBI GI: 156059582 Blast Desc: SS1G_03803 [Sclerotinia sclerotiorum 1980] gi|154701590|gb|EDO01329.1| SS1G_03803 [Sclerotinia sclerotiorum 1980]
  misc_feature: Useful for introducing or modulating the production of volatile compounds
MPSFTQIIFALTATGSALAVPTFSSSIANRSSTGDMTYYEPGLGACGWTNSDSENVVALSTADYGSNCGKSITITKDGKTAHAKVVDKCPSCASGSIDVSSTVFSQLADESVGRTTVSWSFN

SEQ ID NO: 749 - DNA, 1119 bp, Muscodor strobelii
  misc_feature: SGI EST ID NO. CUFF.2097.0
  misc_feature: Variant of the nucleotide sequence at SEQ ID NO 747
gacaacgttcaaacatcactattatcaagtttagagcatggggaaagtgtacgtcgtggagatctttgactcaagtgagaggtccataatccatcacttggtgtcagttcacaatgaaatcaagtcagtacggggcccatcgtgcaggaaatttgcccaacccatcttgttataaatggtagcgatgagactctttggagacgagagaataatcaaacaatcccacattcgttgtcaacaacacaatcgctcaattgcagtcattacaggcagaacactccttgaattgcctcacaactatcgttagactcttcagtcaataataacacgatctctaccagatatacaatcgctccaacatcatttcgattacccgagtctcactctcaagccacaatcgttcaaacccgaccaagaatgccttctttcactcagatcatctttgccctcaccgctacaggcagcgctctagcggtacccacattctcttcttccatcgccaaccggtcatctaccggtgatatgacctactacgaacctggactcggcgcctgtggctggacaaactcagactccgaaaacgtcgtcgcactatcaacggctgactacggcagcaactgcggcaagagtatcacaatcaccaaggacgggaagacagcacacgccaaggttgtcgacaagtgcccatcgtgtgcttccggatcaatcgacgtctcgtctaccgtgttctctcagctggctgatgaatcggtgggacggactactgtttcctggtcttttaactaaatgatatgttcgaagtatcgacattcgcttcaaacacacactattactagacaactttctgaagcgcgggcgctttgcacataaaccgcgctgatgcggaaagggactgctctattctctgctgatcatgacacttatagcagatgcggagggatttagaggggagaataggactatagactactacatcatggatgagatacccagccagatttggcgtaatgcgctggacgcatggtgtcacatgctctttagctttacgtatataagatactattcgttgaagcaaccaaagattatccggatttcttgtttgtgactactgaatgaaaa

SEQ ID NO: 750 - DNA, 2556 bp, Muscodor strobelii
  misc_feature: SGI cDNA ID NO. 559828
  misc_feature: Encodes the peptide sequence at SEQ ID NO 751
atgtcttatggctcatttatcgccggcatacggcctcgggacgatggaactgatcaattccttaagttaattgccgatccattcaacacagagttgagcgaaaaagctttttggtcgtcgtttggctattcttttggtgccgcagtcttattcgccctcctgttctgtattcttcgcccacataatggcactgtttacgcgcctcggcttaagcacgctgatgccaaacacaaaccaccaccggtagagaaaggcgtgttcagctgggtcgagccagtcttgaagacgcgtgaacaagccctagcggagaagatcggccccgacgctacgttgttcctcagatttacacagatgtcgcggaacatgatggcagctcttgctctcgtcggttgcgccgtatacatccctctcaacatcgtcatgaacatgaggaataaggcgattgataatacgaatatcttcatcagcttaacccctctaggggtttggggatctgcttgttgggcacatgtttccgtctcatatgcgttcgatctgatcatctgctttttcatatggttcaattacaaagcagttgttcgcattcgacgtcaatattttgaaagtcctgagtaccaagaaagccttcattcaagaactctcatgatgacggatatccctcgggcgaaccgttctgatgctggggtctcacaaatcatcgatcaggttgacaacactcgaaactactcagaaatcattgcgcgtaatgtcaagggcctgtcagagcttatcgaagagcacgatgaggctgtccttgagcttgagtccgtcctcgccaagtatctaaagaatcctgacaaactaccgttgaaacgaccccagtgcaaaacgaagaaaaatgatcctgcatacagcgtgccaacgaaagtagatgctatcgattatctgacatcgcgaattgagcaactaaaatcggagattgtcgaaaagcggaaggcagttggagaacgtgatgctctcccatacggattcgtcagttatccgagtatcgacgaggctcatgaagtcgcttttgccgccaaaaacaagcatcctctaggcacaaccatcagactcgcaccaagaccaaatgatctgatctgggaaaacctacccttagacaagcatcggcgacgttggggcgctatcatgaataatttttggttcgctattctcactttaatctggactgttcccaacgcactgattgccgtcttccttgccaatctgagtaacttcggtgctctgtggccgacattcaaaactgaacttgagagagatcccaagacgtgggctgctatccaaggtattctggctcctatcgtcacaactttattctacatggttcttccggttatcttccgtcgcctctcggtgtatgctggcgattactcgaggactgctagggagcgtcatgttacccacaagctctatgcgtttttcgtcttcaataacctccttgtattttccctattctccactgcttggaagtacgggactgccgtcaaagccgcggagaaagatggcgatctttggcaagccattgtagagacggatccgtttggtaatctgttgtcaacgttttgtgatgtctctccgtttttcctcaattacctactccagcggaattttggagctgctttggatctatcacaactcatcaagctcgccacgggtttcttcgtgcgaaaattcaccagcccgacgccgagggaacttatcgcactcaccgcgccgccgcctttcgattactccaattactataatcagtttttgttctacacaacagtcgcattggtctttgccccattccaacctttggtgcttctcgttaccgcgttttacttcacactcgacacctatttgaagaaatatctgctgctttacgtgttcatcactaaacatgagagcggcggagctttctggagagtgctgatcaatagaatattgtttgctacccttctcggcaatatcgtgacgacaatattcattgtcgcgcgaaggagttcaattgttcaagtcatcctcatggctccgctgcttgttatcctcggcggcttcaagtggtactgccagcgcacattcgatgatagcctgcacttctactcccgaggtgtctcaagtgaagaaggtggtcacttatctaagaaggctaaaagtgatcgcgtcggtgtgaagtttggacacccggcattgtctaagaagcttctggtgcctatggtcaacgagaaagcccagcatctcctgagtgaaatatgttccgtcaattcgaacacagatttgacaccgacaaatagtcaaacagacaattatagactacaaaagctatcctcgaacagctctggaaagagcgcgtcgcaaaacccgaccagcgcattcgaggttgtcaacgaatcacagatgaacttcgagcacttccggaaccgcgaagaattccgccatgaattcggtggcgatgaaatgactcggaatatcacggaactaccacctaccccatgggatatcatcccgccacgggttacaggcctagcccattag

SEQ ID NO: 751 - protein, 851 aa, Muscodor strobelii
  misc_feature: SGI Peptide ID NO. 559828
  misc_feature (320)..(760): Pfam Id: PF02714 Pfam Desc: Domain of function DUF221
  misc_feature (320)..(664): Pfam Id: PF02714 Pfam Desc: Domain of function DUF221
  misc_feature (7)..(824): NCBI GI: 238843089 Blast Desc: DUF221 family protein [Microsporum canis CBS 113480]
  misc_feature (9)..(824): NCBI GI: 70999468 Blast Desc: DUF221 domain protein [Aspergillus fumigatus Af293] gi|66852090|gb|EAL92415.1| DUF221 domain protein, [Aspergillus fumigatus Af293] gi|159127470|gb|EDP52585.1| DUF221 domain A1163]
  misc_feature (13)..(838): NCBI GI: 238486732 Blast Desc: DUF221 domain protein, [Aspergillus flavus NRRL3357] gi|220699483|gb|EED55822.1| DUF221 domain protein, [Aspergillus flavus NRRL3357]
  misc_feature (13)..(838): NCBI GI: 115396482 Blast Desc: conserved [Aspergillus terreus NIH2624] gi|114193449|gb|EAU35149.1| conserved [Aspergillus terreus NIH2624]
  misc_feature (23)..(825): NCBI GI: 189205192 Blast Desc: PTRG_08599 [Pyrenophora tritici-repentis Pt-1C-BFP] gi|187986030|gb|EDU51518.1| PTRG_08599 [Pyrenophora tritici-repentis Pt-1C-BFP]
  misc_feature (8)..(824): NCBI GI: 121705808 Blast Desc: DUF221 domain protein, [Aspergillus clavatus NRRL 1] gi|119399313|gb|EAW09741.1| DUF221 domain protein, [Aspergillus clavatus NRRL 1]
  misc_feature (13)..(824): NCBI GI: 255936589 Blast Desc: Pc13g08960 [Penicillium chrysogenum Wisconsin 54-1255] gi|211583941|emb|CAP91965.1| Pc13g08960 [Penicillium chrysogenum Wisconsin 54-1255]
  misc_feature (9)..(824): NCBI GI: 119491554 Blast Desc: NFIA_065650 [Neosartorya fischeri NRRL 181] gi|119411458|gb|EAW21401.1| conserved [Neosartorya fischeri NRRL 181]
  misc_feature (14)..(824): NCBI GI: 145233015 Blast Desc: An02g07460 [Aspergillus niger] gi|134056802|emb|CAK37710.1| protein product [Aspergillus niger]
  misc_feature (4)..(824): NCBI GI: 225556508 Blast Desc: DUF221 domain-containing protein [Ajellomyces capsulatus G186AR]
MSYGSFIAGIRPRDDGTDQFLKLIADPFNTELSEKAFWSSFGYSFGAAVLFALLFCILRPHNGTVYAPRLKHADAKHKPPPVEKGVFSWVEPVLKTREQALAEKIGPDATLFLRFTQMSRNMMAALALVGCAVYIPLNIVMNMRNKAIDNTNIFISLTPLGVWGSACWAHVSVSYAFDLIICFFIWFNYKAVVRIRRQYFESPEYQESLHSRTLMMTDIPRANRSDAGVSQIIDQVDNTRNYSEIIARNVKGLSELIEEHDEAVLELESVLAKYLKNPDKLPLKRPQCKTKKNDPAYSVPTKVDAIDYLTSRIEQLKSEIVEKRKAVGERDALPYGFVSYPSIDEAHEVAFAAKNKHPLGTTIRLAPRPNDLIWENLPLDKHRRRWGAIMNNFWFAILTLIWTVPNALIAVFLANLSNFGALWPTFKTELERDPKTWAAIQGILAPIVTTLFYMVLPVIFRRLSVYAGDYSRTARERHVTHKLYAFFVFNNLLVFSLFSTAWKYGTAVKAAEKDGDLWQAIVETDPFGNLLSTFCDVSPFFLNYLLQRNFGAALDLSQLIKLATGFFVRKFTSPTPRELIALTAPPPFDYSNYYNQFLFYTTVALVFAPFQPLVLLVTAFYFTLDTYLKKYLLLYVFITKHESGGAFWRVLINRILFATLLGNIVTTIFIVARRSSIVQVILMAPLLVILGGFKWYCQRTFDDSLHFYSRGVSSEEGGHLSKKAKSDRVGVKFGHPALSKKLLVPMVNEKAQHLLSEICSVNSNTDLTPTNSQTDNYRLQKLSSNSSGKSASQNPTSAFEVVNESQMNFEHFRNREEFRHEFGGDEMTRNITELPPTPWDIIPPRVTGLAH

SEQ ID NO: 752 - DNA, 3782 bp, Muscodor strobelii
  misc_feature: SGI EST ID NO. CUFF.2110.2
  misc_feature: Variant of the nucleotide sequence at SEQ ID NO 750
cgaggctcgaaaatcggccggccctattttcctcttgcaatttttgtaattcattcactaccgtcatcatccctagaagccacgctttgatagagctcgtatatgtctacataaaccttgaatacaaagcatgtcttatggctcatttatcgccggcatacggcctcgggacgatggaactgatcaattccttaagttaattgccgatccattcaacacagagttgagcgaaaaagctttttggtcgtcgtttggctattcttttggtgccgcagtcttattcgccctcctgttctgtattcttcgcccacataatggcactgtttacgcgcctcggcttaagcacgctgatgccaaacacaaaccaccaccggtagagaaaggcgtgttcagctgggtcgagccagtcttgaagacgcgtgaacaagccctagcggagaagatcggccccgacgctacgttgttcctcagatttacacagatgtcgcggaacatgatggcagctcttgctctcgtcggttgcgccgtatacatccctctcaacatcgtcatgaacatgaggaataaggcgattgataatacgaatatcttcatcagcttaacccctctaggggtttggggatctgcttgttgggcacatgtttccgtctcatatgcgttcgatctgatcatctgctttttcatatggttcaattacaaagcagttgttcgcattcgacgtcaatattttgaaagtcctgagtaccaagaaagccttcattcaagaactctcatgatgacggatatccctcgggcgaaccgttctgatgctggggtctcacaaatcatcgatcaggttgacaacactcgaaactactcagaaatcattgcgcgtaatgtcaagggcctgtcagagcttatcgaagagcacgatgaggctgtccttgagcttgagtccgtcctcgccaagtatctaaagaatcctgacaaactaccgttgaaacgaccccagtgcaaaacgaagaaaaatgatcctgcatacagcgtgccaacgaaagtagatgctatcgattatctgacatcgcgaattgagcaactaaaatcggagattgtcgaaaagcggaaggcagttggagaacgtgatgctctcccatacggattcgtcagttatccgagtatcgacgaggctcatgaagtcgcttttgccgccaaaaacaagcatcctctaggcacaaccatcagactcgcaccaagaccaaatgatctgatctgggaaaacctacccttagacaagcatcggcgacgttggggcgctatcatgaataatttttggttcgctattctcactttaatctggactgttcccaacgcactgattgccgtcttccttgccaatctgagtaacttcggtgctctgtggccgacattcaaaactgaacttgagagagatcccaagacgtgggctgctatccaaggtattctggctcctatcgtcacaactttattctacatggttcttccggttatcttccgtcgcctctcggtgtatgctggcgattactcgaggactgctagggagcgtcatgttacccacaagctctatgcgtttttcgtcttcaataacctccttgtattttccctattctccactgcttggaagtacgggactgccgtcaaagccgcggagaaagatggcgatctttggcaagccattgtagagacggatccgtttggtaatctgttgtcaacgttttgtgatgtctctccgtttttcctcaattacctactccagcggaattttggagctgctttggatctatcacaactcatcaagctcgccacgggtttcttcgtgcgaaaattcaccagcccgacgccgagggaacttatcgcactcaccgcgccgccgcctttcgattactccaattactataatcagtttttgttctacacaacagtcgcattggtctttgccccattccaacctttggtgcttctcgttaccgcgttttacttcacactcgacacctatttgaagaaatatctgctgctttacgtgttcatcactaaacatgagagcggcggagctttctggagagtgctgatcaatagaatattgtttgctacccttctcggcaatatcgtgacgacaatattcattgtcgcgcgaaggagttcaattgttcaagtcatcctcatggctccgctgcttgttatcctcggcggcttcaagtggtactgccagcgcacattcgatgatagcctgcacttctactcccgaggtgtctcaagtgaagaaggtggtcacttatctaagaaggctaaaagtgatcgcgtcggtgtgaagtttggacacccggcattgtctaagaagcttctggtgcctatggtcaacgagaaagcccagcatctcctgagtgaaatatgttccgtcaattcgaacacagatttgacaccgacaaatagtcaaacagacaattatagactacaaaagctatcctcgaacagctctggaaagagcgcgtcgcaaaacccgaccagcgcattcgaggttgtcaacgaatcacagatgaacttcgagcacttccggaaccgcgaagaattccgccatgaattcggtggcgatggtgagctatacggacagccctctgatatttcaagatcaagcacacccacctcttggcaccgttccagatccaactcgagcgtttcgtcgttgcgtaatgcggagatcagaaatgactcggaatatcacggaactaccacctaccccatgggatatcatcccgccacgggttacaggcctagcccattagctcgtacggaatcagagggttctaccgagttcccactatcctcgagcgatgttcacagtctgtcaaatgtaaatctactcgatgacactaagtcgaaaagcccaccaagtaggagagacacatatagatgattcaagcgcgcgagcgagttacttgtattactagagagcaaaatggaaggaaatagaccttttcatgtattagataccctacaatcgaagtattagagcgaaatttcgcagaatacgcggcctggccaagtacgctatcgctagtgacttgacaactacccagcacgattgaggaaggggagaaaatgtttcttgttcacgtgtcttctcctaggactcatgtgacatttccacgatgtggtttgaagttctgtagtcctagtaggctctggaggttgactgcaatccactttgtaaatacccccctttaacaagaaacactagtcatagacttatcgatccccgccgctagttcgatgacagaattgtccgtccgtttcattaacaatccctccgtggtccagactcgatctgcacagctatgggaaaacttgcagatcgcaacatcaactatctggtcagcaacttttaccgattactgggcccggatttgaacactctccataccagtaaaacattatctatcgacgacatctatgaatgctaattagaagctgtagctacaaggacgatttcgtcacaagcacctaagatgtatctatctgttgtctaaatgatcgagcgtagatatcaaatcgactaaactagcctcccgacgaaacataggacagctttgcgtgggtattactgcattttgaatcaggcaagctgccacgattttttttccgaaaagactagacgatataagcttattcataataacattattgttgaagataaagttttagggataagggtgtacgacctcgaaaaggaaggccgatgcgtgtcggttttcattgataacagcctggcg

SEQ ID NO: 753 - DNA, 1401 bp, Muscodor strobelii
  misc_feature: SGI cDNA ID NO. 559829
  misc_feature: Encodes the peptide sequence at SEQ ID NO 754
atgtcccgcgacgacggcgccatcatcgccggtgggcccaaaagtcgctcgcagtcgcagtcgcattcacattcaccatactcacactcgcgctccaagtcgcatcccgtcgtgtcgctatcgcagtctcgcgtcgaccatcgtcgctccatccagtctcacaagcagaagcagcagcagaagaacaacggcaccaacggcactgtgctcgaagagactatgcagcgcctcgtcgagtccctacccgacacggtgctgagccgcatcttcagcgatcccgagctctccctcagcgatctggccagcgtctcctgcgtcaataagaagtggcatgacctcgccgactcggtgctgtacaaggaggtgcgctttggcaagcccgagcagcacctcgtcttcggcgactcgctgcagcgccgcgtgcgtcggggctccatcatcgagttcgccagcctgcagtaccccaagggcgagctggcgcacctgagcctcaacggccacgtcgagaactcgcactactcgccctcgcacttcgacagcctgtcgcgctccatctccaccatgtccaacctgcaggagctggagatctccgtgcccgactccatgctgcacggcatcggcgccctgttcaacggccccttcgacctcgcctgtctgaagtcgtgcagcctgttctaccagaccaccgacgattcctactgggatctccgcgagaacatccacatcttcgcgcacccttcgctcgagacgctatacatccgcagggcccggctggactaccgcggcttcgacattctggagcgcccacacgagcttcccctcaagaagctgcatttcatcgaatgcgacattagtgatgacgcccttggtgaccttcttgagctgccagccggtctggaggagttcgtcatgacgcagcgcgccgatccaagccccgagctagacgagagttccgataacatgggcgactacatcgtcgctctctcatcacagtccgaatcattaaagacaatcaccatggatttccctactttaggcagcagacggcctttacgcatgcgcgactttgaagctttgaagaccttccgtctcaactgggactggcagctcttcggcaagaagaagggccctcgacttgattccatgggcgtcccgcctaatctcgagactcttgagttcttcaacgagcttggaacagacgaggaggcgaccgagctactggactatctcatgcagaccagcaatgtcatggccaaggcagtcaaaagtgtcgacccatcgactccatcaacgacaagctcgtgcatgctcgcctcgtccctccgcaccctcgcccgggagcctactgcctcgagttggaggtcgactgaaagccacatcttttcaactgcacatatataa

SEQ ID NO: 754 - protein, 466 aa, Muscodor strobelii
  misc_feature: SGI Peptide ID NO. 559829
  misc_feature (76)..(125): Pfam Id: PF00646 Pfam Desc: F-box domain
  misc_feature (60)..(442): NCBI GI: 261356297 Blast Desc: conserved [Verticillium albo-atrum VaMs.102]
  misc_feature (81)..(424): NCBI GI: 169620980 Blast Desc: SNOG_13693 [Phaeosphaeria nodorum SN15] gi|160704145|gb|EAT79140.2| SNOG_13693 [Phaeosphaeria nodorum SN15]
  misc_feature (58)..(424): NCBI GI: 39951515 Blast Desc: MGG_01400 [Magnaporthe grisea 70-15] gi|145020768|gb|EDK04897.1| MGG_01400 [Magnaporthe grisea 70-15]
  misc_feature (78)..(424): NCBI GI: 256730019 Blast Desc: NECHADRAFT_82591 [Nectria haematococca mpVI 77-13-4]
  misc_feature (81)..(424): NCBI GI: 189200953 Blast Desc: conserved [Pyrenophora tritici-repentis Pt-1C-BFP] gi|187983912|gb|EDU49400.1| conserved [Pyrenophora tritici-repentis Pt-1C-BFP]
  misc_feature (77)..(424): NCBI GI: 46139275 Blast Desc: FG11152.1 [Gibberella zeae PH-1]
  misc_feature (206)..(391): NCBI GI: 169615739 Blast Desc: SNOG_11032 [Phaeosphaeria nodorum SN15] gi|111060411|gb|EAT81531.1| SNOG_11032 [Phaeosphaeria nodorum SN15]
  misc_feature (81)..(365): NCBI GI: 238485814 Blast Desc: conserved [Aspergillus flavus NRRL3357] gi|220699024|gb|EED55363.1| conserved [Aspergillus flavus NRRL3357]
  misc_feature (204)..(360): NCBI GI: 67901938 Blast Desc: AN7956.2 [Aspergillus nidulans FGSC A4] gi|40740420|gb|EAA59610.1| [Aspergillus nidulans FGSC A4] gi|259480705|tpe|CBF73594.1| TPA: conserved [Aspergillus nidulans
MSRDDGAIIAGGPKSRSQSQSHSHSPYSHSRSKSHPVVSLSQSRVDHRRSIQSHKQKQQQKNNGTNGTVLEETMQRLVESLPDTVLSRIFSDPELSLSDLASVSCVNKKWHDLADSVLYKEVRFGKPEQHLVFGDSLQRRVRRGSIIEFASLQYPKGELAHLSLNGHVENSHYSPSHFDSLSRSISTMSNLQELEISVPDSMLHGIGALFNGPFDLACLKSCSLFYQTTDDSYWDLRENIHIFAHPSLETLYIRRARLDYRGFDILERPHELPLKKLHFIECDISDDALGDLLELPAGLEEFVMTQRADPSPELDESSDNMGDYIVALSSQSESLKTITMDFPTLGSRRPLRMRDFEALKTFRLNWDWQLFGKKKGPRLDSMGVPPNLETLEFFNELGTDEEATELLDYLMQTSNVMAKAVKSVDPSTPSTTSSCMLASSLRTLAREPTASSWRSTESHIFSTAHI

SEQ ID NO: 755 - DNA, 2552 bp, Muscodor strobelii
  misc_feature: SGI EST ID NO. CUFF.2192.0
  misc_feature: Variant of the nucleotide sequence at SEQ ID NO 753
ctggctggtaacattgagaaaggaggctcaaataccgatgcaacaccaatatcgggggtgacggagcgtcgcatcgtcgcacattattttagactatcacatgcaagcaaaatccccccacgcctactaaatgcgactctgacgtgcgaaattttcaaacctttgaaagctggaaagagcagccttgacagccctgcaaaacccccgtgccttccttcgtcgcatgctctttatcatagcattgatgaaattcttgtggtaataggatgattttaattaggtctggatacaattctccacaatgttaggtttcgcctggtctgcatgtccttaattaaacctccgaaagcaacacgacttaagtaggcggtcgcttgcagacgcatctgttttgcattccaccgccttgcgataaaacaaagtccattgtccacatgcacaatacgagtgcacgccaaacgcacctctttgacgctagcgactggaatcagagggaatgaagcttaaatcgagtccccccagtcgcgtctctctgcgcgcataggacgatccaccgctgaatgcaaaacaagggcagctgagcgagtcgatgaggccacttccacttgccgaccctgttcctgaccagattccggagtaatccaaattaaatctgaccagaacccgcacaaagcccactgccgcccactgcgtcccaacttccccagatccaccatcccactctccgccgacgaagcgacacgatcgctgcagcctgccatcatgtcccgcgacgacggcgccatcatcgccggtgggcccaaaagtcgctcgcagtcgcagtcgcattcacattcaccatactcacactcgcgctccaagtcgcatcccgtcgtgtcgctatcgcagtctcgcgtcgaccatcgtcgctccatccagtctcacaagcagaagcagcagcagaagaacaacggcaccaacggcactgtgctcgaagagactatgcagcgcctcgtcgagtccctacccgacacggtgctgagccgcatcttcagcgatcccgagctctccctcagcgatctggccagcgtctcctgcgtcaataagaagtggcatgacctcgccgactcggtgctgtacaaggaggtgcgctttggcaagcccgagcagcacctcgtcttcggcgactcgctgcagcgccgcgtgcgtcggggctccatcatcgagttcgccagcctgcagtaccccaagggcgagctggcgcacctgagcctcaacggccacgtcgagaactcgcactactcgccctcgcacttcgacagcctgtcgcgctccatctccaccatgtccaacctgcaggagctggagatctccgtgcccgactccatgctgcacggcatcggcgccctgttcaacggccccttcgacctcgcctgtctgaagtcgtgcagcctgttctaccagaccaccgacgattcctactgggatctccgcgagaacatccacatcttcgcgcacccttcgctcgagacgctatacatccgcagggcccggctggactaccgcggcttcgacattctggagcgcccacacgagcttcccctcaagaagctgcatttcatcgaatgcgacattagtgatgacgcccttggtgaccttcttgagctgccagccggtctggaggagttcgtcatgacgcagcgcgccgatccaagccccgagctagacgagagttccgataacatgggcgactacatcgtcgctctctcatcacagtccgaatcattaaagacaatcaccatggatttccctactttaggcagcagacggcctttacgcatgcgcgactttgaagctttgaagaccttccgtctcaactgggactggcagctcttcggcaagaagaagggccctcgacttgattccatgggcgtcccgcctaatctcgagactcttgagttcttcaacgagcttggaacagacgaggaggcgaccgagctactggactatctcatgcagaccagcaatgtcatggccaaggcagtcaaaagtgtcgacccatcgactccatcaacgacaagctcgtgcatgctcgcctcgtccctccgcaccctcgcccgggagcctactgcctcgagttggaggtcgactgaaagccacatcttttcaactgcacatatataacccattacattacattttgcttttcttttgtctgacaaatcatggccctggagttctatatcatttgcatttttcttgtgttcaaccacggggtggttatggttacaaacggtgtgaaggtttacaggatgcaaaaaagcctacatcggatgaataggctcaccatagactggattagatatgagacggtcacagcgggtagaacgagtaactacctgtttacagtacaggacacacaaccattaggtatagaggggatagcactatacaggaaaggaaaggagtcatgtcatacagtaaagcgtccacaggattaaggacgacagatcttgataatcaatacaagatgttttgatgactgaactgaacgtatcaggcgtaacattctg

SEQ ID NO: 756 - DNA, 990 bp, Muscodor strobelii
  misc_feature: SGI cDNA ID NO. 559830
  misc_feature: Reduced expression when VOC is produced
  misc_feature: Encodes the peptide sequence at SEQ ID NO 757
atgtcttccgccgacgaggtcgtcattgacccccagaccatcaaggagctgcacctccttgaggccgccatctcggacatcgacaccgaggtcacagccaagcagtacctcatgacgcgcgacatcttcgccgcccgccagaagaccatcgccaagatccccagcttctgggctgtgaccttcgacaattccgccaccgagctcgaggccgccgtcacccccaatgacctcaagatcttcagcagcgccctgacctccgtcgaagtcacccgccccgaggtgcccgcctcggccaaggcctctgacatgggtatcgagaaattcggcgagccccgctcccttcagttcactttccgcttcgcagacaacgagtggatcgccgacaaggagctcgtcaagaccttctatttccgctacggcaaggacggcagcgctggcctcgtctcggagcccatcaagatcaactggaagagccccgacaaggaccaaacccagggactcagcgacgctgctctagccttctggaacgcccagaagggcaacgcttcccagcagctcgagggcgtcctcaacaacgaggcacgccacgcccgcgacgccgccgccaaagagatgcctgagtacaaggccctcgccaagaagctcgaggacaacgtcgccggcgctctctccttcttcaacttcttctcctaccgtggccgctggatcagcgccgccgagcacgccgaggccaagaccgagctccttgccaagcgcaaggctgcccaggctggtcaggacatggacgaggatgaggatgatgaggatgatgacgacgaggacttcaccgaggaggccgtcgagaccttccccgctggtcatgaagtcgctgttaccctcgctgaagatatctatcctaacgcgatcgattacttcatgggcaacaccatcgattccgacatcgacctcgacgaagacgatgaggacgaggatgaggagatggaaggttaa

SEQ ID NO: 757 - protein, 329 aa, Muscodor strobelii
  misc_feature: SGI Peptide ID NO. 559830
  misc_feature (1)..(306): NCBI GI: 39969309 Blast Desc: MGG_10265 [Magnaporthe grisea 70-15] gi|145012004|gb|EDJ96660.1| MGG_10265 [Magnaporthe grisea 70-15]
  misc_feature (1)..(240): NCBI GI: 149211137 Blast Desc: MGCH7_ch7g1031 [Magnaporthe grisea 70-15] gi|86196986|gb|EAQ71624.1| MGCH7_ch7g1031 [Magnaporthe grisea 70-15]
  misc_feature (13)..(314): NCBI GI: 256731305 Blast Desc: NECHADRAFT_105263 [Nectria haematococca mpVI 77-13-4]
  misc_feature (13)..(305): NCBI GI: 171694075 Blast Desc: protein product [Podospora anserina] gi|170946986|emb|CAP73790.1| protein product [Podospora anserina]
  misc_feature (13)..(313): NCBI GI: 46125999 Blast Desc: FG07377.1 [Gibberella zeae PH-1]
  misc_feature (13)..(306): NCBI GI: 145607137 Blast Desc: MGG_04016 [Magnaporthe grisea 70-15] gi|145014738|gb|EDJ99306.1| MGG_04016 [Magnaporthe grisea 70-15]
  misc_feature (42)..(308): NCBI GI: 189207100 Blast Desc: NAP family protein [Pyrenophora tritici-repentis Pt-1C-BFP] gi|187975977|gb|EDU42603.1| NAP family protein [Pyrenophora tritici-repentis Pt-1C-BFP]
  misc_feature (14)..(328): NCBI GI: 255955833 Blast Desc: Pc21g16630 [Penicillium chrysogenum Wisconsin 54-1255] gi|211590380|emb|CAP96560.1| Pc21g16630 [Penicillium chrysogenum Wisconsin 54-1255]
  misc_feature (11)..(305): NCBI GI: 156052581 Blast Desc: SS1G_06457 [Sclerotinia sclerotiorum 1980] gi|154704236|gb|EDO03975.1| SS1G_06457 [Sclerotinia sclerotiorum 1980]
  misc_feature (1)..(305): NCBI GI: 85101245 Blast Desc: NCU03769 [Neurospora crassa OR74A] gi|16944623|emb|CAD11393.1| related to phosphatase 2a inhibitor [Neurospora crassa] gi|28922654|gb|EAA31879.1| conserved crassa
  misc_feature: Useful for introducing or modulating the production of volatile compounds
MSSADEVVIDPQTIKELHLLEAAISDIDTEVTAKQYLMTRDIFAARQKTIAKIPSFWAVTFDNSATELEAAVTPNDLKIFSSALTSVEVTRPEVPASAKASDMGIEKFGEPRSLQFTFRFADNEWIADKELVKTFYFRYGKDGSAGLVSEPIKINWKSPDKDQTQGLSDAALAFWNAQKGNASQQLEGVLNNEARHARDAAAKEMPEYKALAKKLEDNVAGALSFFNFFSYRGRWISAAEHAEAKTELLAKRKAAQAGQDMDEDEDDEDDDDEDFTEEAVETFPAGHEVAVTLAEDIYPNAIDYFMGNTIDSDIDLDEDDEDEDEEMEG

SEQ ID NO: 758 - DNA, 1563 bp, Muscodor strobelii
  misc_feature: SGI cDNA ID NO. 559831
  misc_feature: Encodes the peptide sequence at SEQ ID NO 759
atgagttccatgttcccgtctattcagtccttctactctcgcgaaatcccagcctccgacagagatggagacccttcaaacgctgctactgctggtgatgggttcacgtcctccgagatccaagcagtcacgaaccctctctcgcgaactttcgtgcctgggagggaatacgagcaatgcctgattgctgaacttcaaagtggaatctataactacgaaataactgggcgactcatcagctactcatcgtctggtggccctcaacatgtacctcctagcgctggggggtatttctttctcgtgatcagcgatggtactggtgcattagcgatcaagctgttttgcaatccatccgagtgtaaaccagtgctgggacagcgtatcacactttggaccacctccatatccactggcaacaaggcagagatcggtagcataccattctgctcatcagcaactaccatctatcctagacgcaacggcgctacccatatcatctttcacgtagatgtgcctggttcagaatatgaccaaatcctacgctttccccttgacgtgaacagcagccaagacaaggttctcggtctaatgacgctaaggtcgttcttgctgagtggctatgatgacggtcaaggtaagattctagtttgtgttaggagtgctgggccacgcagaaccttcaattcgaagaaacgggaggcgccctatgaactcgtcgaggttggcgttttcgacgacacctcgagttgtgttttgaagctttggggtgaccaaactgcttcttcaaagctgtggcatccaagtcataccattctcctcatatcaaaaccgttatttcggaagaatgacttcttaagtcgtggagaggatatcaagggcgatcttagcttgaaatacgacactctcgtatacgtggatcccgatattcctgatagccgttggcttcgctcgaaagttcaagatatgaagaaaagaacgatggtcgtgacgcctttcccttccgatacgtgggatctggaacaagtaatcaatggcactaacagaacactgtatacaatcgcagaggtagatgagcatgttcggtctcaacaaccgcccaccgatttcacgggtaaactcaacgtcgtagttcgcgagatgaatatcctgaagaacaagcgagagaacaagctttgttgtatcgaatgttgcggcataccacttttcgcgaacaatgttgtagccacgtgcatccattgcgatacgcgccgcgagctcctactcaatccctctatactaggctccgtgatcgacgaaagcggaatgatgactggaggcgagctcgtctggaacgatcaagcctggactcatttcttcatgaagccatccacacaacaagactgcccagccgcgggtggaagctcggaaatagtagaacaggaagagtcgtggaaagatcttatccgatacgacaatgaccatttgcgcgacactgaagactggcttctgtactctcgagtcacgcttacgtttggctggtccgttgcccttggcagactctgcattctcgacgcagaatggtga

SEQ ID NO: 759 - protein, 520 aa, Muscodor strobelii
  misc_feature: SGI Peptide ID NO. 559831
  misc_feature (7)..(515): NCBI GI: 189198888 Blast Desc: conserved [Pyrenophora tritici-repentis Pt-1C-BFP] gi|187982880|gb|EDU48368.1| conserved [Pyrenophora tritici-repentis Pt-1C-BFP]
  misc_feature (4)..(395): NCBI GI: 28950115 Blast Desc: [Neurospora crassa]
  misc_feature (32)..(461): NCBI GI: 154294984 Blast Desc: BC1G_13358 [Botryotinia fuckeliana B05.10] gi|150844487|gb|EDN19680.1| BC1G_13358 [Botryotinia fuckeliana B05.10]
  misc_feature (36)..(452): NCBI GI: 156065999 Blast Desc: SS1G_01010 [Sclerotinia sclerotiorum 1980] gi|154691869|gb|EDN91607.1| SS1G_01010 [Sclerotinia sclerotiorum 1980]
  misc_feature (25)..(515): NCBI GI: 169614135 Blast Desc: SNOG_10203 [Phaeosphaeria nodorum SN15] gi|160707284|gb|EAT82538.2| SNOG_10203 [Phaeosphaeria nodorum SN15]
  misc_feature (154)..(395): NCBI GI: 171692035 Blast Desc: protein product [Podospora anserina] gi|170945966|emb|CAP72767.1| protein product [Podospora anserina]
  misc_feature (197)..(403): NCBI GI: 261351810 Blast Desc: conserved [Verticillium albo-atrum VaMs.102]
  misc_feature (105)..(517): NCBI GI: 258573193 Blast Desc: [Uncinocarpus reesii 1704] gi|237901044|gb|EEP75445.1| [Uncinocarpus reesii 1704]
  misc_feature (66)..(364): NCBI GI: 238845332 Blast Desc: [Microsporum canis CBS 113480]
MSSMFPSIQSFYSREIPASDRDGDPSNAATAGDGFTSSEIQAVTNPLSRTFVPGREYEQCLIAELQSGIYNYEITGRLISYSSSGGPQHVPPSAGGYFFLVISDGTGALAIKLFCNPSECKPVLGQRITLWTTSISTGNKAEIGSIPFCSSATTIYPRRNGATHIIFHVDVPGSEYDQILRFPLDVNSSQDKVLGLMTLRSFLLSGYDDGQGKILVCVRSAGPRRTFNSKKREAPYELVEVGVFDDTSSCVLKLWGDQTASSKLWHPSHTILLISKPLFRKNDFLSRGEDIKGDLSLKYDTLVYVDPDIPDSRWLRSKVQDMKKRTMVVTPFPSDTWDLEQVINGTNRTLYTIAEVDEHVRSQQPPTDFTGKLNVVVREMNILKNKRENKLCCIECCGIPLFANNVVATCIHCDTRRELLLNPSILGSVIDESGMMTGGELVWNDQAWTHFFMKPSTQQDCPAAGGSSEIVEQEESWKDLIRYDNDHLRDTEDWLLYSRVTLTFGWSVALGRLCILDAEW

SEQ ID NO: 760 - DNA, 987 bp, Muscodor strobelii
  misc_feature: SGI cDNA ID NO. 559832
  misc_feature: Elevated expression when VOC is produced
  misc_feature: Encodes the peptide sequence at SEQ ID NO 761
atggccgccgcttcagtcctcatccccctttccatcatcaaccagaacggaggtgtgctgccacccagcgccctctcacagcagagccctcgccatggccgaagcaggggcatgagcgtcaacggcaagagtggtggtaaggggtacagagtaacggagaatgcagatgctactgtcgctaaggcagttgcgtttgtgctgaagagagctgtccaggagtccgagctggaccctgaggccgaagatgaggaccttctgatctgcaatgccgacggatgggtttccgttgctgatcttttaacacagaccagaatgactgacctcgggataacactccacgctatccggcgcgcggcagcctcgtccaaggcacagtacatactccagcaaaagccaggatccgacgccgaaaaggccgagtcttatcagatcaaacaagattccaagcgcaacagcgcatcacaagagaagcttgtgcttgccggcgagccactcaaggctgacgcacaagacctcccagaatacatcgtctatgagaccacgtaccagaactaccccctggtgctggcttctggcagtatccggaaagccgatggtgccgcatacctatcatttgtgcccgttgcagcctccaatggatctggccgcgccagcaaagcagacgttagtatctggatccatctccgcaaggcgatggagcaattgctagagctacaatggcagtataccacatcaggcaggatcgtggtagctgctgaggagctaccaaagagcttgtggatgaaggctgttgcccgccgccctgatatcggactcttgttcgaagacggcgttgtgcacaaggagatcccagagggtctgagaggcaaaggtgccaagggcaaggccaagaagggcaagggcatgctcaagcaggagggccagggccgtgccgatagcgaatcagacagcgtcaaggaggaggaggaagatgaggaagaggagtaa

SEQ ID NO: 761 - protein, 328 aa, Muscodor strobelii
  misc_feature: SGI Peptide ID NO. 559832
  misc_feature (3)..(284): NCBI GI: 156055454 Blast Desc: SS1G_05079 [Sclerotinia sclerotiorum 1980] gi|154702863|gb|EDO02602.1| SS1G_05079 [Sclerotinia sclerotiorum 1980]
  misc_feature (3)..(286): NCBI GI: 154310469 Blast Desc: [Botryotinia fuckeliana B05.10] gi|150851486|gb|EDN26679.1| [Botryotinia fuckeliana B05.10]
  misc_feature (59)..(292): NCBI GI: 154295249 Blast Desc: BC1G_13438 [Botryotinia fuckeliana B05.10] gi|150844165|gb|EDN19358.1| BC1G_13438 [Botryotinia fuckeliana B05.10]
  misc_feature (88)..(297): NCBI GI: 145602059 Blast Desc: MGG_12911 [Magnaporthe grisea 70-15] gi|145010507|gb|EDJ95163.1| MGG_12911 [Magnaporthe grisea 70-15]
  misc_feature (56)..(292): NCBI GI: 156051094 Blast Desc: SS1G_06954 [Sclerotinia sclerotiorum 1980] gi|154704732|gb|EDO04471.1| SS1G_06954 [Sclerotinia sclerotiorum 1980]
  misc_feature (56)..(287): NCBI GI: 242785264 Blast Desc: tRNA splicing 2' phosphotransferase 1 [Talaromyces stipitatus ATCC 10500] gi|218720706|gb|EED20125.1| tRNA splicing 2' phosphotransferase 1 [Talaromyces stipitatus ATCC 10500]
  misc_feature: Useful for introducing or modulating the production of volatile compounds
MAAASVLIPLSIINQNGGVLPPSALSQQSPRHGRSRGMSVNGKSGGKGYRVTENADATVAKAVAFVLKRAVQESELDPEAEDEDLLICNADGWVSVADLLTQTRMTDLGITLHAIRRAAASSKAQYILQQKPGSDAEKAESYQIKQDSKRNSASQEKLVLAGEPLKADAQDLPEYIVYETTYQNYPLVLASGSIRKADGAAYLSFVPVAASNGSGRASKADVSIWIHLRKAMEQLLELQWQYTTSGRIVVAAEELPKSLWMKAVARRPDIGLLFEDGVVHKEIPEGLRGKGAKGKAKKGKGMLKQEGQGRADSESDSVKEEEEDEEEE

SEQ ID NO: 762 - DNA, 3042 bp, Muscodor strobelii
  misc_feature: SGI EST ID NO. CUFF.2119.1
  misc_feature: Variant of the nucleotide sequence at SEQ ID NO 760
atgaggtatagcacagcaggttagtccatcttgataatctggagcacagaaggccattgaaacagaaaacagcgatgctcgcttcattctacctacaggtcccaattcgaagtagttctacatgattggtctcccttacatttcgcttgaataactctagctttgctaacccctctgacttcgataggtagaaagcatacttgacgatgcagagcgagaagatgggaaagagagcagggtctcaatctggcgacactgatgagatgtcctcctctatcccctcgtcccgcatgcgagatggcttcgtttacatctcaggccgttatcagcttgcttggccagctcatcattcgcgggactccaacgtcttcagccgaagctccactgttggacggatctctaatgtactcacccgacctgttgtgctgaggtagctcagtaattggaccggtgctgcctcaacattgttggtttcatctctttgttgacatccgacatatcatgacacgtcgcgagtgcactttcagcgcgtcgccaggataggcatctcaggagatatgactctatcgtgtccgttgtccggtggcccgtccccgtttagagaacggggagagtttcgaaaccaactccacatcctaaatatacctgcatggaccctcttcgatggggcagcaatgcatgcgtgatgtgcttacgtccaaggtctcgtctcttccatgatctagcccagcagaaggtagacactgcctgggtaaataccagagcttgaccgaaaacgcatgagcatgaggtcctatcgtggggttgtagatccaagactgatatcgctcctcttgctcacatatgctagtatgacctgcgtctggactctactctaactgttcagagtgtagccaggtcagaacacgatggttgagaccagggtgcctagtcaagtcgtacagtaggaggtgtggcgatggtgaagcggtgactgaccgtagagaggggttatcgacaaggcagctgtcacaaagagctgtgcagttactgtatcaagccgcgcgcccaaccgcgaggactggcgaatgaaacagattaaggtacggatccgtacagcgcggccacgcgacccccaatacgtgatccagctgcgatcttcccgtgtggggcaagggtatcggcccacccactcaagaggccaggagacctcacgactccacggccaatgctgcacgaccagttggcacgcttgaccgcttgggataaggtctgccaacgaccaaagcggtcagccagcgatctccaacgcaaccgcgaggggcgcctgcgaggggcattgtcgtggcaaggatccgtcttcggccattgatctgtcacagtcaaacgaatacacatagcatgatatggcgagatagtaagtatgaggtagcaccgtataagatgctcgccatgcgcctctctcgggtttcctcctagcctccttcgtgatatactacttacacaactaccttgaacacgtgctcgaatttcacctcgaacgaatactctctctaccttaggaattcttgtaacatcactatacaagaatggccgccgcttcagtcctcatccccctttccatcatcaaccagaacggaggtgtgctgccacccagcgccctctcacagcagagccctcgccatggccgaagcaggggcatgagcgtcaacggcaagagtggtggtaaggggtacagagtaacggagaatgcagatgctactgtcgctaaggcagttgcgtttgtgctgaagagagctgtccaggagtccgagctggaccctgaggccgaagatgaggaccttctgatctgcaatgccgacggatgggtttccgttgctgatcttttaacacagaccagaatgactgacctcgggataacactccacgctatccggcgcgcggcagcctcgtccaaggcacagtacatactccagcaaaagccaggatccgacgccgaaaaggccgagtcttatcagatcaaacaagattccaagcgcaacagcgcatcacaagagaagcttgtgcttgccggcgagccactcaaggctgacgcacaagacctcccagaatacatcgtctatgagaccacgtaccagaactaccccctggtgctggcttctggcagtatccggaaagccgatggtgccgcatacctatcatttgtgcccgttgcagcctccaatggatctggccgcgccagcaaagcagacgttagtatctggatccatctccgcaaggcgatggagcaattgctagagctacaatggcagtataccacatcaggcaggatcgtggtagctgctgaggagctaccaaagagcttgtggatgaaggctgttgcccgccgccctgatatcggactcttgttcgaagacggcgttgtgcacaaggagatcccagagggtctgagaggcaaaggtgccaagggcaaggccaagaagggcaagggcatgctcaagcaggagggccagggccgtgccgatagcgaatcagacagcgtcaaggaggaggaggaagatgaggaagaggagtaaagataccctgtaaatctgttgtgtaaagatgcgactccaatgtcttgaacatggagatctagagcgtgatggacacacgtataataggcgaccatacctgccagcctgtcccgaataaaaaaagtaaaatatgcccaagtcagcatggctgtcctgttgatcaattcttcattatcagtgccctaaatgaaaggtagtcctcaaaaatcatcgaaatgaatatcatacgatgctaattgccagcttacttcgatgcaagccgctcgagctttgcttttgcataggcaggtcaaactggcacaagaggcgcaaggggtgacgagatgcccgcttgagtacggtatgctgcaaccatggtatcctctttctctttcccttttcttctctgtaagccttgccgtttgaatatggcgtcttaattaagataacacgctcgtataaatcatacgaggatcactgcatgtactacctagagatggcgaaaaac

SEQ ID NO: 763 - DNA, 780 bp, Muscodor strobelii
  misc_feature: SGI cDNA ID NO. 559833
  misc_feature: Encodes the peptide sequence at SEQ ID NO 764
atggcctccagactctctccgctgctcctccgagcggccgcccgcgctccaagagctgctcgacctcacatccgcgccttctcggccgcccagcccaggaggagcgacaccctctccgtgcaccgcaacacagccgacaacaaccccgacctccccttcaagttcaccgcgcaaaacgaggccatcatcgccgagatcctcaagagataccctccccagtacaagaaggccgccgtcatgcccatcctcgacctcggccagcgccagcacggcttcacctccatctccgtcatgaacgaggtcgcccgcctgctcgagatgccccccgctagagtctacgaggtcgcttctttctacaccatgtacaatcgcacgcccgtcggcaagttcttcgtccaggcttgcactaccacaccctgccaactcggcggctgcggcagcgacgccatcgtaaaagccctcaaagaggaactcggcatcaagcaaggcgagacgacgcccgacggcctcttcacattcatcgaggtcgagtgcctcggcgcctgcgtcaacgcgcccatgatccagatcaacgacgactactacgaggacctgacgcccgagacgaccaagacgctcatcgccgccctccgcgacagcgccacggctgggaagaacgttaaggtacctgcgcctggcccgcaaggtgccaatgcgcgccagacttgtgagcatagtggtggtcagacgaacttgacgagtgagccttggggtgtggaggctacgagatcggatctgtag

SEQ ID NO: 764 - protein, 259 aa, Muscodor strobelii
  misc_feature: SGI Peptide ID NO. 559833
  misc_feature (53)..(211): Pfam Id: PF01257 Pfam Desc: Respiratory-chain NADH dehydrogenase 24 Kd subunit
  misc_feature (1)..(259): NCBI GI: 116180112 Blast Desc: conserved [Chaetomium globosum CBS 148.51] gi|88184981|gb|EAQ92449.1| conserved [Chaetomium globosum CBS 148.51]
  misc_feature (1)..(259): NCBI GI: 145612669 Blast Desc: NADH-ubiquinone oxidoreductase 24 kDa subunit, mitochondrial precursor [Magnaporthe grisea 70-15] gi|145019806|gb|EDK04034.1| NADH-ubiquinone oxidoreductase 24 kDa
  misc_feature (1)..(259): NCBI GI: 171691979 Blast Desc: protein product [Podospora anserina] gi|170945938|emb|CAP72739.1| protein product [Podospora anserina]
  misc_feature (1)..(259): NCBI GI: 256732208 Blast Desc: [Nectria haematococca mpVI 77-13-4]
  misc_feature (1)..(259): NCBI GI: 46137431 Blast Desc: FG10231.1 [Gibberella zeae PH-1]
  misc_feature (1)..(259): NCBI GI: 85103526 Blast Desc: NADH:ubiquinone oxidoreductase 24kD subunit [Neurospora crassa OR74A] gi|730212|sp|P40915.1|NDUV2_NEUCR RecName: Full=NADH-ubiquinone oxidoreductase 24 kDa subunit, 24
  misc_feature (1)..(241): NCBI GI: 261351819 Blast Desc: NADH-ubiquinone oxidoreductase 24 kDa subunit [Verticillium albo-atrum VaMs.102]
  misc_feature (1)..(253): NCBI GI: 212528898 Blast Desc: NADH-ubiquinone dehydrogenase 24 kDa subunit, [Penicillium marneffei ATCC 18224] gi|210074004|gb|EEA28091.1| NADH-ubiquinone dehydrogenase 24 kDa subunit, [Penicillium ATCC
  misc_feature (1)..(253): NCBI GI: 242765195 Blast Desc: NADH-ubiquinone dehydrogenase 24 kDa subunit, [Talaromyces stipitatus ATCC 10500] gi|218724121|gb|EED23538.1| NADH-ubiquinone dehydrogenase 24 kDa subunit, [Talaromyces ATCC
  misc_feature (1)..(253): NCBI GI: 67539814 Blast Desc: AN6077.2 [Aspergillus nidulans FGSC A4] gi|40738862|gb|EAA58052.1| AN6077.2 [Aspergillus nidulans FGSC A4] gi|259479738|tpe|CBF70234.1| TPA: NADH-ubiquinone 24 kDa FGSC
  misc_feature (27)..(259): SWISSPROT Homolog: EC 1.6.5.3 NADH dehydrogenase (ubiquinone)
  misc_feature (27)..(259): SWISSPROT Homolog: EC 1.6.99.3 NADH dehydrogenase
MASRLSPLLLRAAARAPRAARPHIRAFSAAQPRRSDTLSVHRNTADNNPDLPFKFTAQNEAIIAEILKRYPPQYKKAAVMPILDLGQRQHGFTSISVMNEVARLLEMPPARVYEVASFYTMYNRTPVGKFFVQACTTTPCQLGGCGSDAIVKALKEELGIKQGETTPDGLFTFIEVECLGACVNAPMIQINDDYYEDLTPETTKTLIAALRDSATAGKNVKVPAPGPQGANARQTCEHSGGQTNLTSEPWGVEATRSDL

SEQ ID NO: 765 - DNA, 1141 bp, Muscodor strobelii
  misc_feature: SGI EST ID NO. CUFF.2228.0
  misc_feature: Variant of the nucleotide sequence at SEQ ID NO 763
cgacaactgctcgcatcgccaggagtccctcgttgccgcaagccaattcaacacaccacacaggaccatggcctccagactctctccgctgctcctccgagcggccgcccgcgctccaagagctgctcgacctcacatccgcgccttctcggccgcccagcccaggaggagcgacaccctctccgtgcaccgcaacacagccgacaacaaccccgacctccccttcaagttcaccgcgcaaaacgaggccatcatcgccgagatcctcaagagataccctccccagtacaagaaggccgccgtcatgcccatcctcgacctcggccagcgccagcacggcttcacctccatctccgtcatgaacgaggtcgcccgcctgctcgagatgccccccgctagagtctacgaggtcgcttctttctacaccatgtacaatcgcacgcccgtcggcaagttcttcgtccaggcttgcactaccacaccctgccaactcggcggctgcggcagcgacgccatcgtaaaagccctcaaagaggaactcggcatcaagcaaggcgagacgacgcccgacggcctcttcacattcatcgaggtcgagtgcctcggcgcctgcgtcaacgcgcccatgatccagatcaacgacgactactacgaggacctgacgcccgagacgaccaagacgctcatcgccgccctccgcgacagcgccacggctgggaagaacgttaaggtacctgcgcctggcccgcaaggtgccaatgcgcgccagacttgtgagcatagtggtggtcagacgaacttgacgagtgagccttggggtgtggaggctacgagatcggatctgtagatttttgggggatgaaatgtgggggaaaggggtaatatcagttgtgtagatgtaaacttgtgcagttgtgtacttgcggcgagacgaatggatggacggacagacgtcctcagaatgaggatcgtcatagacggggtgggagcatcactgtacataaaccacaattgtatgccttgatccattaatttgtttcatgaaagtgcaccgatccgggcgtatgcgaagtgcgacttcatcgatccggtatgtagtctagtctggcgacatatccatcaattctgtcctacctaaggc

SEQ ID NO: 766 - DNA, 957 bp, Muscodor strobelii
  misc_feature: SGI cDNA ID NO. 559834
  misc_feature: Elevated expression when VOC is produced
  misc_feature: Encodes the peptide sequence at SEQ ID NO 767
atggccgaccctacgcgtgtcctcgtcaccaatctgacggcttttacgccggcagagacagtcgaattagtcggtcgcgctggtgtagtcaagggaaatatgcgcttggacaaggtgttcctttctagcgcgtccgccggctgtcttctcgcattcgcatgcgccgcttcgcttagcaccaattcgagtccatggtataccgagaacgctccgggcttgctccggacaatatcggctctcatatttcctttcggctttgtcatgatcacactgaccggagccgacctattcacggggacgacgctatacacgacagttgcgaccctgcagcgacgtttgtcaatatggaaaatggcgcggcattggtttatctgcttttggggaaacctagcgggttccctgtttgtggccattgtcatatttggatatggcggcgtgttctcgtcctccccgtacaaggaaactgccatttcctatgcgacaaagaagcagcttacgcccaactggggagaaatcttcattcgtggcattggttgtaattggctcgtcaccctggcttgcttcttggcaatgcaggccaaaggtctcggcgccaaggtcgttgccatgtggtggcccatcttcggcttcgttgccctaggcctggaccacgtcgtcgctaatatgttcttcatccccatcggcatctggctcggcacaccccatcttagcgtcaacttatacatctacaagggcatcatccccgctctcttgggaaacattgtcggaggcgggctcttcgtcggggtttactattggtacatgtacaacttcatgcaagaggatgtcattgttgatggtgtcgcgtacagcaacacgaggcaggccggtcatcacgacctggagagcggcgtggtacacggtcagccgtctagcgaagtctcggtgtcggcggaccgcgacaagagagatggttaa

SEQ ID NO: 767 - protein, 318 aa, Muscodor strobelii
  misc_feature: SGI Peptide ID NO. 559834
  misc_feature (13)..(275): Pfam Id: PF01226 Pfam Desc: Formate/nitrite transporter
  misc_feature (13)..(269): Pfam Id: PF01226 Pfam Desc: Formate/nitrite transporter
  misc_feature (1)..(317): NCBI GI: 256723326 Blast Desc: NECHADRAFT_51945 [Nectria haematococca mpVI 77-13-4]
  misc_feature (11)..(305): NCBI GI: 238488467 Blast Desc: formate/nitrite transporter family protein, [Aspergillus flavus NRRL3357] gi|220697859|gb|EED54199.1| formate/nitrite transporter family protein, [Aspergillus flavus
  misc_feature (11)..(307): NCBI GI: 67903320 Blast Desc: AN8647.2 [Aspergillus nidulans FGSC A4] gi|40741491|gb|EAA60681.1| AN8647.2 [Aspergillus nidulans FGSC A4] gi|259483136|tpe|CBF78263.1| TPA: formate/nitrate family FGSC
  misc_feature (1)..(309): NCBI GI: 46114640 Blast Desc: FG03162.1 [Gibberella zeae PH-1]
  misc_feature (11)..(295): NCBI GI: 212534748 Blast Desc: formate/nitrite transporter family protein, [Penicillium marneffei ATCC 18224] gi|210069929|gb|EEA24019.1| formate/nitrite transporter family protein, [Penicillium ATCC
  misc_feature (11)..(306): NCBI GI: 115386860 Blast Desc: conserved [Aspergillus terreus NIH2624] gi|114190969|gb|EAU32669.1| conserved [Aspergillus terreus NIH2624]
  misc_feature (11)..(302): NCBI GI: 119487351 Blast Desc: formate/nitrite transporter, [Neosartorya fischeri NRRL 181] gi|119410625|gb|EAW20571.1| formate/nitrite transporter, [Neosartorya fischeri NRRL 181]
  misc_feature (11)..(295): NCBI GI: 242791029 Blast Desc: formate/nitrite transporter family protein, [Talaromyces stipitatus ATCC 10500] gi|218718267|gb|EED17687.1| formate/nitrite transporter family protein, [Talaromyces ATCC
  misc_feature (11)..(302): NCBI GI: 159122239 Blast Desc: AFUB_099620 [Aspergillus fumigatus A1163]
  misc_feature (11)..(296): NCBI GI: 121704230 Blast Desc: formate/nitrite transporter, [Aspergillus clavatus NRRL 1] gi|119398523|gb|EAW08953.1| formate/nitrite transporter, [Aspergillus clavatus NRRL 1]
  misc_feature: Useful for introducing or modulating the production of volatile compounds
MADPTRVLVTNLTAFTPAETVELVGRAGVVKGNMRLDKVFLSSASAGCLLAFACAASLSTNSSPWYTENAPGLLRTISALIFPFGFVMITLTGADLFTGTTLYTTVATLQRRLSIWKMARHWFICFWGNLAGSLFVAIVIFGYGGVFSSSPYKETAISYATKKQLTPNWGEIFIRGIGCNWLVTLACFLAMQAKGLGAKVVAMWWPIFGFVALGLDHVVANMFFIPIGIWLGTPHLSVNLYIYKGIIPALLGNIVGGGLFVGVYYWYMYNFMQEDVIVDGVAYSNTRQAGHHDLESGVVHGQPSSEVSVSADRDKRDG

SEQ ID NO: 768 - DNA, 1888 bp, Muscodor strobelii
  misc_feature: SGI EST ID NO. CUFF.2123.0
  misc_feature: Variant of the nucleotide sequence at SEQ ID NO 766
cgcgggtttgaagcatcacctctggatcgcggacattggcagaacaagcctataagtgttatgttgtaataagcacacttttctaaccgcaattgcggatttcaacttcaggttcgaagtcggtctattagacgggcagcggctcaaaatctcctctcggtttcaaacctacctaggcgataggtactgatcttgatggtcctaggcgagctaggtagcttaccccggtttaccgtcgcaatcgttggtttatcacaaccctcaatacaagcctcgtccatccctactgggcatatcgctcaaaagctgtcccaattctgcaggtcataccgagagagccattgccggcgcatcatcttatcaatgaacttcactccctcgcatatctccgcaggagttggagcgaataagcggctgtcagatccccgtcagatcatggggtgctactcgggaatactgtaattgaccaacagtcctcggacagtccccggctcgttcggcattaggtaggcgagcccggtgcgaggtaggtgtcgagggtacaccagatatataagcaatgttgcacccatatcagctcgttctgatatattttcccccgcgtactccgtgacggtacatgtcggcctcagcgagcgcggtttgctgccagttaatcaatcgaaaggggaagagaaagaggaacaagagtctaccgaataaccgaccgatctatccgaccgagtgcatcatatcaccatggccgaccctacgcgtgtcctcgtcaccaatctgacggcttttacgccggcagagacagtcgaattagtcggtcgcgctggtgtagtcaagggaaatatgcgcttggacaaggtgttcctttctagcgcgtccgccggctgtcttctcgcattcgcatgcgccgcttcgcttagcaccaattcgagtccatggtataccgagaacgctccgggcttgctccggacaatatcggctctcatatttcctttcggctttgtcatgatcacactgaccggagccgacctattcacggggacgacgctatacacgacagttgcgaccctgcagcgacgtttgtcaatatggaaaatggcgcggcattggtttatctgcttttggggaaacctagcgggttccctgtttgtggccattgtcatatttggatatggcggcgtgttctcgtcctccccgtacaaggaaactgccatttcctatgcgacaaagaagcagcttacgcccaactggggagaaatcttcattcgtggcattggttgtaattggctcgtcaccctggcttgcttcttggcaatgcaggccaaaggtctcggcgccaaggtcgttgccatgtggtggcccatcttcggcttcgttgccctaggcctggaccacgtcgtcgctaatatgttcttcatccccatcggcatctggctcggcacaccccatcttagcgtcaacttatacatctacaagggcatcatccccgctctcttgggaaacattgtcggaggcgggctcttcgtcggggtttactattggtacatgtacaacttcatgcaagaggatgtcattgttgatggtgtcgcgtacagcaacacgaggcaggccggtcatcacgacctggagagcggcgtggtacacggtcagccgtctagcgaagtctcggtgtcggcggaccgcgacaagagagatggttaagtagttgtaccctgtagataggccttggcgtgatggtggaactagggatattccatctatactgtactatgcatcatttgcagatcttaccgaggcagtttctctactgctagacagaggtgccaacgttgatgcctaaggcagacattacggcaacgctctttaagccgctttatataaaaacataggaaga

SEQ ID NO: 769 - DNA, 519 bp, Muscodor strobelii
  misc_feature: SGI cDNA ID NO. 559835
  misc_feature: Encodes the peptide sequence at SEQ ID NO 770
atggctggaatttcaggtgccgtactcacgcctcagctggacccgcccgtgcaggaagctcccataaggaagtcagccgaacctaacagccacactgctaacactaacacccttccaagcgttataatcccgcaatcgactgctgtggactcgccctcgaaaacaaacaacggtatacagctgcgatcggaacagaaagtagccctcgcagttgctgtccatagtgctcctttagtaccgaatgccgtccatgatatagccctagccagggtcgtcggtgagctcgacccgattggtaaagtcgacacagcctgcgtcgagcccggattacctctgcaagcgtacaatcacgacaatgacgacggcgagatacacgaaataagtagcttgctcaacgatcgcatggccgacgatcagcttggatacaaggcaaggttatttgagatcttcgatatccatgccgatgtcaaagtacccagtggattaggatcgacaacattagtgccagctgagatctga

SEQ ID NO: 770 - protein, 172 aa, Muscodor strobelii
  misc_feature: SGI Peptide ID NO. 559835
MAGISGAVLTPQLDPPVQEAPIRKSAEPNSHTANTNTLPSVIIPQSTAVDSPSKTNNGIQLRSEQKVALAVAVHSAPLVPNAVHDIALARVVGELDPIGKVDTACVEPGLPLQAYNHDNDDGEIHEISSLLNDRMADDQLGYKARLFEIFDIHADVKVPSGLGSTTLVPAEI

SEQ ID NO: 771 - DNA, 1404 bp, Muscodor strobelii
  misc_feature: SGI EST ID NO. CUFF.2140.0
  misc_feature: Variant of the nucleotide sequence at SEQ ID NO 769
cggaattaacatcggactgtgctactggcaggactcaaatgtcggagcgtaaagactgtccggtccaaaatgctctgattggacattcacctgcctcgacagtgcctgccaccgacgccaaagccaaggccaagaccaacatggctggaatttcaggtgccgtactcacgcctcagctggacccgcccgtgcaggaagctcccataaggaagtcaggtatatatattctcgccttagccgtataaatatgccccgtcggatttacgctaactgcgtcttgcttagccgaacctaacagccacactgctaacactaacacccttccaagcgttataatcccgcaatcgactgctgtggactcgccctcgaaaacaaacaacggtatacagctgcgatcggaacagaaagtagccctcgcagttgctgtccatagtggtagacaccgtgatcgcccagtacagaaaccagtagaagtaccacgaacatcacatggcgtagcaatggatttcggcacagatgtggttgcctactcaatagaagccaaagatgtagatgcagatcgcgactaacgagctttgctggttttagaggctatgatgggtggtccagctcctttagtaccgaatgccgtccatgatatagccctagccagggtcgtcggtgagctcgacccgattggtaaagtcgacacagcctgcgtcgagcccggattacctctgcaagcgtacaatcacgacaatgacgacggcgagatacacgaaataagtagcttgctcaacgatcgcatggccgacgatcagcttggatacaaggcaaggttatttgagatcttcgatatccatgccgatgtcaaagtacccagtggattaggatcgacaacattagtgccagctgagatctgagaaaaagaaagaaacatgcgggtagaatatttttgttgtttccgtcgcaccaacagttatattttgtacatatccctcatgtcctttagccgatggcattcgagtccttcacgcttagtggttccattattctacaccactccatttggtgaagatagatcctgatactcaggattctgtttcagtgcctgagccgatagattgctatgttcacaatggtgatattttcatcgcttcttcctccactacgacttggcctgattatggcaccgtgatcactgccagccctcctagcaatatcgcatcacgacagactccaccagaccggtcaccatcatcagacgttgaatcatcgaccgctgcccattatgacacagggccccctattatgccgctgccatcggatggcacgtcgtcaacaaacaccaaccctaccagccggggtaatcagtcttgtgttctaccagagaactacgaggagcctcttttcgatccttcattg

SEQ ID NO: 772 - DNA, 6750 bp, Muscodor strobelii
  misc_feature: SGI cDNA ID NO. 559836
  misc_feature: Encodes the peptide sequence at SEQ ID NO 773
atgtcagactcgacagtgacccctgatgccccgcacgacgacaagaatagtgtggcaacaagtgaggctaccacagcgtggacgcgcgagaccactccaacgcaacccagactacctaaaccccaagatacagaatggtacaagtctgacactatcgggcttgatgggcgcaattccacgccatcgagcccttgctcttcagccgacactatcacccagaccgtcggacgtcgactgaatcctgatgcacatattcaatcggctcgaacggaaagcattcgtgtctatcctcatagtgacgtcaattccttgctaaaagacgtcgcggccttttccgtcaggctcgatgaaagtgtatctaatgccaatgcgtcttcccaaagagggcagggtgccagtatgcccagcagagcgccctcggcatcaactgaccgatgcgacttttttctatggtctgaagacgcacaagaacgggagaagaaatctcttatgacaaacaaccgcaacgagatgaagtcaccgcctaagaagcagatggcagtctacgaagccgccagtgcgcgggaagaaaaacggaagtcgaattccactaggctagcggatctacaatcagttgtcaaaggagagtcttcgaccaacttgaccattaatgccttcgcaggcggccgtcgaccggcatggcttgccaatgcagaaccagtagagccgacgcctcatcctcgctcattccacacagcgccaaatactttacgccgcaagtctcgaaacttattcccaagcaaaacggctatgtcacgtgatgtcgattatctcgagactttgttttcaagtgagtccgacaatgagctgctgatcatgcaggatcttagcgagacattgagggaccaacatccgcaaacgcaagaacatcagctgagatttagcaacttcgataggtcaaaccttccagaagcctctacagaaagcaacaatgacactataatgcatgatcaaacattcggcacgaacgatttcaaggacagccacttcaatattcacagttacaagaacccaagcttcgtcccagaaatgtacaaaccagatggagaagatcctctcaacatggagctgcacctccggaccggtgaccctgagactctacaagacgagatcattcggatttgccaacaactgccaaacgtaacatgggataacgtcgacatagagaagctgagtcttcgtgcttccctaaatggtccatggggagtcgatagcgaaactgtctatataattgttactatcgatattcctacagaataccctaaagcgaaggcgccgcgatttaccatcgaaaagtccgcactaattccaaagcaaacatataaaaagattaatcgagaacttaaccaattagctaataagttctcgaagaaaagtcaaaactgtcttgatgtcgcttttggctacttacttggagaaattgacatttctacccacttgaagaatactctgagaccatcgaactcttccacatcagaaatcttttccctgtcctcgtcggagaatggatccgtgactttcgagcacgatgcgcaggctcttgagaaaaaggcgcaaggactaggtacacggagtcttgagcgccaggaagattttcccatgtcgggaacagtcgatgtttttacagatgacatggcaaacatgactccctctatttcggactctgaaagtgagatcgtcaaagatgaccaaatccagagatcgcgtctacttagacgtcgggaccgtcgaattcgccgtatgaagtctggtagtatcagcaagcgtaccgttagtgagcgaggcagtgacgggtcggaccgggaggatttcaatacctggttcaagttaaacgaacacaacgaatcagcttggaacattctcgctacaagcgaccggcaaaaacccgtcgatgacatgaatgaaatccatatgaccgacgtagccatgtcaaacgcagaaagtgacgatgaaattcacgactttcatcaggagacaactcatgcaatcatggagatccaccccaccgaagatggattcaagcaatacattattcggcaaaacccactacttgccactcagaacagctacctggctgaacgtatcgcacagcacatgtcctctcagtatgaatatctgctgtctaatcgagcaagacgtctcagattgaatcagccctacagcgatcaggagacgacgccgatcggagaccacaatcgtgatgtctctgaaagattgcgatacctgacttctcttcaacgtgatacactgacccgaatactggggcccgaacgacagcgcgagtatcgccaccaacagtatccggtaccgacccagacaacacaagcgatgctggcacaaacacagacacaggcagcagccgagcaagaccgtgagagtcaagcgcctcggatagatacatctttgttcgatcacagttggaatgcagacattggcagcggcgatggggtactgcaagattccattgtgacgccgaatatgtttcctcccgatttccccgtgcccgctatatcaaaattcccaacaactggactaagcacgtacacggggacacccggccttttatctgtacgtggaatctatgttctaaccccaaagggtttaagaggaaggcggattgggtacggcacgagaatgaattccaccgccaacttgattgctggacatgcgacatcgacgattgtggacatgccaggattcaaaacaaaagccgctttgaagaaagccggtacgctggatccgacatgggcgaaattggaacaatgccataccgcaacatcgctccaaccacaagatgagccctgcaaattctgtggcgaaacttttactacatggaagaaactgacgggtcacctggcgaaacatatggaagcaatgtcacttccaatcctctatttagtagaaccgagtgtcttccaagctagccctattcaaattgagccgccaatttgcaaggacggtccctcagtttcagtggcaaatctcagtccggtggctcgtgatactttgcagcccaatgcgacaccgatcgtaccttgcgagcaaggaaaaccgtctggtgctcctaccgattccggatatgcgtccatggggcacaccttgccagcagttacgcatgatactcacgatgagtcggcaacttatttcaatgatgcggcaacggagtatacagacgcatcaagtgtggcaacgtggagaaaagagagctacgtatctgacttcgcggatgatctgttcgccaaaattcaagaaatgcagcctgatgaagatgaacttgatcgaataacgaagctcctccccgatctactgaagctatttgccttaagactcggctacaatgcaccaacaacaatgcattctaatgtgatgttctttgttcacaaataccggaatgtcattgttgatgcagttaagaagaagaagatggaggaggataacttaggagaggatactgatagaacaacgagcaatgaagagaagatgccccttgaagaattaatgagctcttggtttcaaggacaagacgcaggcgaaacgcagttccctagacaacatctagagcaacgtgatatagacatgagctcacaacattcggatgattatgaagaagaggacgaaaaggaagtagcaactacgggctaccgagatttcgttcttgaaacggaagcgttccgatggctcctagcccgcttgcaatcggagttgcgcctagttatgccggaaccaaagaccatgcaaactattcgtcgagaaatagccgcttcgcttagatcgactcatattctaagcagaaagatagcattggaagagcacaaagccatattcgaatttgaatgggatttgttaggctttttcgagcagcagcagtatgactgcgtaccttccgaggctgtcgctaaagtcatcgccattacaggatcaagtcgagacgcgcaagctttgacgtgtgttgattacatgatgcagacttggccagctactggaggtgtgatggtacggttcctacagtgtctagtaagcgccaaagatggcaacccacaatcaggctggcttgttgtcatccacagagatttcatgtacgttccatttcaggacagagcaaagtcagctgtctttcgacaacctcagagattcgagtcaggaaccggattagaaatcccactcaatatgatggctgggttggctcaaactgaactcgtaaatacgttcagggagaaaacgttcattaaaggattttctactctactcattccggtcaaacaaagcggagacactgtcatttggcatttgttatacaaccaagatggcagcagaatttcctacctagcaggtatccattcgactcaatatgttagcagtctcaatttagcaacatttcgacatgtgcttggctggtgctcagatgcggagttctatgccggctccgcacgtgcgaacagttttgtgggcggttcgggcctgcccaaacctaatcaagatgccgctctggctgacgtgttcgtgtcgccgggaaaaggcatcatcggtggtagtgctttcgtcctaggtttcaaagatactcctctacacattgcacgtaaaagctacatcaagaaacttcaatggatggatgcccagacagtgctactgtgggatgaaagtgacaagagaggatggttgatcaacggatcagctgcattactttacgtcgtccgggcatcactggctcacaacagtactgataagttcaaaagcgcattcacgtttagacaggaggccataacagagtcccaaaagggatataaaccagattccaatattgatgtacttctgaacccaaagaactggtcgttgaaactgtacggcgaggatgatgatggtgacgatatgccattcaaagggagaatcagtcaggtctatgacatattggagaaactcatagatcaccaacatgacataacgggagaagatggcataaaactcatagatatgccacgccagcgcctcgaaggatgggattttagagatttagtaactttccgcgaccccctctatccccgggtagctactgtggaaagtagaggcaaaggatggatcgatgtaacccgagctttacacacagtcactcttttcggtcgcgagttcggtgagctcataaagccggttggagtgacctgtgaatattggagcttcttgcccaaacaacggtactatgtggcggccagtctctccgacatacgtcaagttgctgacaggaatgacttctatgatgacggacacacaagactcagcgaatccatcatatggcacaccccaacagcgatgttcgcatcctgcgattgtcatggtgcacttcgtcgcaatcattgcgagcccgtccaagcattgttgccctctagtatgctaaatgtcattcttgctagaaagctgcccatacctgaaagtggctctggtgcagtaatcttcgggcatcactcaagttgcgcatggacttggagagactatggacctcctgtggagggagatacggcgctttcttcaagaatatcggaacccgaatcttttcatgatagtggtgtcgggtcgagcgtgagagccttggatcgtgaaaacacatggtcttcaagatctagcgcgccgaatcttcatcgatccgcaagcaactatgagatttatccttccgaatcagagcgtgctacacctgctgcggaagaaattcatgaaagtggcgagtacactgtcggtatactctgcgcactgccaaaggagctgttggcagtccgagcactctttgataaaaggcacgcaggccttgacattgctagagatgtcaatcattatgcactgggagagattggcaggcacatggtagttgcagcctgccttccgaaaggagattatggaaccaaccccgccgctgactctgcttctaatatgaggagaagcttctggaatatcaggttttgccttttggttgggataggtgggggcgttccctcaaaagagcatgatattcgcctcggagatgttgtagtgagtatcccaagcggaaaatatccaggagtgattcaatatgaccgtggtaaggagaacgaaaatagcgtgttcgaaccatctggatctctatcgcccccgccatggcttctacggacagcaatcagcagcctggaatctaatccagactgtccttccagcccactccggcacaatctgatgcaaattcaacggcgtatcagctctcctgaaagcttcaagtacaaacatcccggattacaacatgatacattctcgctgaacgaatgctcgaggtgtgagtgtctaggtagctgcgccgagcgcaatgcatacctgaaaaatagagaacatcgatctaccgaggatcccaaggttttctacggactcattgcttcaggtaaccgggtaattaaggatgcccattttcggaacgaattggctcaaaaatgcgatgttttatgctttgagatggaggccgcaggaattatgaatattttcccatgtctggtcatcagaggtatttgcgattatgctgactcgtcgaaaaataagatctggcaagagtacgcggctgccactgcggcagcatataccaagctgttattatgcgaggtgggacagtgtgatggtcaatatggcggattgccagcgaagagagcaaatactcaaacacctgctaccgacgaagagatgcagtggaagcgtcgaagaatatag

SEQ ID NO: 773 - protein, 2249 aa, Muscodor strobelii
  misc_feature: SGI Peptide ID NO. 559836
  misc_feature (1069)..(2222): NCBI GI: 159128460 Blast Desc: Pfs domain protein [Aspergillus fumigatus A1163]
  misc_feature (1384)..(2222): NCBI GI: 70985797 Blast Desc: Pfs domain protein [Aspergillus fumigatus Af293] gi|66846033|gb|EAL86366.1| Pfs domain protein [Aspergillus fumigatus Af293]
  misc_feature (1384)..(2222): NCBI GI: 121704357 Blast Desc: Pfs domain protein [Aspergillus clavatus NRRL 1] gi|119398587|gb|EAW09016.1| Pfs domain protein [Aspergillus clavatus NRRL 1]
  misc_feature (1385)..(2247): NCBI GI: 212530322 Blast Desc: Pfs domain protein [Penicillium marneffei ATCC 18224] gi|210074716|gb|EEA28803.1| Pfs domain protein [Penicillium marneffei ATCC 18224]
  misc_feature (1385)..(2213): NCBI GI: 145228841 Blast Desc: An01g02950 [Aspergillus niger] gi|134054821|emb|CAK43661.1| protein product [Aspergillus niger]
  misc_feature (1587)..(2213): NCBI GI: 169776830 Blast Desc: [Aspergillus oryzae RIB40] gi|83771617|dbj|BAE61748.1| protein product [Aspergillus oryzae]
  misc_feature (1880)..(2213): NCBI GI: 256733332 Blast Desc: NECHADRAFT_20901 [Nectria haematococca mpVI 77-13-4]
  misc_feature (1918)..(2213): NCBI GI: 46120350 Blast Desc: FG04822.1 [Gibberella zeae PH-1]
  misc_feature (1376)..(1936): NCBI GI: 115390136 Blast Desc: [Aspergillus terreus NIH2624] gi|114194969|gb|EAU36669.1| [Aspergillus terreus NIH2624]
  misc_feature (1917)..(2213): NCBI GI: 115398856 Blast Desc: [Aspergillus terreus NIH2624] gi|114191900|gb|EAU33600.1| [Aspergillus terreus NIH2624]
MSDSTVTPDAPHDDKNSVATSEATTAWTRETTPTQPRLPKPQDTEWYKSDTIGLDGRNSTPSSPCSSADTITQTVGRRLNPDAHIQSARTESIRVYPHSDVNSLLKDVAAFSVRLDESVSNANASSQRGQGASMPSRAPSASTDRCDFFLWSEDAQEREKKSLMTNNRNEMKSPPKKQMAVYEAASAREEKRKSNSTRLADLQSVVKGESSTNLTINAFAGGRRPAWLANAEPVEPTPHPRSFHTAPNTLRRKSRNLFPSKTAMSRDVDYLETLFSSESDNELLIMQDLSETLRDQHPQTQEHQLRFSNFDRSNLPEASTESNNDTIMHDQTFGTNDFKDSHFNIHSYKNPSFVPEMYKPDGEDPLNMELHLRTGDPETLQDEIIRICQQLPNVTWDNVDIEKLSLRASLNGPWGVDSETVYIIVTIDIPTEYPKAKAPRFTIEKSALIPKQTYKKINRELNQLANKFSKKSQNCLDVAFGYLLGEIDISTHLKNTLRPSNSSTSEIFSLSSSENGSVTFEHDAQALEKKAQGLGTRSLERQEDFPMSGTVDVFTDDMANMTPSISDSESEIVKDDQIQRSRLLRRRDRRIRRMKSGSISKRTVSERGSDGSDREDFNTWFKLNEHNESAWNILATSDRQKPVDDMNEIHMTDVAMSNAESDDEIHDFHQETTHAIMEIHPTEDGFKQYIIRQNPLLATQNSYLAERIAQHMSSQYEYLLSNRARRLRLNQPYSDQETTPIGDHNRDVSERLRYLTSLQRDTLTRILGPERQREYRHQQYPVPTQTTQAMLAQTQTQAAAEQDRESQAPRIDTSLFDHSWNADIGSGDGVLQDSIVTPNMFPPDFPVPAISKFPTTGLSTYTGTPGLLSVRGIYVLTPKGLRGRRIGYGTRMNSTANLIAGHATSTIVDMPGFKTKAALKKAGTLDPTWAKLEQCHTATSLQPQDEPCKFCGETFTTWKKLTGHLAKHMEAMSLPILYLVEPSVFQASPIQIEPPICKDGPSVSVANLSPVARDTLQPNATPIVPCEQGKPSGAPTDSGYASMGHTLPAVTHDTHDESATYFNDAATEYTDASSVATWRKESYVSDFADDLFAKIQEMQPDEDELDRITKLLPDLLKLFALRLGYNAPTTMHSNVMFFVHKYRNVIVDAVKKKKMEEDNLGEDTDRTTSNEEKMPLEELMSSWFQGQDAGETQFPRQHLEQRDIDMSSQHSDDYEEEDEKEVATTGYRDFVLETEAFRWLLARLQSELRLVMPEPKTMQTIRREIAASLRSTHILSRKIALEEHKAIFEFEWDLLGFFEQQQYDCVPSEAVAKVIAITGSSRDAQALTCVDYMMQTWPATGGVMVRFLQCLVSAKDGNPQSGWLVVIHRDFMYVPFQDRAKSAVFRQPQRFESGTGLEIPLNMMAGLAQTELVNTFREKTFIKGFSTLLIPVKQSGDTVIWHLLYNQDGSRISYLAGIHSTQYVSSLNLATFRHVLGWCSDAEFYAGSARANSFVGGSGLPKPNQDAALADVFVSPGKGIIGGSAFVLGFKDTPLHIARKSYIKKLQWMDAQTVLLWDESDKRGWLINGSAALLYVVRASLAHNSTDKFKSAFTFRQEAITESQKGYKPDSNIDVLLNPKNWSLKLYGEDDDGDDMPFKGRISQVYDILEKLIDHQHDITGEDGIKLIDMPRQRLEGWDFRDLVTFRDPLYPRVATVESRGKGWIDVTRALHTVTLFGREFGELIKPVGVTCEYWSFLPKQRYYVAASLSDIRQVADRNDFYDDGHTRLSESIIWHTPTAMFASCDCHGALRRNHCEPVQALLPSSMLNVILARKLPIPESGSGAVIFGHHSSCAWTWRDYGPPVEGDTALSSRISEPESFHDSGVGSSVRALDRENTWSSRSSAPNLHRSASNYEIYPSESERATPAAEEIHESGEYTVGILCALPKELLAVRALFDKRHAGLDIARDVNHYALGEIGRHMVVAACLPKGDYGTNPAADSASNMRRSFWNIRFCLLVGIGGGVPSKEHDIRLGDVVVSIPSGKYPGVIQYDRGKENENSVFEPSGSLSPPPWLLRTAISSLESNPDCPSSPLRHNLMQIQRRISSPESFKYKHPGLQHDTFSLNECSRCECLGSCAERNAYLKNREHRSTEDPKVFYGLIASGNRVIKDAHFRNELAQKCDVLCFEMEAAGIMNIFPCLVIRGICDYADSSKNKIWQEYAAATAAAYTKLLLCEVGQCDGQYGGLPAKRANTQTPATDEEMQWKRRRI

SEQ ID NO: 774 - DNA, 8243 bp, Muscodor strobelii
  misc_feature: SGI EST ID NO. CUFF.2287.1
  misc_feature: Variant of the nucleotide sequence at SEQ ID NO 772
attaacgagagccttcctgaattctttcatttcgtaaaaaatcatttcgcgcctactagcatctgggagaagtctaagcacttatactcacaaaatcctcccatttccgtcatgcactatgtcagactcgacagtgacccctgatgccccgcacgacgacaagaatagtgtggcaacaagtgaggctaccacagcgtggacgcgcgagaccactccaacgcaacccagactacctaaaccccaagatacagaatggtacaagtctgacactatcgggcttgatgggcgcaattccacgccatcgagcccttgctcttcagccgacactatcacccagaccgtcggacgtcgactgaatcctgatgcacatattcaatcggctcgaacggaaagcattcgtgtctatcctcatagtgacgtcaattccttgctaaaagacgtcgcggccttttccgtcaggctcgatgaaagtgtatctaatgccaatgcgtcttcccaaagagggcagggtgccagtatgcccagcagagcgccctcggcatcaactgaccggtccgttgccacgtcgtcacgtcaattcagcccccctacgagctcgaccgttgatcaatcaagtaaaggcctactaaggggaggtgtatggcactgcaattgctcaccgcgacttccagctgtcgtcaggaccgtcgtgaaaccaagtaagaatatgggaagaaaattctatgtttgccccgtagagcaatacgaaggaaatagatgcgacttttttctatggtctgaagacgcacaagaacgggagaagaaatctcttatgacaaacaaccgcaacgagatgaagtcaccgcctaagaagcagatggcagtctacgaagccgccagtgcgcgggaagaaaaacggaagtcgaattccactaggctagcggatctacaatcagttgtcaaaggagagtcttcgaccaacttgaccattaatgccttcgcaggcggccgtcgaccggcatggcttgccaatgcagaaccagtagagccgacgcctcatcctcgctcattccacacagcgccaaatactttacgccgcaagtctcgaaacttattcccaagcaaaacggctatgtcacgtgatgtcgattatctcgagactttgttttcaagtcaaaccttccagaagcctctacagaaagcaacaatgacactataatgcatgatcaaacattcggcacgaacgatttcaaggacagccacttcaatattcacagttacaagaacccaagcttcgtcccagaaatgtacaaaccagatggagaagatcctctcaacatggagctgcacctccggaccggtgaccctgagactctacaagacgagatcattcggatttgccaacaactgccaaacgtaacatgggataacgtcgacatagagaagctgagtcttcgtgcttccctaaatggtccatggggagtcgatagcgaaactgtctatataattgttactatcgatattcctacagaataccctaaagcgaaggcgccgcgatttaccatcgaaaagtccgcactaattccaaagcaaacatataaaaagattaatcgagaacttaaccaattagctaataagttctcgaagaaaagtcaaaactgtcttgatgtcgcttttggctacttacttggagaaattgacatttctacccacttgaagaatactctgagaccatcgaactcttccacatcagaaatcttttccctgtcctcgtcggagaatggatccgtgactttcgagcacgatgcgcaggctcttgagaaaaaggcgcaaggactaggtacacggagtcttgagcgccaggaagattttcccatgtcgggaacagtcgatgtttttacagatgacatggcaaacatgactccctctatttcggactctgaaagtgagatcgtcaaagatgaccaaatccagagatcgcgtctacttagacgtcgggaccgtcgaattcgccgtatgaagtctggtagtatcagcaagcgtaccgttagtgagcgaggcagtgacgggtcggaccgggaggatttcaatacctggttcaagttaaacgaacacaacgaatcagcttggaacattctcgctacaagcgaccggcaaaaacccgtcgatgacatgaatgaaatccatatgaccgacgtagccatgtcaaacgcagaaagtgacgatgaaattcacgactttcatcaggagacaactcatgcaatcatggagatccaccccaccgaagatggattcaagcaatacattattcggcaaaacccactacttgccactcagaacagctacctggctgaacgtatcgcacagcacatgtcctctcagtatgaatatctgctgtctaatcgagcaagacgtctcagattgaatcagccctacagcgatcaggagacgacgccgatcggagaccacaatcgtgatgtctctgaaagattgcgatacctgacttctcttcaacgtgatacactgacccgaatactggggcccgaacgacagcgcgagtatcgccaccaacagtatccggtaccgacccagacaacacaagcgatgctggcacaaacacagacacaggcagcagccgagcaagaccgtgagagtcaagcgcctcggatagatacatctttgttcgatcacagttggaatgcagacattggcagcggcgatggggtactgcaagattccattgtgacgccgaatatgtttcctcccgatttccccgtgcccgctatatcaaaattcccaacagaccttcaatgtcccatctgtttggaacagtgcttgatattcaagccatcagactggactaagcacgtacacggggacacccggccttttatctgtacgtggaatctatgttctaaccccaaagggtttaagaggaaggcggattgggtacggcacgagaatgaattccaccgccaacttgattgctggacatgcgacatcgacgattgtggacatgtatgctacaggcaggaaaatttcatctcacatttggtccgtgagcatcaatttgacaggccaggattcaaaacaaaagccgctttgaagaaagccggtacgctggatccgacatgggcgaaattggaacaatgccataccgcaacatcgctccaaccacaagatgagccctgcaaattctgtggcgaaacttttactacatggaagaaactgacgggtcacctggcgaaacatatggaagcaatgtcacttccaatcctctatttagtagaaccgagtgtcttccaagctagccctattcaaattgagccgccaatttgcaaggacggtccctcagtttcagtggcaaatctcagtccggtggctcgtgatactttgcagcccaatgcgacaccgatcgtaccttgcgagcaaggaaaaccgtctggtgctcctaccgattccggatatgcgtccatggggcacaccttgccagcagttacgcatgatactcacgatgagtcggcaacttatttcaatgatgcggcaacggagtatacagacgcatcaagtgtggcaacgtggagaaaagagagctacgtatctgacttcgcggatgatctgttcgccaaaattcaagaaatgcagcctgatgaagatgaacttgatcgaataacgaagctcctccccgatctactgaagctatttgccttaagactcggctacaatgcaccaacaacaatgcattctaatgtgatgttctttgttcacaaataccggaatgtcattgttgatgcagttaagaagaagaagatggaggaggataacttaggagaggatactgatagaacaacgagcaatgaagagaagatgccccttgaagaattaatgagctcttggtttcaaggacaagacgcaggcgaaacgcagttccctagacaacatctagagcaacgtgatatagacatgagctcacaacattcggatgattatgaagaagaggacgaaaaggaagtagcaactacgggctaccgagatttcgttcttgaaacggaagcgttccgatggctcctagcccgcttgcaatcggagttgcgcctagttatgccggaaccaaagaccatgcaaactattcgtcgagaaatagccgcttcgcttagatcgactcatattctaagcagaaagatagcattggaagagcacaaagccatattcgaatttgaatgggatttgttaggctttttcgagcagcagcagtatgactgcgtaccttccgaggctgtcgctaaagtcatcgccattacaggatcaagtcgagacgcgcaagctttgacgtgtgttgattacatgatgcagacttggccagctactggaggtgtgatggtacggttcctacagtgtctagtaagcgccaaagatggcaacccacaatcagattcctttcccgacggaacacatttctcagcaaagtttcaaggaacagcattcgctctcgtggcgtctgggagcccgttctctttagccgagattggagaacagctcgcatggctcgcaactgtgtttcgaccgtcaccatcccagagcgggatcgcttgttgcgctcctttcatttcttctctacgaaagtctaacgtgccagcacgccaggctggcttgttgtcatccacagagatttcatgtacgttccatttcaggacagagcaaagtcagctgtctttcgacaacctcagaggtcagtgttggcacaatctgtttttcaatccggttgttgtcacaggatatccgattcgctccagattcgagtcaggaaccggattagaaatcccactcaatatgatggctgggttggctcaaactgaactcgtaaatacgttcagggagaaaacgttcattaaaggattttctactctactcattccggtcaaacaaagcggagacactgtcatttggcatttgttatacaaccaagatggcagcagaatttcctacctagcaggtatccattcgactcaatatgttagcagtctcaatttagcaacatttcgacatgtgcttggctggtgctcagatgcggagttctatgccggctccgcacgtgcgaacagttttgtgggcggttcgggcctgcccaaacctaatcaagatgccgctctggctgacgtgttcgtgtcgccgggaaaaggcatcatcggtggtagtgctttcgtcctaggtttcaaagatactcctctacacattgcacgtaaaagctacatcaagaaacttcaatggatggatgcccagacagtgctactgtgggatgaaagtgacaagagaggatggttgatcaacggatcagctgcattactttacgtcgtccgggcatcactggctcacaacagtactgataagttcaaaagcgcattcacgtttagacaggaggccataacagagtcccaaaagggatataaaccagattccaatattgatgtacttctgaacccaaagaactggtcgttgaaactgtacggcgaggatgatgatggtgacgatatgccattcaaagggagaatcagtcaggtctatgacatattggagaaactcatagatcaccaacatgacataacgggagaagatggcataaaactcatagatatgccacgccagcgcctcgaaggatgggattttagagatttagtaactttccgcgaccccctctatccccgggtagctactgtggaaagtagaggcaaaggatggatcgatgtaacccgagctttacacacagtcactcttttcggtcgcgagttcggtgagctcataaagccggttggagtgacctgtgaatattggagcttcttgcccaaacaacggtactatgtggcggccagtctctccgacatacgtcaagttgctgacaggaatgacttctatgatgacggacacacaagactcagcgaatccatcatatggcacaccccaacagcgatgttcgcatcctgcgattgtcatggtgcacttcgtcgcaatcattgcgagcccgtccaagcattgttgccctctagtatgctaaatgtcattcttgctagaaagctgcccatacctgaaagtggctctggtgcagtaatcttcgggcatcactcaagttgcgcatggacttggagagactatggacctcctgtggagggagatacggcgctttcttcaagaatatcggaacccgaatcttttcatgatagtggtgtcgggtcgagcgtgagagccttggatcgtgaaaacacatggtcttcaagatctagcgcgccgaatcttcatcgatccgcaagcaactatgagatttatccttccgaatcagagcgtgctacacctgctgcggaagaaattcatgaaagtggcgagtacactgtcggtatactctgcgcactgccaaaggagctgttggcagtccgagcactctttgataaaaggcacgcaggccttgacattgctagagatgtcaatcattatgcactgggagagattggcaggcacatggtagttgcagcctgccttccgaaaggagattatggaaccaaccccgccgctgactctgcttctaatatgaggagaagcttctggaatatcaggttttgccttttggttgggataggtgggggcgttccctcaaaagagcatgatattcgcctcggagatgttgtagtgagtatcccaagcggaaaatatccaggagtgattcaatatgaccgtggtaaggagaacgaaaatagcgtgttcgaaccatctggatctctatcgcccccgccatggcttctacggacagcaatcagcagcctggaatctaatccagactgtccttccagcccactccggcacaatctgatgcaaattcaacggcgtatcagctctcctgaaagcttcaagtacaaacatcccggattacaacatgatacattctcgctgaacgaatgctcgaggtgtgagtgtctaggtagctgcgccgagcgcaatgcatacctgaaaaatagagaacatcgatctaccgaggatcccaaggttttctacggactcattgcttcaggtaaccgggtaattaaggatgcccattttcggaacgaattggctcaaaaatgcgatgttttatgctttgagatggaggccgcaggaattatgaatattttcccatgtctggtcatcagaggtatttgcgattatgctgactcgtcgaaaaataagatctggcaagagtacgcggctgccactgcggcagcatataccaagctgttattatgcgaggtgggacagtgtgatggtcaatatggcggattgccagcgaagagagcaaatactcaaacacctgctaccgacgaagagatgcagtggaagcgtcgaagaatatagatgcacgaagtattgttgataatgagatgctttgaaggatattgtttctgcaaaggaatatgcgacctcgcttctcatcgcatgatcacctgcacaccaccacaatcagcacacgattccgtctctgtcgaaagacttgtttttcattttacccttctgatcattttggtaaaaagttaacccgattctttgctctatcaacgcttccgcgatgactactccttcaaacaggtggattgctatactctggcaaaggcttaatcacagccattctacgatttgtcgagttcttcacggttaccagattgttcctcgatcccacctatttaggggtcgacacagagatctatacactcggcgaacccagcgccaatttcatctactcgtgtcttcctggcatgcgcccgttgcgacgaaccctgtttcaaagtgtcgaagtatcacacagtctagctttaggactaggagatctgaatacgacgatctcacagaggtgagactggtgatcatgaaggcttacggaagtgctgtagacgctcgtgtgggaggattaataatgggataattttctaagtatctttcgaataaaccggcgaataatactcgtatatatatgcatctgaacccctgtatcatgctccctggagcgtaccatattatctcaggtggtaaccctaataagcaggccactttgcgacagatgatattacccctgatgactcgctttgttatagagaggacttggtacctggtgcaggccgaaattttctctcggcgtcgagtactaggatgagttgtctcgccgagcaaaggattctcatagactcgtcacacatggtcatgtccacgtccatcctgccctcgtgcaacatcttagtgacgactctgtt

SEQ ID NO: 775 - DNA, 1236 bp, Muscodor strobelii
  misc_feature: SGI cDNA ID NO. 559837
  misc_feature: Encodes the peptide sequence at SEQ ID NO 776
atgtcgcttgtcagacttctcacatactcgaacgagctagacattcggacgattgccgttgtgacatcggtatggaagaatagttcaattgatacgcccactgttcatgacgttctgggtgggtacggcaaagtggtttccaacttaaatgcccatgtacccgagtctggccgttacccgtctgctgagagtctgacggagaaaatcaaagttggtcacccggtatatggacttgccaatcttgagctttcgcctagcgatgcagctattgccttgattgacgacgttgacggatcctcggtagatgacccattatggatatgtctatggggcggcgcagcggtgcttgctgaggcgctccaagaagtttccaaaagtcgtgatacagctggtgtttcggacttcgtctctaaaatcagagtttattcgatctctgatcaagacgatgctggtgcttggattcgcgagaactatccttctctttggtacattgtatcgcttcatggattcggcgactatacccaggcgggctggaacggcatttcgggagaacaatatcgacacttcgacaagggtgggccagattcaaccctcgttagtaatgattggctacagacacacatacgcgtcggcgagcttggtggtgcgtactacttgaactacagctatataatggagggagatactccgtcgtttttccctctgatacccaacggccttggcgatcgcaatcacccagaatgggggtcatggggtggtcgttttggcttggttgatcaatccggacggtatccgttgtacagcgacgtaagcgacgccgcaattggtgtcgatggcgagatccatgttagttcgtttgcgggtatttggcgatggcgaaaggggtaccagtacgactttgccagccgcatgcagtggactttaagttgcaactacggcgacagtaaccacagccccgtcatggttgtaaacgggacatgcggaccagatgccttagagtacaagtacagactgggggacgtagtagttttagacgcgtccgagagctgggaccccgacggcgatcaattgacgtacgagtggtttcattaccgcgacgccgcgcagcgttaccaggagggaaccattgctccagtcagcacggatgtagctttcattcccgtcaacgataccaccggtgtgatgcgggtccagccgcttcaaaatattgtgagtcctttctcaatcgctttatag

SEQ ID NO: 776 - protein, 411 aa, Muscodor strobelii
  misc_feature: SGI Peptide ID NO. 559837
  misc_feature (1)..(255): Pfam Id: PF07632 Pfam Desc: Domain of function (DUF1593)
  misc_feature (1)..(374): NCBI GI: 256721109 Blast Desc: NECHADRAFT_54454 [Nectria haematococca mpVI 77-13-4]
  misc_feature (1)..(374): NCBI GI: 46127475 Blast Desc: FG08115.1 [Gibberella zeae PH-1]
  misc_feature (2)..(368): NCBI GI: 199429549 Blast Desc: DEHA2B00550p [Debaryomyces hansenii]
  misc_feature (2)..(366): NCBI GI: 261353335 Blast Desc: cellulose-binding protein [Verticillium albo-atrum VaMs.102]
  misc_feature (2)..(368): NCBI GI: 50410787 Blast Desc: DEHA0B00539g [Debaryomyces hansenii CBS767]
  misc_feature (2)..(366): NCBI GI: 115385166 Blast Desc: conserved [Aspergillus terreus NIH2624] gi|114196822|gb|EAU38522.1| conserved [Aspergillus terreus NIH2624]
  misc_feature (2)..(366): NCBI GI: 256720656 Blast Desc: NECHADRAFT_50078 [Nectria haematococca mpVI 77-13-4]
  misc_feature (2)..(405): NCBI GI: 39954097 Blast Desc: MGG_08892 [Magnaporthe grisea 70-15] gi|145021164|gb|EDK05293.1| MGG_08892 [Magnaporthe grisea 70-15]
  misc_feature (2)..(377): NCBI GI: 145234246 Blast Desc: An02g13630 [Aspergillus niger] gi|134057439|emb|CAK37947.1| protein product [Aspergillus niger]
  misc_feature (2)..(368): NCBI GI: 256733034 Blast Desc: NECHADRAFT_38358 [Nectria haematococca mpVI 77-13-4]
MSLVRLLTYSNELDIRTIAVVTSVWKNSSIDTPTVHDVLGGYGKVVSNLNAHVPESGRYPSAESLTEKIKVGHPVYGLANLELSPSDAAIALIDDVDGSSVDDPLWICLWGGAAVLAEALQEVSKSRDTAGVSDFVSKIRVYSISDQDDAGAWIRENYPSLWYIVSLHGFGDYTQAGWNGISGEQYRHFDKGGPDSTLVSNDWLQTHIRVGELGGAYYLNYSYIMEGDTPSFFPLIPNGLGDRNHPEWGSWGGRFGLVDQSGRYPLYSDVSDAAIGVDGEIHVSSFAGIWRWRKGYQYDFASRMQWTLSCNYGDSNHSPVMVVNGTCGPDALEYKYRLGDVVVLDASESWDPDGDQLTYEWFHYRDAAQRYQEGTIAPVSTDVAFIPVNDTTGVMRVQPLQNIVSPFSIAL

SEQ ID NO: 777 - DNA, 486 bp, Muscodor strobelii
  misc_feature: SGI EST ID NO. CUFF.2147.0
  misc_feature: Variant of the nucleotide sequence at SEQ ID NO 775
caatgggagatggacatgccgttgcatataccgaaagtcacaatggacttctctgatctgttacctctgtcggccttctccccgagagattgaagatataaacaaggaagcaacgcaatcagtgacaatgggtagttcgacaagtactactactattttcatggcacgaaggctacgagactcaccatgaggttactaagtgcttctcgaataattttgctgctttcgacgttaaacactcaaatttggtactgcattgcagctaacagatcctcaaaacaatgcgagtcatcgcgctatgagcacaaagctcgcaccttcattgcgacggatatcagcaatgaaccagacgaccaaatgtcgcttgtcagacttctcacatactcgaacgagctagacattcggacgattgccgttgtgacatcggtatggaagaatagttcaattgatacgcccactgttcatgacgttctgggtgggtacggc

SEQ ID NO: 778 - DNA, 3420 bp, Muscodor strobelii
  misc_feature: SGI cDNA ID NO. 559838
  misc_feature: Elevated expression when VOC is produced
  misc_feature: Encodes the peptide sequence at SEQ ID NO 779
atgcaggttgaaaagcagacacttctggaggccatcacaccggtcaaaatttccagcggtaggaatgagacttgtatgaccggcgcatggaagccgtggagtctgcgtgcacctgcgttggtcatcttcgtcgtcgcatctttgctgcttgctgccctcgtacatgttcttgctgaccggagtcagagagatggcgcacttgcgatcaccacgtctcttgaagacttatcaactgtgaccattttcggatttctattcctcccgactatcatcgctgttctgtacgggctttacttcagctggattgatttggatgcaaaacgtatgcagccatgggtcgaattgtcaaggcgagatgttgctacggcgcaagactctctaatgctcgagtaccccttctctttcattgccgccgtgccattcatagcagctcgaaacaagcattggcttgtcttctgttctgcctctattctcataatagtggtctggttgatatcgccgctgcaggctgcaattttttctccagggcctgttactaccactcaaataatacctgcaactcggtcttcactattgccagttggacaacaaaagtctatacttcgtcaaaagatcctgatgcgggcctacgctacgacatggcttaatcagagtctcccagcttggacgtcccatgactccacctttcttcctgtcacgccgcaggcggagtttcgcgcatcggaacctggagcaagattaacggtgaatacaacccggttgtgggcggacgtatcttgcttcccagcgcttgcgcgctataatagaaaagcaaacagtacgtacgacgacgttgctggtggctacgatttcgaggatgacaaaggatatgcggttaaatcctatgtgatctgggatactcctgcatacgacttgcaatacatcagtgatcttgaaaaccatcgattgatgtctgtcttctctaagttcgatcacaaggagaaggtaggggatgactacgcatacttctctaacgtcaccgccacttcctgttatttcaaatacctaaaacaggaagtagtagtcacggtgtccgccacgagctttgagccagatatgagttctattcaaccacttggcactgttgagaccttgatggacgcagaattcgacagcacagcctttgaagcacttgtatacgatagtgtgtggggggaacctgacgtttcggcaacagacgaggacgccttcataatcggttatcgagctccagtacagactgatcctcccctcgaatctgttgaccccgggcctgtaatcgcgttagggtcccagaactatacgcttgcagagtatagcaatcaaacagtcttggaatcaggcagtcgcaatatgcatcaactcatcttcgccctggcagcgcaacaaatgactaaaatcgacgcgggaaccagcaacaatgatacaatcgaggtttcgaatccaatgtttgggatcattgtcagtagacctttggcatatacccttgaggcgctacttttgcttgtagcaatatcgactttagcgcttttgttggtttcgaggaacagtccaacattgctacagtcagacccctcgtccatccaaagtctcgttagtcttgcacggaatagtaaacaactcatagatgtcttctctaccttggatgcggacagcaaaaaggagatgaaaaggaagctggaagggtcaaagtgcatactcctgcctgacactctttcccaagatgcactgaccttagccattgacgtgccaccactttccacccgggagggagacgtagccgatgcaaacatagcgcagtacaaaccagatgtcccgttgatgctcaaaacatactctggaatacttctcattctttacatggcctctgcacttctagttttggccgtatttgaccgacttgcctcgccccacggtcttccgcggccgactgagaacagggtggcgctacaaattctagagcgctatctaccggtcgcatttgcaacattgctgcagccattatgggccttagtcaatcgttttctctgcctgatacagccatacgagtacttgcaatctggtcataagaaactatcgcttactagagattatatgtcgctaccgcccgagttttctgtttggcgtgccacgcggtcacaccaatacctgcttgcacttgtgtgcgcaaactcgttgctcataaatttgcttgccattgggcttggtggtcttattgttacgtgggcaaatatcactggtggcgcggaccttccagcctggcttgatgacgagttcttctacatccctctctttggcgaaggcagtaatatgccaactgctgacacatacactgccaacacttatggtataggtatttcgcccacatgtgtcgacttatcggatgaccaccctggagtgagatactccttcgattcgaaactagagaaatacccaatcttgaacgtcacactcgacgactcagatcccacccacggaggatgcgttggaatagagtatataaacagcgatgcagaagacgacggaccagttgccgcttttgaaatcgcgcgactgaaaaaacgcggtgcatcctactacgaccatgatcctgtatgcggtagtagtctagtgttcggattatttagaaactacgacccatcccatgatagtgcagagataacaccaacggcctactctctcactctctgtcaaccccgagttatatacgcgccatttcgcataacggtcgacaagagcggtcacgtactacgagctcacaaacttggtgatgagcaaactcttgattcagaagatagagttaatagtacctcgaagtttctgactatacccaacggaatcttgtccggaaagtctggctggagaagcgacacaagcgccagagactggaccgagtacctaatacagcatgagatgggcaacgcctcgatgtttgatccgtcgaaaagcatgcccagccccaacatcacaatccctgtgttcgaaagagttttcaagaagacatctgcagcgtttctgcagcagaaccgggccatttttagcataagcaattcgacagaatctgtctcgcatggcagtgcgcagaaaaccgagatccgcatcgttttcttaaggagctccttcgtcatttcagtcaccatactctccatcactatcgcgacagcaatcctgctgtacagtcgtggtttgaaacttaatcttccccgcttacctacaaccattggctccgtcctggcctatattgcggcgagttcactgagcgatccagaatcatatgatatatcgacgccgtcgcagcgaagtactgccgtcaaaacggtgagcttcggccgctatgtaggtaccgatggaaaaccccatattgggatagaggcagatccgtatgtgatactcatgaaatga

SEQ ID NO: 779 - protein, 1139 aa, Muscodor strobelii
  misc_feature: SGI Peptide ID NO. 559838
  misc_feature (4)..(1136): NCBI GI: 46123417 Blast Desc: FG06086.1 [Gibberella zeae PH-1]
  misc_feature (7)..(1136): NCBI GI: 256731029 Blast Desc: NECHADRAFT_48925 [Nectria haematococca mpVI 77-13-4]
  misc_feature (29)..(1136): NCBI GI: 261355577 Blast Desc: conserved [Verticillium albo-atrum VaMs.102]
  misc_feature (190)..(1135): NCBI GI: 85100308 Blast Desc: NCU01382 [Neurospora crassa OR74A] gi|16944581|emb|CAC18275.2| [Neurospora crassa] gi|28922472|gb|EAA31703.1| [Neurospora crassa OR74A]
  misc_feature (29)..(1132): NCBI GI: 121716166 Blast Desc: conserved [Aspergillus clavatus NRRL 1] gi|119403849|gb|EAW14266.1| conserved [Aspergillus clavatus NRRL 1]
  misc_feature (29)..(1135): NCBI GI: 238490252 Blast Desc: conserved [Aspergillus flavus NRRL3357] gi|220696776|gb|EED53117.1| conserved [Aspergillus flavus NRRL3357]
  misc_feature (744)..(1135): NCBI GI: 189210064 Blast Desc: [Pyrenophora tritici-repentis Pt-1C-BFP] gi|187977457|gb|EDU44083.1| [Pyrenophora tritici-repentis Pt-1C-BFP]
  misc_feature (29)..(1130): NCBI GI: 169774217 Blast Desc: [Aspergillus oryzae RIB40] gi|83769439|dbj|BAE59574.1| protein product [Aspergillus oryzae]
  misc_feature (29)..(1130): NCBI GI: 238497281 Blast Desc: conserved [Aspergillus flavus NRRL3357] gi|220694756|gb|EED51100.1| conserved [Aspergillus flavus NRRL3357]
  misc_feature (29)..(167): NCBI GI: 238504858 Blast Desc: conserved [Aspergillus flavus NRRL3357] gi|220689772|gb|EED46122.1| conserved [Aspergillus flavus NRRL3357]
  misc_feature: Useful for introducing or modulating the production of volatile compounds
MQVEKQTLLEAITPVKISSGRNETCMTGAWKPWSLRAPALVIFVVASLLLAALVHVLADRSQRDGALAITTSLEDLSTVTIFGFLFLPTIIAVLYGLYFSWIDLDAKRMQPWVELSRRDVATAQDSLMLEYPFSFIAAVPFIAARNKHWLVFCSASILIIVVWLISPLQAAIFSPGPVTTTQIIPATRSSLLPVGQQKSILRQKILMRAYATTWLNQSLPAWTSHDSTFLPVTPQAEFRASEPGARLTVNTTRLWADVSCFPALARYNRKANSTYDDVAGGYDFEDDKGYAVKSYVIWDTPAYDLQYISDLENHRLMSVFSKFDHKEKVGDDYAYFSNVTATSCYFKYLKQEVVVTVSATSFEPDMSSIQPLGTVETLMDAEFDSTAFEALVYDSVWGEPDVSATDEDAFIIGYRAPVQTDPPLESVDPGPVIALGSQNYTLAEYSNQTVLESGSRNMHQLIFALAAQQMTKIDAGTSNNDTIEVSNPMFGIIVSRPLAYTLEALLLLVAISTLALLLVSRNSPTLLQSDPSSIQSLVSLARNSKQLIDVFSTLDADSKKEMKRKLEGSKCILLPDTLSQDALTLAIDVPPLSTREGDVADANIAQYKPDVPLMLKTYSGILLILYMASALLVLAVFDRLASPHGLPRPTENRVALQILERYLPVAFATLLQPLWALVNRFLCLIQPYEYLQSGHKKLSLTRDYMSLPPEFSVWRATRSHQYLLALVCANSLLINLLAIGLGGLIVTWANITGGADLPAWLDDEFFYIPLFGEGSNMPTADTYTANTYGIGISPTCVDLSDDHPGVRYSFDSKLEKYPILNVTLDDSDPTHGGCVGIEYINSDAEDDGPVAAFEIARLKKRGASYYDHDPVCGSSLVFGLFRNYDPSHDSAEITPTAYSLTLCQPRVIYAPFRITVDKSGHVLRAHKLGDEQTLDSEDRVNSTSKFLTIPNGILSGKSGWRSDTSARDWTEYLIQHEMGNASMFDPSKSMPSPNITIPVFERVFKKTSAAFLQQNRAIFSISNSTESVSHGSAQKTEIRIVFLRSSFVISVTILSITIATAILLYSRGLKLNLPRLPTTIGSVLAYIAASSLSDPESYDISTPSQRSTAVKTVSFGRYVGTDGKPHIGIEADPYVILMK

SEQ ID NO: 780 - DNA, 1834 bp, Muscodor strobelii
  misc_feature: SGI EST ID NO. CUFF.2154.0
  misc_feature: Variant of the nucleotide sequence at SEQ ID NO 778
ctcaaataatacctgcaactcggtcttcactattgccagttggacaacaaaagtctatacttcgtcaaaagatcctgatgcgggcctacgctacgacatggcttaatcagagtctcccagcttggacgtcccatgactccacctttcttcctgtcacgccgcaggcggagtttcgcgcatcggaacctggagcaagattaacggtgaatacaacccggttgtgggcggacgtatcttgcttcccagcgcttgcgcgctataatagaaaagcaaacagtacgtacgacgacgttgctggtggctacgatttcgaggatgacaaaggatatgcggttaaatcctatgtgatctgggatactcctgcatacgacttgcaatacatcagtgatcttgaaaaccatcgattgatgtctgtcttctctaagttcgatcacaaggagaaggtaggggatgactacgcatacttctctaacgtcaccgccacttcctgttatttcaaatacctaaaacaggaagtagtagtcacggtgtccgccacgagctttgagccagatatgagttctattcaaccacttggcactgttgagaccttgatggacgcagaattcgacagcacagcctttgaagcacttgtatacgatagtgtgtggggggaacctgacgtttcggcaacagacgaggacgccttcataatcggttatcgagctccagtacagactgatcctcccctcgaatctgttgaccccgggcctgtaatcgcgttagggtcccagaactatacgcttgcagagtatagcaatcaaacagtcttggaatcaggcagtcgcaatatgcatcaactcatcttcgccctggcagcgcaacaaatgactaaaatcgacgcgggaaccagcaacaatgatacaatcgaggtttcgaatccaatgtttgggatcattgtcagtagacctttggcatatacccttgaggcgctacttttgcttgtagcaatatcgactttagcgcttttgttggtttcgaggaacagtccaacattgctacagtcagacccctcgtccatccaaagtctcgttagtcttgcacggaatagtaaacaactcatagatgtcttctctaccttggatgcggacagcaaaaaggagatgaaaaggaagctggaagggtcaaagtgcatactcctgcctgacactctttcccaagatgcactgaccttagccattgacgtgccaccactttccacccgggagggagacgtagccgatgcaaacatagcgcagtacaaaccagatgtcccgttgatgctcaaaacatactctggaatacttctcattctttacatggcctctgcacttctagttttggccgtatttgaccgacttgcctcgccccacggtcttccgcggccgactgagaacagggtggcgctacaaattctagagcgctatctaccggtcgcatttgcaacattgctgcagccattatgggccttagtcaatcgttttctctgcctgatacagccatacgagtacttgcaatctggtcataagaaactatcgcttactagagattatatgtcgctaccgcccgagttttctgtttggcgtgccacgcggtcacaccaatacctgcttgcacttgtgtgcgcaaactcgttgctcataaatttgcttgccattgggcttggtggtcttgtgagcgaggctctgaaggtccttgatgttcctattgagtttaacattacgatgtcccctgcgttgggcgacaggtggtttcaaaaattatcgtctgatcttcaagcaacatcgagttctgacctttgggaccattacgatgc

SEQ ID NO: 781 - DNA, 1221 bp, Muscodor strobelii
  misc_feature: SGI cDNA ID NO. 559839
  misc_feature: Encodes the peptide sequence at SEQ ID NO 782
atggcggttttccgcaggctgtcgctagacagcatgcctaacgagattttcggcatgattgttggcgaggcgataagtgactacgacgacgacggggaccgtattatcaacggatcgctgatagcgactgttagcaagagattccaggatgttgtcgaatcctatacattcaagaccttacgtatcaaccagtatgacattgaccgagccgttaaagttctagaggcgcggaatccggctcggcacctctatgtcagatgcttgaaatttgatatcgtactggacgactacgaatcgtgggagtgcacggtgcccgaggactgggacacgatgcttaacaacaactattgtcttacgagttgcctgacacaacttttcgcaaagcttcttcacgtctggcctaaaaatgggagccttcgtctgcagctgtctagtttttcaaagtcagatgccagacatacttacaaggaggttgtgtatcgtcatcaatggaaccatgacatccgaggagatttgggagactcgcgcacgtatgcttcaaccctgggattcctgaacgaaattccgacccttccttcgccggcagtcaggagcatttcgactatcgactcgtgcgatcgcactattggtgcgacggcaattacggcattgttcatgatgatgccgaatttagaggacgtgaacatccaatttctcgatatctacagatatatgttttcgcctggtcattttcaagatcctacgcatagaagtaagctgttctcttaccttatcatatgttcaagtccggcagaggtcatttttttccctacgcggacgtacatcaccgctatcactgatcaagaaactaatccgcctgcagagatggccagcgctttgaatctgatgccgaaaacagtcagaacaatgaagtttacagttaaatccgccacacccgctaaccacgactctcttggacaagacctcaccgacctcaaggacggcagggacgttttaaccgagtcatacagaagcgtctcacaacaaatgggaaaagtcgcagtcagcggtatgcttggctgcccggagctcttctggccatcatatctcaacgaagattcccccgagccaagatggccggatttagtagagatggacgtgcagttccatatcatgaatcccaatggacaatggctgtttaaggcagactcggatccggcacgagcggcacgggtggaatag

SEQ ID NO: 782 - protein, 406 aa, Muscodor strobelii
  misc_feature: SGI Peptide ID NO. 559839
  misc_feature (4)..(395): NCBI GI: 256733582 Blast Desc: NECHADRAFT_77848 [Nectria haematococca mpVI 77-13-4]
  misc_feature (41)..(392): NCBI GI: 256720854 Blast Desc: NECHADRAFT_85576 [Nectria haematococca mpVI 77-13-4]
  misc_feature (290)..(396): NCBI GI: 115398468 Blast Desc: [Aspergillus terreus NIH2624] gi|114191706|gb|EAU33406.1| [Aspergillus terreus NIH2624]
  misc_feature (11)..(155): NCBI GI: 46117418 Blast Desc: FG04551.1 [Gibberella zeae PH-1]
  misc_feature (12)..(153): NCBI GI: 256724999 Blast Desc: NECHADRAFT_28177 [Nectria haematococca mpVI 77-13-4]
  misc_feature (4)..(156): NCBI GI: 154297056 Blast Desc: BC1G_12187 [Botryotinia fuckeliana B05.10] gi|150843016|gb|EDN18209.1| BC1G_12187 [Botryotinia fuckeliana B05.10]
  misc_feature (42)..(155): NCBI GI: 256723910 Blast Desc: NECHADRAFT_92265 [Nectria haematococca mpVI 77-13-4]
  misc_feature (9)..(144): NCBI GI: 256724182 Blast Desc: [Nectria haematococca mpVI 77-13-4]
MAVFRRLSLDSMPNEIFGMIVGEAISDYDDDGDRIINGSLIATVSKRFQDVVESYTFKTLRINQYDIDRAVKVLEARNPARHLYVRCLKFDIVLDDYESWECTVPEDWDTMLNNNYCLTSCLTQLFAKLLHVWPKNGSLRLQLSSFSKSDARHTYKEVVYRHQWNHDIRGDLGDSRTYASTLGFLNEIPTLPSPAVRSISTIDSCDRTIGATAITALFMMMPNLEDVNIQFLDIYRYMFSPGHFQDPTHRSKLFSYLIICSSPAEVIFFPTRTYITAITDQETNPPAEMASALNLMPKTVRTMKFTVKSATPANHDSLGQDLTDLKDGRDVLTESYRSVSQQMGKVAVSGMLGCPELFWPSYLNEDSPEPRWPDLVEMDVQFHIMNPNGQWLFKADSDPARAARVE

SEQ ID NO: 783 - DNA, 1908 bp, Muscodor strobelii
  misc_feature: SGI cDNA ID NO. 559840
  misc_feature: Encodes the peptide sequence at SEQ ID NO 784
atgggccgttcgctacgaaataccattcgcaaaaaagcgggtgctccgggcaaagcctcgtcaacggagagcggcattgctgcgaacttgagaaagagaaaaacacctcagacgccaagcgacgcgtcgcaagacgaagatgaggaattcaaaatctcggaatctgagccagaagtagctgcgaagaaacgcaaaatagcttcacgcgacaagaaagtgaaagactcagaacttcatcaacaattattcagtcgcgataaactgccagcggatccttcaccgtgccacttacccaggcgcatacacagcccatcttatcacaggcctcttcttctcgacagtccgaagggacggaaagacttccttaaatggttcgagggcattcatcatgcccgctcaatgccatggcgaaaagtgtggatagactcgcgccccgctggcaagcaactagactctaagcttcgtgaaaggctggagcggcgcgcgtatgaagtctggatcagtgagattatgcttcagcaaacgcgtgttgctgttgttattgactactggaataagtggatagacaaatggcctagtattcatgacctagctgctgctgatgcggatgatgttcttgcggcgtggaggggtttagggtactacagccgggctacgaggatacatgaagcagcgaagaaagtctgcggcgattcggcgttaaagggtcttctgcccgataatgttgaagaacttgtgaagaaagtccctggcgttggcccatataccgctggtgcaatttcagcaattgttttcggtagagcggcaccgatggtcgatggcaatgtgttgcgtgttctcagtcggcagttaggcatattcggagatgtgaaagcagataaatctgtcatcgatctgctatgggcagcagcagctagtcttgttaaggctgttgctctcgacggagacgagattgagaagaacgatgcaccggaggatgtcattagtgagcgaccaggtcaatggggccaagcactcatggagctcggtagtacgatatgtaccccgaaaccgaactgtgacgaatgtcctatcactgcaacctgtcgagcatacagtgaaggtctacagttagcaatcaagaagggtctcgcaccagatgatatgctatccggaggctctaatatcactcgagtccctgatattgaagactcgtgcaatttctgcaagccattcgaagaagcaatagaaaatgccggagacgaacacgacgaagaggttaaagctgcttcaaagaagaaagctcagcctgcaaagacgaccaatacgaaatcattaagacaagcaagtctctcgaacttcttcacaggatctacagaatcaagcaaaaagcccaaaccagcgctctccgagcttacgccagcaggactgaacacgatcgtcgatcacgcaagaaaattcccggtcaaggtgatcaagaaagcggtcagagaggaagagacgcttgtttgcgctattcggcggaatgacggacgatacttgatccacagacgaccacagaagggcctacttgccggcctctgggaattcccaagtggcgaaatcgatgaggggcaagagaacagtgtcaaggctcacaagcgagctgctcacctctacgcatcaggtgttctggattcggctctcaggcgttactcaaagacccttccgcagttgaagttggttgataagcttggtagtgtaccatggctattctcccatcttaagctgactatgcacgtattcctttttgagcttgatttatctgacaccgagattgatgccctcccggaaacggatgatcgatggagcgaaaatattgaagacgaaagcatgggcacggggatgcggaaatgctgggaattggtgcggaatgcaacgagtgactga

SEQ ID NO: 784 - protein, 635 aa, Muscodor strobelii
  misc_feature: SGI Peptide ID NO. 559840
  misc_feature (167)..(303): Pfam Id: PF00730 Pfam Desc: HhH-GPD superfamily base excision DNA repair protein
  misc_feature (233)..(263): Pfam Id: PF00633 Pfam Desc: Helix-hairpin-helix motif
  misc_feature (167)..(286): Pfam Id: PF00730 Pfam Desc: HhH-GPD superfamily base excision DNA repair protein
  misc_feature (19)..(632): NCBI GI: 256731834 Blast Desc: NECHADRAFT_93757 [Nectria haematococca mpVI 77-13-4]
  misc_feature (47)..(631): NCBI GI: 46137549 Blast Desc: FG10290.1 [Gibberella zeae PH-1]
  misc_feature (97)..(630): NCBI GI: 171680616 Blast Desc: protein product [Podospora anserina] gi|170939935|emb|CAP65161.1| protein product [Podospora anserina]
  misc_feature (100)..(630): NCBI GI: 116178766 Blast Desc: CHGG_00011 [Chaetomium globosum CBS 148.51] gi|88184308|gb|EAQ91776.1| CHGG_00011 [Chaetomium globosum CBS 148.51]
  misc_feature (171)..(631): NCBI GI: 261354843 Blast Desc: A/G-specific adenine DNA glycosylase [Verticillium albo-atrum VaMs.102]
  misc_feature (93)..(525): NCBI GI: 71019741 Blast Desc: UM03954.1 [Ustilago maydis 521] gi|46099866|gb|EAK85099.1| UM03954.1 [Ustilago maydis 521]
  misc_feature (100)..(631): NCBI GI: 164658303 Blast Desc: MGL_2659 [Malassezia globosa CBS 7966] gi|159104172|gb|EDP43063.1| MGL_2659 [Malassezia globosa CBS 7966]
  misc_feature (105)..(632): NCBI GI: 164428361 Blast Desc: NCU11220 [Neurospora crassa OR74A] gi|157072116|gb|EDO65359.1| conserved [Neurospora crassa OR74A]
  misc_feature (98)..(493): NCBI GI: 169605847 Blast Desc: SNOG_05954 [Phaeosphaeria nodorum SN15] gi|160706853|gb|EAT87018.2| SNOG_05954 [Phaeosphaeria nodorum SN15]
  misc_feature (134)..(629): NCBI GI: 189197913 Blast Desc: A/G-specific adenine glycosylase [Pyrenophora tritici-repentis Pt-1C-BFP] gi|187981242|gb|EDU47868.1| A/G-specific adenine glycosylase [Pyrenophora tritici-repentis
MGRSLRNTIRKKAGAPGKASSTESGIAANLRKRKTPQTPSDASQDEDEEFKISESEPEVAAKKRKIASRDKKVKDSELHQQLFSRDKLPADPSPCHLPRRIHSPSYHRPLLLDSPKGRKDFLKWFEGIHHARSMPWRKVWIDSRPAGKQLDSKLRERLERRAYEVWISEIMLQQTRVAVVIDYWNKWIDKWPSIHDLAAADADDVLAAWRGLGYYSRATRIHEAAKKVCGDSALKGLLPDNVEELVKKVPGVGPYTAGAISAIVFGRAAPMVDGNVLRVLSRQLGIFGDVKADKSVIDLLWAAAASLVKAVALDGDEIEKNDAPEDVISERPGQWGQALMELGSTICTPKPNCDECPITATCRAYSEGLQLAIKKGLAPDDMLSGGSNITRVPDIEDSCNFCKPFEEAIENAGDEHDEEVKAASKKKAQPAKTTNTKSLRQASLSNFFTGSTESSKKPKPALSELTPAGLNTIVDHARKFPVKVIKKAVREEETLVCAIRRNDGRYLIHRRPQKGLLAGLWEFPSGEIDEGQENSVKAHKRAAHLYASGVLDSALRRYSKTLPQLKLVDKLGSVPWLFSHLKLTMHVFLFELDLSDTEIDALPETDDRWSENIEDESMGTGMRKCWELVRNATSD

SEQ ID NO: 785 - DNA, 5203 bp, Muscodor strobelii
  misc_feature: SGI EST ID NO. CUFF.2159.0
  misc_feature: Variant of the nucleotide sequence at SEQ ID NO 783
atcgccatgggccgttcgctacgaaataccattcgcaaaaaagcgggtgctccgggcaaagcctcgtcaacggagagcggcattgctgcgaacttgagaaagagaaaaacacctcagacgccaagcgacgcgtcgcaagacgaagatgaggaattcaaaatctcggaatctgagccagaagtagctgcgaagaaacgcaaaatagcttcacgcgacaagaaagtgaaagactcagaacttcatcaacaattattcagtcgcgataaactgccagcggatccttcaccgtgccacttacccaggcgcatacacagcccatcttatcacaggcctcttcttctcgacagtccgaagggacggaaagacttccttaaatggttcgagggcattcatcatgcccgctcaatgccatggcgaaaagtgtggatagactcgcgccccgctggcaagcaactagactctaagcttcgtgaaaggctggagcggcgcgcgtatgaagtctggatcagtgagattatgcttcagcaaacgcgtgttgctgttgttattgactactggaataagtggatagacaaatggcctagtattcatgacctagctgctgctgatgcggatgatgttcttgcggcgtggaggggtttagggtactacagccgggctacgaggatacatgaagcagcgaagaaagtctgcggcgattcggcgttaaagggtcttctgcccgataatgttgaagaacttgtgaagaaagtccctggcgttggcccatataccgctggtgcaatttcagcaattgttttcggtagagcggcaccgatggtcgatggcaatgtgttgcgtgttctcagtcggcagttaggcatattcggagatgtgaaagcagataaatctgtcatcgatctgctatgggcagcagcagctagtcttgttaaggctgttgctctcgacggagacgagattgagaagaacgatgcaccggaggatgtcattagtgagcgaccaggtcaatggggccaagcactcatggagctcggtagtacgatatgtaccccgaaaccgaactgtgacgaatgtcctatcactgcaacctgtcgagcatacagtgaaggtctacagttagcaatcaagaagggtctcgcaccagatgatatgctatccggaggctctaatatcactcgagtccctgatattgaagactcgtgcaatttctgcaagccattcgaagaagcaatagaaaatgccggagacgaacacgacgaagaggttaaagctgcttcaaagaagaaagctcagcctgcaaagacgaccaatacgaaatcattaagacaagcaagtctctcgaacttcttcacaggatctacagaatcaagcaaaaagcccaaaccagcgctctccgagcttacgccagcaggactgaacacgatcgtcgatcacgcaagaaaattcccggtcaaggtgatcaagaaagcggtcagagaggaagagacgcttgtttgcgctattcggcggaatgacggacgatacttgatccacagacgaccacagaagggcctacttgccggcctctgggaattcccaagtggcgaaatcgatgaggggcaagagaacagtgtcaaggctcacaagcgagctgctcacctctacgcatcaggtgttctggattcggctctcaggcgttactcaaagacccttccgcagttgaagttggttgataagcttggtagtgtaccatggctattctcccatcttaagctgactatgcacgtattcctttttgagcttgatttatctgacaccgagattgatgccctcccggaaacggatgatcgatggagcgaaaatattgaagacgaaagcatgggcacggggatgcggaaatgctgggaattggtgcggaatgcaacgagtgactgagttggtttcacaattacggcctaagcgtacagcaacatttgtctcattactctgcagtcggtttaattgacaaaaatcatcgtccggtctcattagtcgcatgacgaaagccaggatcctgcatcctttcctcgactgctcgataaccggattatccgaggaccacatcagtaaaaaattatggagtatgctcagtatacggattgaacgtatgaccttcgcagtgtgattgcgatgctctaaccatctgagctaaccgaccaatttgttattaagagctgaaggcctgttggcctatttcacgtctgatctgaacgtaagggattggctggacgcttggtacaggcctggcttcccaactctcctcatccaggatgagggtagtgtttacctccgaagcacgacgataataacccttgacccctgtctggctccccggcatcccataagaagagaaccacatgtctcccgccatcgagtcgagacccggggtaccttctacaattgtagaattccagtggtaatatgaggttacgttctgccttgtatccatacctccaggtccagccgaaattcctgtgagaaatgggagcatgctgataccatgagtcgatttgcttctatctgccaagcatagaacagaccccggattggttgttgcgccttgttgttggaccttgtatgcactgaaaaggttcattgggtacgtgtaccgagatatgatgtttgacgccgagcttacatagctaccattcgaaagcatggcaagtgtttggttatagccgagttctgttatgttctgaatgttggtgtatgagacattctgagcccaagtgacgagccgactctgcccgccgttagtgatggtagcagctgctgagatgtttcgatgggcgctgaaagcgaaattgagagacttgttcgatggtggattatgggtggtgtcgaattcgatctgcactgattgaagcgtaagcatatacgatgatcctattgagaaactttggactgttgtctgctcgactgtgtcatccacccagacgaaaacagatcccgatacccaccaattctgcccaactggtccaaggccgccatcggtagcattatcccatcctacaacagacagtttgaactcgtgtggctctccgtctgtcaatttcccgacgtgtggggtaacatcgatctcaaatgacggcagctcataggcatcgatgccaacaattggtttccaagccccggggtcgacgccaccagtgaacaatattggaaatggccacgatacgcccacaaggctgccatcaatgagcagctggacctcgcgaaatggactatatccgtacagccagccaggattgtccgggaaagtattgacatattcacttggcacattcgtgaaccaaaactcctcttccgcattcccagatgccatgatcgagaccacaactgtctgagcgttacgtggtatcgttatgttcacagcaccagtttgatccggcagcgaaaagagcgacgttgcattttgagacgacaatgcggttgaaatagcatagatgtgctcggcgggttgaagtcctttgccttgatagacatcattgaagaaccatgcttcaagtgtgacgttgaagaagcccgtatatcggtctccgtcaattacgttgtttagttcgaatatgatcttctgtggcgagtctgttcgcaatatgctatcccaaattgtcatgtctttctcgaatgaccaatggatcccctcctgcgttggcattgcggttgatgttcgccagacttcgacgtcaccgagccagagtgtcgccagacgatcatattggcgtccttgggagacaacgctcagattgaagattgtggtggtatagttgcagtcaccgggtttagaataccaaccgacgtatggtgccccataactgttcccaaattcatggtagaagacctgttgatgacatgctgcatcactccgatctaagcggggaggcgtcgctgcctgtataacttcaagcgtagcttggacgtgcacccagaagagtgcaaacaacacgaacagaggaacacaatacatacttctaaataattccgccatgaacaatgatgaatacctcacagcaccggtcaccatgaagtccttcgcagttgcagattgcgggaagtcgccaagattcaaggtcgcatttgagatggggaggggcattgagcatatcagcggacgattgtcaaaaatggaaggcagtatcggtttaacgcggtatcttcacatcgtgccttctcgtcgctcaaattattgaactatttgtgggcacctcgtcgcactttaccttcacatagaacaacgagatattcaagctctttcggtgagctgtgcgacacgaatccatgacttgtcggacgcgctggcggtactacccattgggaggttatgaaagtcggtttcaaagctgagaataacttcaagattatgttatgacgcaatcaaaaagctatcccagtaatcgactcgtgttcctaggatttgtaaattatgatatatctatgctgctatccggtgtattgcctgtcattgtaatgtgttcgaagtccctccagacatgctgtctatctaccagtattccctgtcgtcgattctgcatcgctgacatcctcatccactaccttacctatacggaattcctgcttggctcccaacaaccatgccactcgcaacgacctgaagctacgttcctttaaggatggccccatctttacgaccagggaaccgtcagggagcgaagcgcgccgctgttcttcgctcgactcagacaacatcttgcttatgaagttgatgaatatcatcctcagatcccaatcaccattggaacatcttgaagaagccaggctttctcgcgttacaatgtggcaagaccacttctctttaccagccacggccttcctaactccaaagaagacgaaatacccgctcattcgttcactcaggtggcgaatctctaagagactggcgaaagtatcgttctgcccgccgcggatcggcgacaaatgtagaacgctttgctggaagtcaaacatacccggagggaaagtgtctaaatctggtgtttctatgaaatgggcttcatcaccagagttaatcggactcatgaaaccgatagctttcgatccttcaaaaagtctcgtattggttgtctccatcagcatcagaacgccgtaggctgcaacagaaagttgaacagctggatacacagtgaccaatcccggccgagtctttacaaatatttgatgacggcgc

SEQ ID NO: 786 - DNA, 1491 bp, Muscodor strobelii
  misc_feature: SGI cDNA ID NO. 559841
  misc_feature: Elevated expression when VOC is produced
  misc_feature: Encodes the peptide sequence at SEQ ID NO 787
atgccaacgcaggaggggatccattggtcattcgagaaagacatgacaatttgggatagcatattgcgaacagactcgccacagaagatcatattcgaactaaacaacgtaattgacggagaccgatatacgggcttcttcaacgtcacacttgaagcatggttcttcaatgatgtctatcaaggcaaaggacttcaacccgccgagcacatctatgctatttcaaccgcattgtcgtctcaaaatgcaacgtcgctcttttcgctgccggatcaaactggtgctgtgaacataacgataccacgtaacgctcagacagttgtggtctcgatcatggcatctgggaatgcggaagaggagttttggttcacgaatgtgccaagtgaatatgtcaatactttcccggacaatcctggctggctgtacggatatagtccatttcgcgaggtccagctgctcattgatggcagccttgtgggcgtatcgtggccatttccaatattgttcactggtggcgtcgaccccggggcttggaaaccaattgttggcatcgatgcctatgagctgccgtcatttgagatcgatgttaccccacacgtcgggaaattgacagacggagagccacacgagttcaaactgtctgttgtaggatgggataatgctaccgatggcggccttggaccagttgggcagaattggtgggtatcgggatctgttttcgtctgggtggatgacacagtcgagcagacaacagtccaaagtttctcaataggatcatcgtatatgcttacgcttcaatcagtgcagatcgaattcgacaccacccataatccaccatcgaacaagtctctcaatttcgctttcagcgcccatcgaaacatctcagcagctgctaccatcactaacggcgggcagagtcggctcgtcacttgggctcagaatgtctcatacaccaacattcagaacataacagaactcggctataaccaaacacttgccatgctttcgaatggtagctatgtaagctcggcgtcaaacatcatatctcggtacacgtacccaatgaaccttttcagtgcatacaaggtccaacaacaaggcgcaacaaccaatccggggtctgttctatgcttggcagatagaagcaaatcgactcatggtatcagcatgctcccatttctcacaggaatttcggctggacctggaggtatggatacaaggcagaacgtaacctcatattaccactggaattctacaattgtagaaggtaccccgggtctcgactcgatggcgggagacatgtggttctcttcttatgggatgccggggagccagacaggggtcaagggttattatcgtcgtgcttcggaggtaaacactaccctcatcctggatgaggagagttgggaagccaggcctgtaccaagcgtccagccaatcccttacgttcagatcagacgtgaaataggccaacaggccttcagctcttaa

SEQ ID NO: 787 - protein, 496 aa, Muscodor strobelii
  misc_feature: SGI Peptide ID NO. 559841
  misc_feature (2)..(469): NCBI GI: 189196202 Blast Desc: peptide-N4-(N-acetyl-beta-glucosaminyl)asparagine amidase A [Pyrenophora tritici-repentis Pt-1C-BFP] gi|187980318|gb|EDU46944.1| amidase A [Pyrenophora Pt-1C-BFP]
  misc_feature (2)..(419): NCBI GI: 212543377 Blast Desc: conserved [Penicillium marneffei ATCC 18224] gi|210066750|gb|EEA20843.1| conserved [Penicillium marneffei ATCC 18224]
  misc_feature (2)..(371): NCBI GI: 239611694 Blast Desc: peptide-N4-(N-acetyl-beta-glucosaminyl)asparagine amidase A [Ajellomyces dermatitidis ER-3]
  misc_feature (2)..(371): NCBI GI: 261201366 Blast Desc: peptide-N4-(N-acetyl-beta-glucosaminyl)asparagine amidase A [Ajellomyces dermatitidis SLH14081] gi|239592142|gb|EEQ74723.1| amidase A [Ajellomyces dermatitidis
  misc_feature (2)..(467): NCBI GI: 255938730 Blast Desc: Pc14g01410 [Penicillium chrysogenum Wisconsin 54-1255] gi|211584756|emb|CAP74282.1| Pc14g01410 [Penicillium chrysogenum Wisconsin 54-1255]
  misc_feature (2)..(378): NCBI GI: 226292427 Blast Desc: peptide-N4-(N-acetyl-beta-glucosaminyl)asparagine amidase A [Paracoccidioides brasiliensis Pb18]
  misc_feature (2)..(467): NCBI GI: 156043521 Blast Desc: SS1G_10764 [Sclerotinia sclerotiorum 1980] gi|154695151|gb|EDN94889.1| SS1G_10764 [Sclerotinia sclerotiorum 1980]
  misc_feature (2)..(467): NCBI GI: 154316707 Blast Desc: BC1G_03771 [Botryotinia fuckeliana B05.10] gi|150845383|gb|EDN20576.1| BC1G_03771 [Botryotinia fuckeliana B05.10]
  misc_feature (2)..(463): NCBI GI: 145235129 Blast Desc: An03g03300 [Aspergillus niger] gi|134057893|emb|CAK38234.1| protein product [Aspergillus niger]
  misc_feature (2)..(361): NCBI GI: 226282405 Blast Desc: peptide-N4-(N-acetyl-beta-glucosaminyl)asparagine amidase A [Paracoccidioides brasiliensis Pb01]
  misc_feature (2)..(250): SWISSPROT Homolog: EC 3.5.1.52 Peptide-N(4)-(N-acetyl-beta-glucosaminyl)asparagine amidase
  misc_feature: Useful for introducing or modulating the production of volatile compounds
MPTQEGIHWSFEKDMTIWDSILRTDSPQKIIFELNNVIDGDRYTGFFNVTLEAWFFNDVYQGKGLQPAEHIYAISTALSSQNATSLFSLPDQTGAVNITIPRNAQTVVVSIMASGNAEEEFWFTNVPSEYVNTFPDNPGWLYGYSPFREVQLLIDGSLVGVSWPFPILFTGGVDPGAWKPIVGIDAYELPSFEIDVTPHVGKLTDGEPHEFKLSVVGWDNATDGGLGPVGQNWWVSGSVFVWVDDTVEQTTVQSFSIGSSYMLTLQSVQIEFDTTHNPPSNKSLNFAFSAHRNISAAATITNGGQSRLVTWAQNVSYTNIQNITELGYNQTLAMLSNGSYVSSASNIISRYTYPMNLFSAYKVQQQGATTNPGSVLCLADRSKSTHGISMLPFLTGISAGPGGMDTRQNVTSYYHWNSTIVEGTPGLDSMAGDMWFSSYGMPGSQTGVKGYYRRASEVNTTLILDEESWEARPVPSVQPIPYVQIRREIGQQAFSS

SEQ ID NO: 788 - DNA, 5203 bp, Muscodor strobelii
  misc_feature: SGI EST ID NO. CUFF.2159.0
  misc_feature: Variant of the nucleotide sequence at SEQ ID NO 786
gcgccgtcatcaaatatttgtaaagactcggccgggattggtcactgtgtatccagctgttcaactttctgttgcagcctacggcgttctgatgctgatggagacaaccaatacgagactttttgaaggatcgaaagctatcggtttcatgagtccgattaactctggtgatgaagcccatttcatagaaacaccagatttagacactttccctccgggtatgtttgacttccagcaaagcgttctacatttgtcgccgatccgcggcgggcagaacgatactttcgccagtctcttagagattcgccacctgagtgaacgaatgagcgggtatttcgtcttctttggagttaggaaggccgtggctggtaaagagaagtggtcttgccacattgtaacgcgagaaagcctggcttcttcaagatgttccaatggtgattgggatctgaggatgatattcatcaacttcataagcaagatgttgtctgagtcgagcgaagaacagcggcgcgcttcgctccctgacggttccctggtcgtaaagatggggccatccttaaaggaacgtagcttcaggtcgttgcgagtggcatggttgttgggagccaagcaggaattccgtataggtaaggtagtggatgaggatgtcagcgatgcagaatcgacgacagggaatactggtagatagacagcatgtctggagggacttcgaacacattacaatgacaggcaatacaccggatagcagcatagatatatcataatttacaaatcctaggaacacgagtcgattactgggatagctttttgattgcgtcataacataatcttgaagttattctcagctttgaaaccgactttcataacctcccaatgggtagtaccgccagcgcgtccgacaagtcatggattcgtgtcgcacagctcaccgaaagagcttgaatatctcgttgttctatgtgaaggtaaagtgcgacgaggtgcccacaaatagttcaataatttgagcgacgagaaggcacgatgtgaagataccgcgttaaaccgatactgccttccatttttgacaatcgtccgctgatatgctcaatgcccctccccatctcaaatgcgaccttgaatcttggcgacttcccgcaatctgcaactgcgaaggacttcatggtgaccggtgctgtgaggtattcatcattgttcatggcggaattatttagaagtatgtattgtgttcctctgttcgtgttgtttgcactcttctgggtgcacgtccaagctacgcttgaagttatacaggcagcgacgcctccccgcttagatcggagtgatgcagcatgtcatcaacaggtcttctaccatgaatttgggaacagttatggggcaccatacgtcggttggtattctaaacccggtgactgcaactataccaccacaatcttcaatctgagcgttgtctcccaaggacgccaatatgatcgtctggcgacactctggctcggtgacgtcgaagtctggcgaacatcaaccgcaatgccaacgcaggaggggatccattggtcattcgagaaagacatgacaatttgggatagcatattgcgaacagactcgccacagaagatcatattcgaactaaacaacgtaattgacggagaccgatatacgggcttcttcaacgtcacacttgaagcatggttcttcaatgatgtctatcaaggcaaaggacttcaacccgccgagcacatctatgctatttcaaccgcattgtcgtctcaaaatgcaacgtcgctcttttcgctgccggatcaaactggtgctgtgaacataacgataccacgtaacgctcagacagttgtggtctcgatcatggcatctgggaatgcggaagaggagttttggttcacgaatgtgccaagtgaatatgtcaatactttcccggacaatcctggctggctgtacggatatagtccatttcgcgaggtccagctgctcattgatggcagccttgtgggcgtatcgtggccatttccaatattgttcactggtggcgtcgaccccggggcttggaaaccaattgttggcatcgatgcctatgagctgccgtcatttgagatcgatgttaccccacacgtcgggaaattgacagacggagagccacacgagttcaaactgtctgttgtaggatgggataatgctaccgatggcggccttggaccagttgggcagaattggtgggtatcgggatctgttttcgtctgggtggatgacacagtcgagcagacaacagtccaaagtttctcaataggatcatcgtatatgcttacgcttcaatcagtgcagatcgaattcgacaccacccataatccaccatcgaacaagtctctcaatttcgctttcagcgcccatcgaaacatctcagcagctgctaccatcactaacggcgggcagagtcggctcgtcacttgggctcagaatgtctcatacaccaacattcagaacataacagaactcggctataaccaaacacttgccatgctttcgaatggtagctatgtaagctcggcgtcaaacatcatatctcggtacacgtacccaatgaaccttttcagtgcatacaaggtccaacaacaaggcgcaacaaccaatccggggtctgttctatgcttggcagatagaagcaaatcgactcatggtatcagcatgctcccatttctcacaggaatttcggctggacctggaggtatggatacaaggcagaacgtaacctcatattaccactggaattctacaattgtagaaggtaccccgggtctcgactcgatggcgggagacatgtggttctcttcttatgggatgccggggagccagacaggggtcaagggttattatcgtcgtgcttcggaggtaaacactaccctcatcctggatgaggagagttgggaagccaggcctgtaccaagcgtccagccaatcccttacgttcagatcagacgtgaaataggccaacaggccttcagctcttaataacaaattggtcggttagctcagatggttagagcatcgcaatcacactgcgaaggtcatacgttcaatccgtatactgagcatactccataattttttactgatgtggtcctcggataatccggttatcgagcagtcgaggaaaggatgcaggatcctggctttcgtcatgcgactaatgagaccggacgatgatttttgtcaattaaaccgactgcagagtaatgagacaaatgttgctgtacgcttaggccgtaattgtgaaaccaactcagtcactcgttgcattccgcaccaattcccagcatttccgcatccccgtgcccatgctttcgtcttcaatattttcgctccatcgatcatccgtttccgggagggcatcaatctcggtgtcagataaatcaagctcaaaaaggaatacgtgcatagtcagcttaagatgggagaatagccatggtacactaccaagcttatcaaccaacttcaactgcggaagggtctttgagtaacgcctgagagccgaatccagaacacctgatgcgtagaggtgagcagctcgcttgtgagccttgacactgttctcttgcccctcatcgatttcgccacttgggaattcccagaggccggcaagtaggcccttctgtggtcgtctgtggatcaagtatcgtccgtcattccgccgaatagcgcaaacaagcgtctcttcctctctgaccgctttcttgatcaccttgaccgggaattttcttgcgtgatcgacgatcgtgttcagtcctgctggcgtaagctcggagagcgctggtttgggctttttgcttgattctgtagatcctgtgaagaagttcgagagacttgcttgtcttaatgatttcgtattggtcgtctttgcaggctgagctttcttctttgaagcagctttaacctcttcgtcgtgttcgtctccggcattttctattgcttcttcgaatggcttgcagaaattgcacgagtcttcaatatcagggactcgagtgatattagagcctccggatagcatatcatctggtgcgagacccttcttgattgctaactgtagaccttcactgtatgctcgacaggttgcagtgataggacattcgtcacagttcggtttcggggtacatatcgtactaccgagctccatgagtgcttggccccattgacctggtcgctcactaatgacatcctccggtgcatcgttcttctcaatctcgtctccgtcgagagcaacagccttaacaagactagctgctgctgcccatagcagatcgatgacagatttatctgctttcacatctccgaatatgcctaactgccgactgagaacacgcaacacattgccatcgaccatcggtgccgctctaccgaaaacaattgctgaaattgcaccagcggtatatgggccaacgccagggactttcttcacaagttcttcaacattatcgggcagaagaccctttaacgccgaatcgccgcagactttcttcgctgcttcatgtatcctcgtagcccggctgtagtaccctaaacccctccacgccgcaagaacatcatccgcatcagcagcagctaggtcatgaatactaggccatttgtctatccacttattccagtagtcaataacaacagcaacacgcgtttgctgaagcataatctcactgatccagacttcatacgcgcgccgctccagcctttcacgaagcttagagtctagttgcttgccagcggggcgcgagtctatccacacttttcgccatggcattgagcgggcatgatgaatgccctcgaaccatttaaggaagtctttccgtcccttcggactgtcgagaagaagaggcctgtgataagatgggctgtgtatgcgcctgggtaagtggcacggtgaaggatccgctggcagtttatcgcgactgaataattgttgatgaagttctgagtctttcactttcttgtcgcgtgaagctattttgcgtttcttcgcagctacttctggctcagattccgagattttgaattcctcatcttcgtcttgcgacgcgtcgcttggcgtctgaggtgtttttctctttctcaagttcgcagcaatgccgctctccgttgacgaggctttgcccggagcacccgcttttttgcgaatggtatttcgtagcgaacggcccatggcgat

SEQ ID NO: 789 - DNA, 1773 bp, Muscodor strobelii
  misc_feature: SGI cDNA ID NO. 559842
  misc_feature: Encodes the peptide sequence at SEQ ID NO 790
atgcgactgatcaatactcgaacgttggagttgaaggagttctttggaaaagacatacccgtctacgcaatccttagccacgtctggggcgccgatgaagtagcctaccaggaatggacagccagacagagttctgttattagcaacaaaagcggatataagaaagtcataggcgcttgcgatcaggccgttcgtgatcgcttagactggttatgggtcgacactaattgcatcgataaatcgagttcggcggagttgagcgaggcgatcaactccatgttcaagtggtatgcggactctaagatatgttacgcctatctgaacgatgtcaccaagcattctcccgaatgggagaatgatttccgtcagagtcgatggttcactcgcggttggacacttcaagagcttcttgctcccaagcggatcactttcttatcgcaggagtggcgacgactaggagatcgctcggatccttggctgctgactatcatatcagaaacaacttcaatagaagtgccttatttaacgggtcatagccagctaaatatggccagcatcgcaaagaaaatgtcctggttgtcgaggagagcgacaagtcgggaagaagatatcgcatattgcatgcttggtattttcgaggtgaatatgcctcttctctatggagagggacttcgggcattcattcggctgcaggaggagattattaaaatctccagtgatcattccctattctgctggtcatttgacgagagcgtaccgagcaattgggtgagcatcctggcaccaacaccatgcgtatttagaaagtcagcagaatatgttcgtaaggatctcttggatcccttaaccgtatattctatgacaaacctcgggttatcgatccaactgcctataatcaacaccttcacgcacgcgttggttcttctcaatgcaggcctggcacagcaggatatgtccacgcgggcatgcttgtctatggcttacgagcgctctcagacatccgccacgagagatattccaatgctagtccgcaatcggttcccgaaaaatccagtaaacctctatcgatttggggctgctaagatgcgccgtcatcaaatatttgtaaagactcggccgggattggtcactgtgtatccagctgttcaactttctgttgcagcctacggcgttctgatgctgatggagacaaccaatacgagactttttgaaggatcgaaagctatcggtttcatgagtccgattaactctggtgatgaagcccatttcatagaaacaccagatttagacactttccctccgggtatgtttgacttccagcaaagcgttctacatttgtcgccgatccgcggcgggcagaacgatactttcgccagtctcttagagattcgccacctgagtgaacgaatgagcgggtatttcgtcttctttggagttaggaaggccgtggctggtaaagagaagtggtcttgccacattgtaacgcgagaaagcctggcttcttcaagatgttccaatggtgattgggatctgaggatgatattcatcaacttcataagcaagatgttgtctgagtcgagcgaagaacagcggcgcgcttcgctccctgacggttccctggtcgtaaagatggggccatccttaaaggaacgtagcttcaggtcgttgcgagtggcatggttgttgggagccaagcaggaattccgtataggtaaggtagtggatgaggatgtcagcgatgcagaatcgacgacagggaatactggtagatag

SEQ ID NO: 790 - protein, 590 aa, Muscodor strobelii
  misc_feature: SGI Peptide ID NO. 559842
  misc_feature (22)..(135): Pfam Id: PF06985 Pfam Desc: Heterokaryon incompatibility protein (HET)
  misc_feature (22)..(107): Pfam Id: PF06985 Pfam Desc: Heterokaryon incompatibility protein (HET)
  misc_feature (117)..(135): Pfam Id: PF06985 Pfam Desc: Heterokaryon incompatibility protein (HET)
  misc_feature (1)..(298): NCBI GI: 256723740 Blast Desc: NECHADRAFT_52245 [Nectria haematococca mpVI 77-13-4]
  misc_feature (1)..(494): NCBI GI: 156035539 Blast Desc: SS1G_12973 [Sclerotinia sclerotiorum 1980] gi|154698378|gb|EDN98116.1| SS1G_12973 [Sclerotinia sclerotiorum 1980]
  misc_feature (1)..(397): NCBI GI: 46126489 Blast Desc: FG07622.1 [Gibberella zeae PH-1]
  misc_feature (1)..(246): NCBI GI: 256720831 Blast Desc: NECHADRAFT_28122 [Nectria haematococca mpVI 77-13-4]
  misc_feature (1)..(300): NCBI GI: 46114894 Blast Desc: FG03289.1 [Gibberella zeae PH-1]
  misc_feature (1)..(300): NCBI GI: 121715886 Blast Desc: HET domain protein [Aspergillus clavatus NRRL 1] gi|119403709|gb|EAW14126.1| HET domain protein [Aspergillus clavatus NRRL 1]
  misc_feature (1)..(354): NCBI GI: 85092369 Blast Desc: NCU04912 [Neurospora crassa OR74A] gi|28920765|gb|EAA30124.1| [Neurospora crassa OR74A]
  misc_feature (1)..(344): NCBI GI: 238493477 Blast Desc: conserved [Aspergillus flavus NRRL3357] gi|220696469|gb|EED52811.1| conserved [Aspergillus flavus NRRL3357]
  misc_feature (1)..(315): NCBI GI: 145228631 Blast Desc: An01g01850 [Aspergillus niger] gi|134054715|emb|CAK43556.1| protein product [Aspergillus niger]
  misc_feature (1)..(299): NCBI GI: 256720502 Blast Desc: NECHADRAFT_55867 [Nectria haematococca mpVI 77-13-4]
MRLINTRTLELKEFFGKDIPVYAILSHVWGADEVAYQEWTARQSSVISNKSGYKKVIGACDQAVRDRLDWLWVDTNCIDKSSSAELSEAINSMFKWYADSKICYAYLNDVTKHSPEWENDFRQSRWFTRGWTLQELLAPKRITFLSQEWRRLGDRSDPWLLTIISETTSIEVPYLTGHSQLNMASIAKKMSWLSRRATSREEDIAYCMLGIFEVNMPLLYGEGLRAFIRLQEEIIKISSDHSLFCWSFDESVPSNWVSILAPTPCVFRKSAEYVRKDLLDPLTVYSMTNLGLSIQLPIINTFTHALVLLNAGLAQQDMSTRACLSMAYERSQTSATRDIPMLVRNRFPKNPVNLYRFGAAKMRRHQIFVKTRPGLVTVYPAVQLSVAAYGVLMLMETTNTRLFEGSKAIGFMSPINSGDEAHFIETPDLDTFPPGMFDFQQSVLHLSPIRGGQNDTFASLLEIRHLSERMSGYFVFFGVRKAVAGKEKWSCHIVTRESLASSRCSNGDWDLRMIFINFISKMLSESSEEQRRASLPDGSLVVKMGPSLKERSFRSLRVAWLLGAKQEFRIGKVVDEDVSDAESTTGNTGR

SEQ ID NO: 791 - DNA, 5203 bp, Muscodor strobelii; identical to SEQ ID NO: 788
  misc_feature: SGI EST ID NO. CUFF.2159.0
  misc_feature: Variant of the nucleotide sequence at SEQ ID NO 789

SEQ ID NO: 792 - DNA, 933 bp, Muscodor strobelii
  misc_feature: SGI cDNA ID NO. 559843
  misc_feature: Elevated expression when VOC is produced
  misc_feature: Encodes the peptide sequence at SEQ ID NO 793
atggatcaaatacaggccttcggccgaggtgacgttcttttgccgactttcggtgtttataaagacctattgcttgcgaaagaatcagacatcaagtcagcgcatcgcgagacacacagttacgggccagatccgcgtcatgttctcgacatatatctcccggaagacaaagctactggaccgagaaccgtccttgtctggctgtacggcggtaatttctgggctggcgatcgagtctacgagccgtatgccaatggtctaatgtataccaatgtgggacgcttctttactcggtttgggtttacagtcataataccagactacagacttttgtctcacggggccaaatacccttcaggaggagaggatgtaaaagttgtcgtgaattggataagagaaaccctagctgcgaaagaggggtatggggatatgaatcttttccttcttggaaactcggctggcgctgttcatatgagcacattcttgctcgacccagagtttgaggaggcaagtgagaccatcttcaaacccaacaatgaagaggctggtgtgcgtctgcgagggctaattttcctcggggctccgtttcacttcggcggcagagatgatgagcatgtcagggcatatttcggagagaacctagttgtcgagaggactcccctagctctgcttcaagctgcctataagcgcagtccctgtaccagattggagagcatagaagcgttggtcatggttagtgaactcgatcctccgattctgttcgatgcggcagaggatttcaaaaaggtatgggacggtggcagagttgaacaccagattctcaagggacacaaccacatcagcccgccgcttggcctatgcactggatctgagcgcgaagaggattggggcgttcaagttgccaagttcgtcaattcgtgtatatcaagataa

SEQ ID NO: 793 - protein, 310 aa, Muscodor strobelii
  misc_feature: SGI Peptide ID NO. 559843
  misc_feature (11)..(306): NCBI GI: 169610325 Blast Desc: SNOG_08262 [Phaeosphaeria nodorum SN15] gi|111063418|gb|EAT84538.1| SNOG_08262 [Phaeosphaeria nodorum SN15]
  misc_feature (11)..(304): NCBI GI: 156054384 Blast Desc: [Sclerotinia sclerotiorum 1980] gi|154703820|gb|EDO03559.1| [Sclerotinia sclerotiorum 1980]
  misc_feature (11)..(305): NCBI GI: 154321211 Blast Desc: [Botryotinia fuckeliana B05.10] gi|150852018|gb|EDN27210.1| [Botryotinia fuckeliana B05.10]
  misc_feature (23)..(306): NCBI GI: 170088781 Blast Desc: [Laccaria bicolor S238N-H82] gi|164648873|gb|EDR13115.1| [Laccaria bicolor S238N-H82]
  misc_feature (41)..(291): NCBI GI: 94972248 Blast Desc: lipase, active site [Deinococcus geothermalis DSM 11300] gi|94554299|gb|ABF44214.1| Lipase, alpha/beta superfamily hydrolase [Deinococcus geothermalis DSM 11300]
  misc_feature (11)..(304): NCBI GI: 169863389 Blast Desc: CC1G_04760 [Coprinopsis cinerea okayama7#130] gi|116500609|gb|EAU83504.1| CC1G_04760 [Coprinopsis cinerea okayama7#130]
  misc_feature (15)..(305): NCBI GI: 242220224 Blast Desc: [Postia placenta Mad-698-R] gi|220724901|gb|EED78915.1| [Postia placenta Mad-698-R]
  misc_feature (21)..(307): NCBI GI: 145246698 Blast Desc: An12g05280 [Aspergillus niger] gi|134080319|emb|CAK46241.1| protein product [Aspergillus niger]
  misc_feature (41)..(281): NCBI GI: 195542027 Blast Desc: esterase/lipase [uncultured bacterium 2304]
  misc_feature (19)..(281): NCBI GI: 78060769 Blast Desc: lipase, active site [Burkholderia sp. 383] gi|77965319|gb|ABB06700.1| Lipase, active site [Burkholderia sp. 383]
  misc_feature (49)..(215): SWISSPROT Homolog: EC 3.1.1.7 Acetylcholinesterase
  misc_feature: Useful for introducing or modulating the production of volatile compounds
MDQIQAFGRGDVLLPTFGVYKDLLLAKESDIKSAHRETHSYGPDPRHVLDIYLPEDKATGPRTVLVWLYGGNFWAGDRVYEPYANGLMYTNVGRFFTRFGFTVIIPDYRLLSHGAKYPSGGEDVKVVVNWIRETLAAKEGYGDMNLFLLGNSAGAVHMSTFLLDPEFEEASETIFKPNNEEAGVRLRGLIFLGAPFHFGGRDDEHVRAYFGENLVVERTPLALLQAAYKRSPCTRLESIEALVMVSELDPPILFDAAEDFKKVWDGGRVEHQILKGHNHISPPLGLCTGSEREEDWGVQVAKFVNSCISR

SEQ ID NO: 794 - DNA, 887 bp, Muscodor strobelii
  misc_feature: SGI EST ID NO. CUFF.2168.0
  misc_feature: Variant of the nucleotide sequence at SEQ ID NO 792
tctacgagccgtatgccaatggtctaatgtataccaatgtgggacgcttctttactcggtttgggtttacagtcataataccagactacagacttttgtctcacggggccaaatacccttcaggaggagaggatgtaaaagttgtcgtgaattggataagagaaaccctagctgcgaaagaggggtatggggatatgaatcttttccttcttggaaactcggctggcgctgttcatatgagcacattcttgctcgacccagagtttgaggaggcaagtgagaccatcttcaaacccaacaatgaagaggctggtgtgcgtctgcgagggctaattttcctcggggctccgtttcacttcggcggcagagatgatgagcatgtcagggcatatttcggagagaacctagttgtcgagaggactcccctagctctgcttcaagctgcctataagcgcagtccctgtaccagattggagagcatagaagcgttggtcatggttagtgaactcgatcctccgattctgttcgatgcggcagaggatttcaaaaaggtatgggacggtggcagagttgaacaccagattctcaagggacacaaccacatcagcccgccgcttggcctatgcactggatctgagcgcgaagaggattggggcgttcaagttgccaagttcgtcaattcgtgtatatcaagataatgacgtgaagaggggaggaggagttgacatgtaatagtagattgttgttctctgggctctcttctcgcaatgcatcaacttgacaagaatacgtgtagagaactcgcacctaagttctagttcagacgccagcctgtctcttgagaagcagtcagattctgagacttgaccaaatcgactggaatgtgg

SEQ ID NO: 795 - DNA, 3447 bp, Muscodor strobelii
  misc_feature: SGI cDNA ID NO. 559844
  misc_feature: Encodes the peptide sequence at SEQ ID NO 796
atgacacaagctgcttcattgaaaccggagtaccaacatttcgtcccccagtttatactgagaaactttgcccataagctcaaaagccgacatgggaagtccaaaggtagcaaaaagggcgagaaactcttccgtggcgaactgatggtcaacaatgtcgacctcagagccattccgatgtgcatcgaagaaacacaagtcaaacgaatcttcggccagtatgatatgtaccaagacacatcacaacctgtgactcagcaaagggagatcgaaagtctattcagtaaactcgaatctcatgtcagtacgatttgtcgcaaaattaccaaggcatatgacgctggagacgcacatgtctggatgactcgcgacgagaggaatgcaattaggaaatttttatttctcttgaagtacaggaattcgacgtttcatagacgtttctactacgaggatgctgccagctatgattgtaacgacaaggagcaattgtgggactacatgaagaacaatggcttcaaaaggccagttgatgtctggtttcacaacataagaacggtcatcaatgttaaaatggactacggagaccaatggcaagcggagctccagagccagatgttccctcccgacgctaggtggttcatggcgcattgcgatacgatgtatatggctatttgcacgccatgtgaaggagctgacgagtttatacttacagacaatagctacagtatattcgagggaccaaatcacctggagaagaaccctgagacagggaaatttgaggatgcagggtggatgaacttccacgagtttgctcctctttctccgaagctgatgatagtgttacggagcttcatgcttccggatccattggaagatgcaaacccagtgattcaagaggagcgacagtggtggcgcaatggagtcgacagtacgtttggcatgagcgtcgagtcacacctggccgacttaccgatatgcaaggcgcgcaacaactactctcagatttctaatggccgactggcgtatctacctggcgaagatggtacaaaacgtaagagccacaagttctgttttcaattcttcccaattggcacagaacacgtccacaaaatgaatctcgtcctattcgataatgcatatttatgtacgagcattgtattcaactccaaagattccttctacaagaccctggaatggtacttaaccgtcgaatgtgattatggcaaaataatcacgggcgatgacttcgaggcgaaggtccaatacatcaagaacttggctgccctttcgaaggctctgggttctacgaaagaggccgtgtggacagaacttccagactatgagatttcgcactacgataagatgcagctcacgatgaacttcattgagaacaactttgacaaagtgataccgtcgttcagaaaggcattcaacgagagctccgaaacacccacaggcctgatgagctcatacctatgtctcggcggatcgtcagataccttcataaaagatatgaaccaagccgaacgaatgttgcaattgtggaggaatatcggcgtatggtcgaacggttgcccagagcacatccggacacaggctcaaacatggcttcttgaagcttatatgacatgcctccctcgtagagtcctccttttcgtgaaaaggctgcggtatatgattatcctgcgcgatgtatccgggcgcttgctacaagagtatgatgggaaatcaaaggtggacgagccagaagatatcatcgcgaaagcggcacatacaatcatgacgagcgagaaactcaacggactcatgtatcatacggcgaggaatgatatcgaaaaagccaaagatccatcctttagtccatgggcaacaacaggggcaacccagttgcggaaagtcgccaaattcgtcctgggtcgtgcaggacagttgaaaaactgcggaatcaacaaaatcgagaaactcgccgaatttcacgagcaaggcgctgctgcccaatggatgatcgatactcaaaatcgactcgatttgcctttcttaaaggatgaagcaggagacgagctgatagcgcgcattatggctgcacggatctctggagagcatgaccaacaatacaatgggcggctacgagagaagcttgtgcaattacacgagaaacacggcacaattgttcgctatggcgtgaagagtatcagtattacggatccggacgtcattagagtggtatacggcagcagtcgtgctggatttatcacagccgattcgtatagagttctgctcggaatacaaaatggcaaggaagtggcaagccttgtgagcactcgggacgaggcacggcacgcagctatgcgtcgctccgttgctggtgccttcacaccggcggcggtcttggactatgagaaatgggttgatatgacgatcccggagctattagactgcatggccggcaaagcgacatttgatcttgcgtcaatgatcttgtggtacatgattgatgcagcatcacgattctcatttggtgagccacttggctgcctcagagctgaagcagacgtcaatggcaccattcaactgatccgagaccggtcgaatcactggggttggtggtcgtccatccctagtatcgagcgcttagtttaccgcaatcctatcgcgatgcgtatcaaacgccagccatcgagtatggccgctacagctgtagcaaaactgcagaaaagagccacggagatgaaagaggggaaaatgagcgatgcagcacatccagatctactacagcgctttctcgagtctagtgaagaccacccagatgcgcttaatccagccggactcgtgggaatgctgatgagcaccatttccggcgctggcgacacaacagcaacatccgtagttgccgtcctttattatctcatcacgtacccggagaccttgaagaaactgagagctgagcttgcagaagctggtgttgctcccatacctgcgttcaatgatgttaataagctgccgtatctcaatgctgtcgtcaaggagggtatgcggatgtttacaacgccaacatggccgatggaacgtcaagttcccgccggcggcgctacgattgcaggcatgacatttcctgaaggtaccagtgttggatgtatgccgcaagccatacaccgtaatagagccatcttcggtgcagatgtggacgtgtttcgtcctgaacggtggcttactagggaccgggaagtactacgactgatggaatctgcacatatggggttcagccgcggaaccagagtctgtttaggtcaacatattgctgtgctacagatgaagaaagtcatcccatcgatcatcatgaagttcaatctaagtctcatcgacccgcataccgagctcaagggagatttctctactgctattaccggcttagatcctctacccgtcagaagtgaagctcggaattga

SEQ ID NO: 796 - protein, 1148 aa, Muscodor strobelii
  misc_feature: SGI Peptide ID NO. 559844
  misc_feature (697)..(1141): Pfam Id: PF00067 Pfam Desc: Cytochrome P450
  misc_feature (909)..(1141): Pfam Id: PF00067 Pfam Desc: Cytochrome P450
  misc_feature (7)..(694): NCBI GI: 242763976 Blast Desc: conserved [Talaromyces stipitatus ATCC 10500] gi|218723877|gb|EED23294.1| conserved [Talaromyces stipitatus ATCC 10500]
  misc_feature (7)..(653): NCBI GI: 242763987 Blast Desc: conserved [Talaromyces stipitatus ATCC 10500] gi|218723879|gb|EED23296.1| conserved [Talaromyces stipitatus ATCC 10500]
  misc_feature (10)..(636): NCBI GI: 85106183 Blast Desc: NCU07255 [Neurospora crassa OR74A] gi|28923705|gb|EAA32873.1| [Neurospora crassa OR74A]
  misc_feature (5)..(561): NCBI GI: 256728716 Blast Desc: NECHADRAFT_50617 [Nectria haematococca mpVI 77-13-4]
  misc_feature (7)..(589): NCBI GI: 242763992 Blast Desc: conserved [Talaromyces stipitatus ATCC 10500] gi|218723880|gb|EED23297.1| conserved [Talaromyces stipitatus ATCC 10500]
  misc_feature (7)..(589): NCBI GI: 242763982 Blast Desc: conserved [Talaromyces stipitatus ATCC 10500] gi|218723878|gb|EED23295.1| conserved [Talaromyces stipitatus ATCC 10500]
  misc_feature (5)..(444): NCBI GI: 170940224 Blast Desc: protein product [Podospora anserina]
  misc_feature (10)..(596): NCBI GI: 212526226 Blast Desc: conserved [Penicillium marneffei ATCC 18224] gi|210072668|gb|EEA26755.1| conserved [Penicillium marneffei ATCC 18224]
  misc_feature (10)..(462): NCBI GI: 242760870 Blast Desc: conserved [Talaromyces stipitatus ATCC 10500] gi|218723272|gb|EED22689.1| conserved [Talaromyces stipitatus ATCC 10500]
  misc_feature (1)..(600): NCBI GI: 169786433 Blast Desc: [Aspergillus oryzae RIB40] gi|83776425|dbj|BAE66544.1| protein product [Aspergillus oryzae]
MTQAASLKPEYQHFVPQFILRNFAHKLKSRHGKSKGSKKGEKLFRGELMVNNVDLRAIPMCIEETQVKRIFGQYDMYQDTSQPVTQQREIESLFSKLESHVSTICRKITKAYDAGDAHVWMTRDERNAIRKFLFLLKYRNSTFHRRFYYEDAASYDCNDKEQLWDYMKNNGFKRPVDVWFHNIRTVINVKMDYGDQWQAELQSQMFPPDARWFMAHCDTMYMAICTPCEGADEFILTDNSYSIFEGPNHLEKNPETGKFEDAGWMNFHEFAPLSPKLMIVLRSFMLPDPLEDANPVIQEERQWWRNGVDSTFGMSVESHLADLPICKARNNYSQISNGRLAYLPGEDGTKRKSHKFCFQFFPIGTEHVHKMNLVLFDNAYLCTSIVFNSKDSFYKTLEWYLTVECDYGKIITGDDFEAKVQYIKNLAALSKALGSTKEAVWTELPDYEISHYDKMQLTMNFIENNFDKVIPSFRKAFNESSETPTGLMSSYLCLGGSSDTFIKDMNQAERMLQLWRNIGVWSNGCPEHIRTQAQTWLLEAYMTCLPRRVLLFVKRLRYMIILRDVSGRLLQEYDGKSKVDEPEDIIAKAAHTIMTSEKLNGLMYHTARNDIEKAKDPSFSPWATTGATQLRKVAKFVLGRAGQLKNCGINKIEKLAEFHEQGAAAQWMIDTQNRLDLPFLKDEAGDELIARIMAARISGEHDQQYNGRLREKLVQLHEKHGTIVRYGVKSISITDPDVIRVVYGSSRAGFITADSYRVLLGIQNGKEVASLVSTRDEARHAAMRRSVAGAFTPAAVLDYEKWVDMTIPELLDCMAGKATFDLASMILWYMIDAASRFSFGEPLGCLRAEADVNGTIQLIRDRSNHWGWWSSIPSIERLVYRNPIAMRIKRQPSSMAATAVAKLQKRATEMKEGKMSDAAHPDLLQRFLESSEDHPDALNPAGLVGMLMSTISGAGDTTATSVVAVLYYLITYPETLKKLRAELAEAGVAPIPAFNDVNKLPYLNAVVKEGMRMFTTPTWPMERQVPAGGATIAGMTFPEGTSVGCMPQAIHRNRAIFGADVDVFRPERWLTRDREVLRLMESAHMGFSRGTRVCLGQHIAVLQMKKVIPSIIMKFNLSLIDPHTELKGDFSTAITGLDPLPVRSEARN

SEQ ID NO: 797 - DNA, 1315 bp, Muscodor strobelii
  misc_feature: SGI EST ID NO. CUFF.2181.0
  misc_feature: Variant of the nucleotide sequence at SEQ ID NO 795
tccaatacatcaagaacttggctgccctttcgaaggctctgggttctacgaaagaggccgtgtggacagaacttccagactatgagatttcgcactacgataagatgcagctcacgatgaacttcattgagaacaactttgacaaagtgataccgtcgttcagaaaggcattcaacgagagctccgaaacacccacaggcctgatgagctcatacctatgtctcggcggatcgtcagataccttcataaaagatatgaaccaagccgaacgaatgttgcaattgtggaggaatatcggcgtatggtcgaacggttgcccagagcacatccggacacaggctcaaacatggcttcttgaagcttatatgacatgcctccctcgtagagtcctccttttcgtgaaaaggctgcggtatatgattatcctgcgcgatgtatccgggcgcttgctacaagagtatgatgggaaatcaaaggtggacgagccagaagatatcatcgcgaaagcggcacatacaatcatgacgagcgagaaactcaacggactcatgtatcatacggcgaggaatgatatcgaaaaagccaaagatccatcctttagtccatgggcaacaacaggggcaacccagttgcggaaagtcgccaaattcgtcctgggtcgtgcaggacagttgaaaaactgcggaatcaacaaaatcgagaaactcgccgaatttcacgagcaaggcgctgctgcccaatggatgatcgatactcaaaatcgactcgatttgcctttcttaaaggatgaagcaggagacgagctgatagcgcgcattatggtaaaatctgtgttttcaatagtgttatctggagacatcgtcgattctggtctgcttgcaaaatttgagagtgttatgtttgagttggcgtatccaaccccacagatcaaaatttgatgcacggctggccaccacaaaatttcgaaatctttctttcgagcagcggctatttcccttgttcatctttacaaatcacctgcaccgagtgtcttcgtgacgcggaatcttcatgaacccagagtttatcatgtcagctgcttgaatgagcctatagtcatcggactcaagatctttccgtaggccacttttgaagattgaaagtactttagcaaaatctaatgaaattttcactgtaaatcgacgtctttatcggcagccatgatcccatgaagtcgggcctctggtcgggagaattggacgcgttgctgaggccgcgtctcagcgcttgcgtccaggggttatgccaggctgtacttgtgataatccgggggacc

SEQ ID NO: 798 - DNA, 861 bp, Muscodor strobelii
  misc_feature: SGI cDNA ID NO. 559845
  misc_feature: Encodes the peptide sequence at SEQ ID NO 799
atgagttcaacttcattgcacatgatgacgaaactgtccccgtttgtttacacatacgagcccagcgagattcctccggcgtcggaatcttcggctcccaaactcatactcttcgcggcatggatggacgcgcaggacgtacacataaacaaatacatcacgcattatcagaccatttatccaagcgctacaatattgcttgtcaagttctccgttaaagaagccgtttttgcaccagttgcgagacagaaggtgcagcctgctgtattatacctccggtctctcatgactccaggcggcggcttgtctgcggctcccgagcgtcccgagattctcgtacatgtcttttccaacggcggcagcaccacaatgcgacatatctttgtcgggttcaagaaattgtttgggaggtcttttccattgcatacgatgatcctcgactcatgtccaggtcagcacaagtttgcgacctcatacaatgcactcatcgctgggtttccgaaggggattctccgtatgattgccgctcccttcattgtcttctttattcttgctctctcgctatggtatatcccgttcagcttcattgcgggcgaagattttcttgccaaaaactcgagggtccttaacgatcgaaacctagtcaaacaaaccaatcggtcttacatttacggcaaagccgacgtcatggtagactggcaccatattgagaatcatgcgaatgcggctctcgctaaaagtttccttgtgcgccaggagagattcgataagagtccgcatgtttcgcacatgcgagctgacagagaccgttattggcaaatcgtgaaagacacctgggagaaggctgctgtcggtaaatag

SEQ ID NO: 799 - protein, 286 aa, Muscodor strobelii
  misc_feature: SGI Peptide ID NO. 559845
  misc_feature (31)..(282): Pfam Id: PF05705 Pfam Desc: Eukaryotic protein of function (DUF829)
  misc_feature (219)..(282): Pfam Id: PF05705 Pfam Desc: Eukaryotic protein of function (DUF829)
  misc_feature (2)..(280): NCBI GI: 116205593 Blast Desc: CHGG_10680 [Chaetomium globosum CBS 148.51] gi|88176808|gb|EAQ84276.1| CHGG_10680 [Chaetomium globosum CBS 148.51]
  misc_feature (6)..(280): NCBI GI: 171677063 Blast Desc: protein product [Podospora anserina] gi|170936599|emb|CAP61258.1| protein product [Podospora anserina]
  misc_feature (11)..(280): NCBI GI: 256729560 Blast Desc: NECHADRAFT_84260 [Nectria haematococca mpVI 77-13-4]
  misc_feature (6)..(277): NCBI GI: 255950616 Blast Desc: Pc22g21800 [Penicillium chrysogenum Wisconsin 54-1255] gi|211593092|emb|CAP99468.1| Pc22g21800 [Penicillium chrysogenum Wisconsin 54-1255]
  misc_feature (6)..(280): NCBI GI: 39977231 Blast Desc: MGG_06518 [Magnaporthe grisea 70-15] gi|145016050|gb|EDK00540.1| MGG_06518 [Magnaporthe grisea 70-15]
  misc_feature (2)..(282): NCBI GI: 154274898 Blast Desc: [Ajellomyces capsulatus NAm1] gi|150414740|gb|EDN10102.1| [Ajellomyces capsulatus NAm1]
  misc_feature (1)..(280): NCBI GI: 46117010 Blast Desc: FG04347.1 [Gibberella zeae PH-1]
  misc_feature (13)..(280): NCBI GI: 256729231 Blast Desc: NECHADRAFT_47567 [Nectria haematococca mpVI 77-13-4]
  misc_feature (4)..(280): NCBI GI: 256722220 Blast Desc: NECHADRAFT_97350 [Nectria haematococca mpVI 77-13-4]
  misc_feature (3)..(282): NCBI GI: 225557519 Blast Desc: conserved [Ajellomyces capsulatus G186AR]
MSSTSLHMMTKLSPFVYTYEPSEIPPASESSAPKLILFAAWMDAQDVHINKYITHYQTIYPSATILLVKFSVKEAVFAPVARQKVQPAVLYLRSLMTPGGGLSAAPERPEILVHVFSNGGSTTMRHIFVGFKKLFGRSFPLHTMILDSCPGQHKFATSYNALIAGFPKGILRMIAAPFIVFFILALSLWYIPFSFIAGEDFLAKNSRVLNDRNLVKQTNRSYIYGKADVMVDWHHIENHANAALAKSFLVRQERFDKSPHVSHMRADRDRYWQIVKDTWEKAAVGK

SEQ ID NO: 800 - DNA, 2114 bp, Muscodor strobelii
  misc_feature: SGI EST ID NO. CUFF.2187.0
  misc_feature: Variant of the nucleotide sequence at SEQ ID NO 798
catacatatcaaggcgatcggttggcagaaagtatttcgagatttttcctttattgcatggcgtatatcacaaagtgtcattctatcctcaggcacgagcttcactgtcacttgtagaatttctctcataatcgcgacctgtgtctctacgcaaaagccagggctccttcttgagtacttcggccgatttaatacaagaacaccatcttctcgcatctcgtctgaaccaggcaactatgagttcaacttcattgcacatgatgacgaaactgtccccgtttgtttacacatacgagcccagcgagattcctccggcgtcggaatcttcggctcccaaactcatactcttcgcggcatggatggacgcgcaggacgtacacataaacaaatacatcacgcattatcagaccatttatccaagcgctacaatattgcttgtcaagttctccgttaaagaagccgtttttgcaccagttgcgagacagaaggtgcagcctgctgtattatacctccggtctctcatgactccaggcggcggcttgtctgcggctcccgagcgtcccgagattctcgtacatgtcttttccaacggcggcagcaccacaatgcgacatatctttgtcgggttcaagaaattgtttgggaggtcttttccattgcatacgatgatcctcgactcatgtccaggtcagcacaagtttgcgacctcatacaatgcactcatcgctgggtttccgaaggggattctccgtatgattgccgctcccttcattgtcttctttattcttgctctctcgctatggtatatcccgttcagcttcattgcgggcgaagattttcttgccaaaaactcgagggtccttaacgatcgaaacctagtcaaacaaaccaatcggtcttacatttacggcaaagccgacgtcatggtagactggcaccatattgagaatcatgcgaatgcggctctcgctaaaagtttccttgtgcgccaggagagattcgataagagtccgcatgtttcgcacatgcgagctgacagagaccgttattggcaaatcgtgaaagacacctgggagaaggctgctgtcggtaaatagttcaagcaaatcatctactgttccgcttacattcgttgcattgtttgtgtttcatggccttgatgcgcgcttatctaccatatgcatccgatctcatgatctgatgcgagcttgactttccactggactgtacaattcgcttgctggtgccatgtcgcgaaccccgcgtctaccggacagcacctttcaggcatctgcagcctcgttcgacaatttcaatttctttcatttataaaactgtaagttgagagacaactatcgatcacgattgtcagaagttcatgtccagagctggctggctcacaaaggtcgacgaacatgacacaagctgcttcattgaaaccggagtaccaacatttcgtcccccagtttatactgagaaactttgcccataagctcaaaagccgacatgggaagtccaaaggtagcaaaaagggcgagaaactcttccgtggcgaactgatggtcaacaatgtcgacctcagagccattccgatgtgcatcgaagaaacacaagtcaaacgaatcttcggccagtatgatatgtaccaagacacatcacaacctgtgactcagcaaagggagatcgaaagtctattcagtaaactcgaatctcatgtcagtacgatttgtcgcaaaattaccaaggcatatgacgctggagacgcacatgtctggatgactcgcgacgagaggaatgcaattaggaaatttttatttctcttgaagtacaggaattcgacgtttcatagacgtttctactacgaggatgctgccagctatgattgtaacgacaaggagcaattgtgggactacatgaagaacaatggcttcaaaaggccagttgatgtctggtttcacaacataagaacggtcatcaatgttaaaatggactacggagaccaatggcaagcggagctccagagccagatgttccctcccgacgctaggtggttcatggcgcattgcgatacgatgtatatggctatttgcacgccatgtgaaggagctgacgag

SEQ ID NO: 801 - DNA, 1341 bp, Muscodor strobelii
  misc_feature: SGI cDNA ID NO. 559846
  misc_feature: Encodes the peptide sequence at SEQ ID NO 802
atggcgcccggaactaatgggcgcggagtccaggtcgaggacaccagaatatgtgtcgtgatggtgggattgcccgctcgtgggaagagctacatagcgcaaaaagcccagcgctacttgacctggctctcgatcccggccaagactttcaatgtcggcaattaccggcgcaatgacgcaccccaaccatccgccgatttcttcgacagcagcaacaaagagggcgaacgccgtcgccgtgcggcagccgaggccgctattgccgacatgctgggctggttcaggcagggcggtgttattgggatactggacgccaccaactcgaccaaggaccggcgcaagtgggtgatggacgtctgcacgcgcgagggcatcgaggtgctgtttgtcgagtccaagtgcgacaacgaagaaatgatcatggccaatatacgtgatgtcaaaactaccagtcctgattacaagggccaagaccctgaggaggctgcgcaagacttccgcaaccgcatcaagcagtacgagaaagtctacaagtccattgacgaggatggcgacgagagtcattacacctacctgaaaatgatggacgtgggtagccaagtcatcatcaaccggatacaggactacctccagagtcgtgtcgtctattacctcatgaacttacacattcgaccaagatctgtctggctttcgcggcacggtgagtcgatgtacaatctttcaggccggataggtggcgacgcagatttatctgcaagaggccatcaatatgcacaaaaattaccagagcttgtgcgacagtctgttggggatgaccgaccgcttacagtatggacgtcaacgctgaagagaacaatagctacatcacgcttcttacccgataactacaaccaactacagtggaaagcgctcgacgagttagacgccggtgtgtgcgatggcatgacctatcaagagattaaagatgtttaccccgaagattttattgcgcgcgatgaagacaagtataattatcgctaccgtggcggtgaatcctaccgcgacgtggtgattcggttggaacctatcatcatggaactagaacgatccgaggatattctcatcgtcacacatcaggccatacttcggtgcatatatgcatactttatgaagaaggaccaatctcgttcaccgtggatgaacgtgccgcttcactgcctcatcaaattgacgccccgcgcgtacggcacagacgaagtccgctatcaagctgacatccccgctgtcagtacttggcgcggtaagggcagcactgccaaacatgaagatcccgtcccagatcccatggcagctaagtcgtag

SEQ ID NO: 802 - protein, 446 aa, Muscodor strobelii
  misc_feature: SGI Peptide ID NO. 559846
  misc_feature (6)..(225): Pfam Id: PF01591 Pfam Desc: 6-phosphofructo-2-kinase
  misc_feature (227)..(378): Pfam Id: PF00300 Pfam Desc: Phosphoglycerate mutase family
  misc_feature (1)..(442): NCBI GI: 46117002 Blast Desc: FG04343.1 [Gibberella zeae PH-1]
  misc_feature (1)..(442): NCBI GI: 256729430 Blast Desc: [Nectria haematococca mpVI 77-13-4]
  misc_feature (1)..(440): NCBI GI: 171677069 Blast Desc: protein product [Podospora anserina] gi|170936602|emb|CAP61261.1| protein product [Podospora anserina]
  misc_feature (1)..(440): NCBI GI: 85091488 Blast Desc: fructose-2,6-bisphosphatase [Neurospora crassa OR74A] gi|28920318|gb|EAA29690.1| fructose-2,6-bisphosphatase [Neurospora crassa OR74A]
  misc_feature (1)..(440): NCBI GI: 116205603 Blast Desc: conserved [Chaetomium globosum CBS 148.51] gi|88176813|gb|EAQ84281.1| conserved [Chaetomium globosum CBS 148.51]
  misc_feature (1)..(442): NCBI GI: 145608592 Blast Desc: MGG_06524 [Magnaporthe grisea 70-15] gi|145016043|gb|EDK00533.1| MGG_06524 [Magnaporthe grisea 70-15]
  misc_feature (1)..(442): NCBI GI: 261355479 Blast Desc: fructose-2,6-bisphosphatase [Verticillium albo-atrum VaMs.102]
  misc_feature (5)..(440): NCBI GI: 156043483 Blast Desc: SS1G_10745 [Sclerotinia sclerotiorum 1980] gi|154695132|gb|EDN94870.1| SS1G_10745 [Sclerotinia sclerotiorum 1980]
  misc_feature (5)..(435): NCBI GI: 189199226 Blast Desc: 6-phosphofructo-2-kinase/fructose-2,6-biphosphatase 2 [Pyrenophora tritici-repentis Pt-1C-BFP] gi|187983049|gb|EDU48537.1| 2 [Pyrenophora tritici-repentis
  misc_feature (5)..(405): NCBI GI: 154291620 Blast Desc: fructose-2,6-bisphosphatase [Botryotinia fuckeliana B05.10] gi|150846659|gb|EDN21852.1| fructose-2,6-bisphosphatase [Botryotinia fuckeliana B05.10]
  misc_feature (14)..(431): SWISSPROT Homolog: EC 3.1.3.46 Fructose-2,6-bisphosphate 2-phosphatase
MAPGTNGRGVQVEDTRICVVMVGLPARGKSYIAQKAQRYLTWLSIPAKTFNVGNYRRNDAPQPSADFFDSSNKEGERRRRAAAEAAIADMLGWFRQGGVIGILDATNSTKDRRKWVMDVCTREGIEVLFVESKCDNEEMIMANIRDVKTTSPDYKGQDPEEAAQDFRNRIKQYEKVYKSIDEDGDESHYTYLKMMDVGSQVIINRIQDYLQSRVVYYLMNLHIRPRSVWLSRHGESMYNLSGRIGGDADLSARGHQYAQKLPELVRQSVGDDRPLTVWTSTLKRTIATSRFLPDNYNQLQWKALDELDAGVCDGMTYQEIKDVYPEDFIARDEDKYNYRYRGGESYRDVVIRLEPIIMELERSEDILIVTHQAILRCIYAYFMKKDQSRSPWMNVPLHCLIKLTPRAYGTDEVRYQADIPAVSTWRGKGSTAKHEDPVPDPMAAKS

SEQ ID NO: 803 - DNA, 3501 bp, Muscodor strobelii
  misc_feature: SGI EST ID NO. CUFF.2285.0
  misc_feature: Variant of the nucleotide sequence at SEQ ID NO 801
cactagataagattatttcgaataatttgtttttggtagttgctgttagcatgcatcgttatcattttcctgttggaaaatgcagctcccccacgttcgtgttacttcattttgacatcgtttcttatcgtgatgcgattcgtcgcaatcgcaattcgcatatcagataagtgctttatcagtgcagtccagagccctggttcaccgatgggctctatagcaacttcaataattctccagcccaagataaattggtatccagtccttctaaccagttccaatctgaggtaaaaaacaggctcaggctattctcataacaaatcactcaatcaagcttagatttccagacaaatactccagttcgtgatggggtctgatgaattgaaacttacgagaatcacatcgctgctccacattccattagtgaccccactaagtgcacacagaaacatccccaaatcggtactcgccatcagcaaagcctattacgtattgaccacagagtgaaaataggcaatctgatagcttggtgactctccccgctgctcagtggcgattagaaatggcatcttgtgaacagattggaaatatcctgcttgaagacagccggcgattactcgtggtcgacgacaattatccattccacacagggttgatttcgtactgagtacaagcagcgagacaacaagtcctcgaactcggaaaaggcttcggtaataggcaaacggacgcctttataaacctaaggctagcatgaggggggttctcgcaggcggtggcgttagccgtcgaggccacgcttacagcttttcgaaggtcgaggacaccagaatatgtgtcgtgatggtgggattgcccgctcgtgggaagagctacatagcgcaaaaaggtgaaccaccatcctacgagcatccttgcaagcccaatggcttggtatgaggggaattatcgcattgctgaccttgtgttccctgctcgacagcccagcgctacttgacctggctctcgatcccggccaagactttcaatgtcggcaattaccggcgcaatgacgcaccccaaccatccgccgatttcttcgacagcagcaacaaagagggcgaacgccgtcgccgtgcggcagccgaggccgctattgccgacatgctgggctggttcaggcagggcggtgttattgggatactggacgccaccaactcgaccaaggaccggcgcaagtgggtgatggacgtctgcacgcgcgagggcatcgaggtgctgtttgtcgagtccaagtgcgacaacgaagaaatgatcatggccaatatacgtgatgtcaaaactaccagtcctgattacaagggccaagaccctgaggaggctgcgcaagacttccgcaaccgcatcaagcagtacgagaaagtctacaagtccattgacgaggatggcgacgagagtcattacacctacctgaaaatgatggacgtgggtagccaagtcatcatcaaccggatacaggactacctccagagtcgtgtcgtctattacctcatgaacttacacattcgaccaagatctgtctggctttcgcggcacggtgagtcgatgtacaatctttcaggccggataggtggcgacgcagatttatctgcaagaggccatcaatatgcacaaaaattaccagagcttgtgcgacagtctgttggggatgaccgaccgcttacagtatggacgtcaacgctgaagagaacaatagctacatcacgcttcttacccgataactacaaccaactacagtggaaagcgctcgacgagttagacgccggtgtgtgcgatggcatgacctatcaagagattaaagatgtttaccccgaagattttattgcgcgcgatgaagacaagtataattatcgctaccgtggcggtgaatcctaccgcgacgtggtgattcggttggaacctatcatcatggaactagaacgatccgaggatattctcatcgtcacacatcaggccatacttcggtgcatatatgcatactttatgaagaaggaccaatctcgttcaccgtggatgaacgtgccgcttcactgcctcatcaaattgacgccccgcgcgtacggcacagacgaagtccgctatcaagctgacatccccgctgtcagtacttggcgcggtaagggcagcactgccaaacatgaagatcccgtcccagatcccatggcagctaagtcgtaggactgttgaggatcaaatgacggggctagctatatttgatcgtgtgtacacgttgcacgctgatgtatggctattgtagagacttagacgagttacatgagcgaagcaaaaagtacgagaatcttacatgacgggtgattacgagttgatgatactcgcgttacaacacgatacgatgccacgatagagatgggcttgggcgacggaaaagggtcaaggcattacatttttaacgagcatgattgggaaaaggaacagaccccaacattgtgggaaggaatgaatttgacagtgggctattctcccctgtccagcatcgggagttgactattgggtccagccttcgcatgttccagcacttctgttggtcagatgtacaacaactacttaccgatgggcacaacgctccattgggcaaatggcattctgcaggtattgagacatgacttgaataatcctcccctgcagtgaatgaacatggtatcgttgatgggtaatatgtgcgttgttttattcaggttaattgactatttgcctgtcctagatttcatgaatctgtagttgtataatgtctacctatgcgccttcagtttcaaggtgtccccgtctgagagctgctgtactaattctcagatatcgttgacttgcactcgacttggacccctctgagcgtcgtctcgcttgtacggcgtccctctaccgccaagggagaaaagtcgcatttgaggggtactagaagataaggcagttgcaggcaagagcgcgtctgctcaaaagtgcaggtgcaggtgcgcgacgcgttttctcattcaatacacgcccgaagatcgcccatccaataaaaaccccgcctgtagtcagctatataggtaccaataattagcagacagttaacagttaatgagccatgaccgggcgatgtcgtggtgttggtaaggtgacgaaagcctggcaagctttactggttggtcaccagttcgagtcgcccccatcgccgtcgttttttttttttttgttttttttttttggcccttttcgctttcgatgcaaatggcatgacaaccacttcttgatcattcttcggctcgcactcgacgatatcgttagcccactacttaacaagctggttcttcaatggtgtgtagttgacggtacccctaaattcaacatcacagtgcacttatgggtcatgagaacgtgtgtaatattgaaatactcatacaaatatgtgtagccgtcagtttccatagcttgcgttaggtagtcttatgcggttggtttata

SEQ ID NO: 804 - DNA, 918 bp, Muscodor strobelii
  misc_feature: SGI cDNA ID NO. 559847
  misc_feature: Elevated expression when VOC is produced
  misc_feature: Encodes the peptide sequence at SEQ ID NO 805
atgagcgacacggcctaccgccacctcatctacccgagcgagtccatcaatgaatggacatcttatccaaatgaagacttttctctgaaattcttccaaaaagtgcaatggaatgagatcaagcccagccgatctagtacccaggtcgagctgtgtctcaatgatcatcatacgaggtccgatacgctctttcggcctagttatggtgtagcggagcttgaactagcttcaagcaactgccaattgtgtcaaatgctctggaatgcactaagtacgcaccctgaagtgatagggcgagatgttgttgctttacgtcagaatggaggcgtagtcggaattgaaaatggcccaaatctgctctctgtctacgtcgagccgaacgacttcgtttccccaaaagtacagattgggctaccaaaacttttgaaacatggcaccgtagagcaatttgctctgctcggacaatggatcgaacattgtgataagaaacacgcaatgtgcaaaccccagcacggctcaaatggtactgagtatagtggcaagtttctgcctacacgtcttatagaggttgaacctctacggcttgttgattcgcctcagcacaaagatacgcgttatgtagccttaagccatcgctggggggacctgaaggacatgcagaggttctgcacccgcaaagataacctggaagactcaaaagtgtcaattaacttcgactgcttaccggatacctttcgcgacgcagttattgtaacacgagaaattagggtcaaatatctctgggtagactctctctgcattgtccaagacgatgaagatgactgggaaagagaatcgaccaagatggaacaagtcttcagttcagccttttgtgcaattgcagctacttccgcaaaatcgctattagaaggtttttaa

SEQ ID NO: 805 - protein, 305 aa, Muscodor strobelii
  misc_feature: SGI Peptide ID NO. 559847
  misc_feature (206)..(303): Pfam Id: PF06985 Pfam Desc: Heterokaryon incompatibility protein (HET)
  misc_feature (206)..(297): Pfam Id: PF06985 Pfam Desc: Heterokaryon incompatibility protein (HET)
  misc_feature (11)..(305): NCBI GI: 256723898 Blast Desc: NECHADRAFT_78374 [Nectria haematococca mpVI 77-13-4]
  misc_feature (17)..(305): NCBI GI: 256721865 Blast Desc: NECHADRAFT_88069 [Nectria haematococca mpVI 77-13-4]
  misc_feature (17)..(305): NCBI GI: 256723790 Blast Desc: NECHADRAFT_78344 [Nectria haematococca mpVI 77-13-4]
  misc_feature (71)..(305): NCBI GI: 256729997 Blast Desc: NECHADRAFT_82546 [Nectria haematococca mpVI 77-13-4]
  misc_feature (62)..(305): NCBI GI: 256722820 Blast Desc: NECHADRAFT_87137 [Nectria haematococca mpVI 77-13-4]
  misc_feature (17)..(305): NCBI GI: 46110541 Blast Desc: FG02152.1 [Gibberella zeae PH-1]
  misc_feature (17)..(305): NCBI GI: 171679289 Blast Desc: protein product [Podospora anserina] gi|170939270|emb|CAP64498.1| protein product [Podospora anserina]
  misc_feature (18)..(305): NCBI GI: 256722422 Blast Desc: NECHADRAFT_88961 [Nectria haematococca mpVI 77-13-4]
  misc_feature (131)..(305): NCBI GI: 170940327 Blast Desc: protein product [Podospora anserina]
  misc_feature (71)..(293): NCBI GI: 171694810 Blast Desc: protein product [Podospora anserina] gi|170947647|emb|CAP59809.1| protein product [Podospora anserina]
  misc_feature: Useful for introducing or modulating the production of volatile compounds
MSDTAYRHLIYPSESINEWTSYPNEDFSLKFFQKVQWNEIKPSRSSTQVELCLNDHHTRSDTLFRPSYGVAELELASSNCQLCQMLWNALSTHPEVIGRDVVALRQNGGVVGIENGPNLLSVYVEPNDFVSPKVQIGLPKLLKHGTVEQFALLGQWIEHCDKKHAMCKPQHGSNGTEYSGKFLPTRLIEVEPLRLVDSPQHKDTRYVALSHRWGDLKDMQRFCTRKDNLEDSKVSINFDCLPDTFRDAVIVTREIRVKYLWVDSLCIVQDDEDDWERESTKMEQVFSSAFCAIAATSAKSLLEGF

SEQ ID NO: 806 - DNA, 2133 bp, Muscodor strobelii
  misc_feature: SGI EST ID NO. CUFF.2196.1
  misc_feature: Variant of the nucleotide sequence at SEQ ID NO 804
cttgtcgcggtaccatactgtcacggctgggaacaaatgactgatgtgcaatgaaattgatcttccttattaagactcatactttccaaagaaagttttcgcacgacttcaatttcgtcttcagaccatacgcatgttgtatatctaaggagctgtgatagaatacagatgagcgacacggcctaccgccacctcatctacccgagcgagtccatcaatgaatggacatcttatccaaatgaagacttttctctgaaattcttccaaaaagtgcaatggaatgagatcaagcccagccgatctagtacccaggtcgagctgtgtctcaatgatcatcatacgaggtccgatacgctctttcggcctagttatggtgtagcggagcttgaactagcttcaagcaactgccaattgtgtcaaatgctctggaatgcactaagtacgcaccctgaagtgatagggcgagatgttgttgctttacgtcagaatggaggcgtagtcggaattgaaaatggcccaaatctgctctctgtctacgtcgagccgaacgacttcgtttccccaaaagtacagattgggctaccaaaacttttgaaacatggcaccgtagagcaatttgctctgctcggacaatggatcgaacattgtgataagaaacacgcaatgtgcaaaccccagcacggctcaaatggtactgagtatagtggcaagtttctgcctacacgtcttatagaggttgaacctctacggcttgttgattcgcctcagcacaaagatacgcgttatgtagccttaagccatcgctggggggacctgaaggacatgcagaggttctgcacccgcaaagataacctggaagactcaaaagtgtcaattaacttcgactgcttaccggatacctttcgcgacgcagttattgtaacacgagaaattagggtcaaatatctctgggtagactctctctgcattgtccaagacgatgaagatgactgggaaagagaatcgaccaagatggaacaagtcttcagttcagccttttgtgcaattgcagctacttccgcaaaatcgctattagaaggtttttaatgcgacagagagcaccggaactgtttagaagtcattggacttgggaaccgaactctctacgtatgtcccaacatcgacgacttcgatagggacgttaatgactcggtcctaaacaaacgtgggtgggtcttgcaagaaagggtgttgtcccgacgcactgtatttttcacgcgaacacaaatctattgggagtgtggtgctggaatccaatgtgaaactctagcccggctctacaaacctcaggctgcgtttgttggcgacgccaattttcccacatccgccctagattactaccgcgataggcagcaaataccggtccaagatctttatgaacaatattcagggatggcgttcacgaaaagccatgaccgcgcagtagctatcttcggccttgaagcacgcctcggacggactttcaatatgaaagccacgtttggttttcttagcgagtacttcccgcgtatgctactctggcggcgtcgtgatggagcatatatgaaaaatatcactcgaccatcgcatgggcggtttcatgtcccatcgtggtctttcctttcaaaagagggtgctatcagctacttacagttgaatcgtcatcaaattcgatggcagactgatgttttcatcaatccactgttgcccaattcgtacatttaccgaaatctatcaactttacctctaaaagtaccgaggacaggtttgaacgagacgaccttccaggccgtggcaagaagtctatgttcaacacgaagcaacgaactcgattatctcacgtttgatgaggatgaacattacaatatctttgaactaaagtgtgtgataattgctatggacacacgtcgcattgtagaagaaggacgccaacattattacgtccttatcatatatccgtccatcgagattgacattcggtataaaacgggtgatgttgacagggtttattcaagatatagtagatgtgaatgctatagaagggttggagtaggaaatattaggttggaacactttggacctagagaggtatgggtagacattgtataactgcta

SEQ ID NO: 807 - DNA, 3402 bp, Muscodor strobelii
  misc_feature: SGI cDNA ID NO. 559848
  misc_feature: Reduced expression when VOC is produced
  misc_feature: Encodes the peptide sequence at SEQ ID NO 808
atgcagtccgtccccagtctgattggtgctgggactgctgtcgccgcggcggccacgggcctagtttttggccagctcgccgagggtcaacccgaagacaccccccaaaacagtccgggctcgagtaaacacggctacgtttccgaccacgaccacgaccacgaccacgaccgctcgactgctgtgcactcgactccagaagacgcagttcccgtcgccgcaactcccgcaactctgaccactgctgcaactgctgctcgccgcggagacgagcctgtgctatcatcggcccggccttcaatgcacgcaaatgccccctccgcccaacctcgacttgcccgccgagcgtctccccatgctcacatcactcccaccaagccctcctctgcccgccagtccctaaccaagaaccgcgagtttcctctcgtcgcccctgttgccgaggaccctcgcgactccctctcctccaacggctcgtggatgcggcggctgtccatccgcccattgtctcagcacggcagcttgaggtcgagcctcggcccagactcgccttctatcttctccttcggctcaaatgcccccatcttacccagcccgcgagatgcaccagcacagctaccacccaacaaactagtcaagcgtgcaccagggacgagtggtgccgacgctggtttccccacccggagaggatcccgggctcagatgacgctgcgcagacccgccacgagccatcagagatctgccaccctccagcatcagatagaccccgagagcttgccgccgctacccagcttctccatcgacgaacagaaacgaccccgggccaaaaccgtggggaatcggttccagcagcaggtcactccacaccgaaaaacagaagagccgtcaaggtggcgatcattctggcattccagaatctcgtttggtgtgatcaaaggttcgcctttgcgaggaagtgagagcaatactaactccacggggaagcgtattggcatagggcaagaagctccggagcgagtatatctcgttgccccaactgccataatgaagaacaaccccgacgaaacagcggtgggacctaggcgagagcctgagcatctaacgagcaccgacaacagtccccagtcctcggaaaagagtcagctcgaggtcgaaagcacgccatcgaaacaacctaagaggtccatttcgatgcaattcagctcacccacgaactggattgccagaacaaagccggggagtctgcgtcgccgtaagagaggcggtgatacactgccagggaaaaggaacgtttccgctccggtgtcgggtgatatacaacgggtcgagagcagcaagagaacgcagaatgaatacgtatcgaatagtacagagatcagccaggcggaggcagatcttgctgctattttccgcccacctgagacgaaccaggggccgccgtctccccttccgccgctttctcgtctttccagcttccatatggaattgaatcggctgggctcgtcatcttcaacatcccaggaccgaccggaagagccgagaatgaatcagacaataaattcgagggttaattcccaaacatctaatactcggactttggagcgcgcttccactgtcggtagctctgattaccaccgcggattcacgtcgggtgatgacgatgataccgactttaaaacggatacaccatttgactcttttaggacagttgcttcaggtcgtaaaaggactctcgatagtcctctggaatccatgtttgatgattctcctccaagcactgcggctaaccataacaagccaaaacggctctcgattcaggagattttgggcccatcttttgacgtcggtaataagatcaccgaagaagacgagaatgtacccactcctgtacggacaacatacgaagaatttgaggcacggtttcgcgtagccagcatcgaggacgacgacgcatcgatccaacgatctctattacctgatgctcccgtagagagggactacagtcgcctgtctctagatgacgatgatgaccttagctgggcccgtgaggacgaggtggaagtctaccatcatttatctccacctagctccatgaactcccgtcgaggcagcccgaattttcgatccgcactgagaggtatcagcggcaatgcaaagagtgatgttcggttcgactcggtcagtgaacgacctcggagtaccgtttttgactggactgagccttctgtccatgacaagcgtgagaggaacggccatggctaccgaccaaagacagttcatggcaagcaggaatccgacatgaggggcggtcgatcatccagtcgaagaagtctactaccgaatcatgtgcggagtcagagtgtgccgattgtgccagatcccactgaggccacaaagtctgcccctaaattcggtacttggggtttgggccaaaagaacgtaagcgaggattgggacgatgacttcgactttgacgaagataaaggctcggcaagtgggcctgctgaaagggaggaaagacgattctccatgctggtccctgccaatattcaagcgacacagcctaccgtaagagctcattcgggtcaaattcgagaattatctcttttagtgaacgacttgaaacggctatgtcgcctaggtcgtgagatggatatggtcagtggtccaacagctaagttgtggaatgaagcagagggtatcatcgctctagcttctcccgacgaggacatatccgagatagaggatgcacaagcaatggacgagttcgacttggatgtcatcgatgatcgatatatcgaccaaggtttcaacggcgactctcttgacggaatagagactcccgcacataccgaacagtcgatcaagctcgctcggcgtcgctctgtcttctcaccagaggatgatatctttggatcgtgggatcaacgagatagagcttcggccgccaatcgtcccacaactccggagaatcccatcccagagcctcgatctaccagcgtcgccagatctgtcatggagtctatgcgagtacgccgcactacgatgggcgatgtcgaggagctgagcgaaacagccgaacgttcatccaagtacagactcaacttcgacaccaacagtctgaaagagcttgtcaaacgcgcaggtgatctccgagacagtctgtcagaggtggtccgtcgggtcgaccgcattaccaatagcccaatcagaaccccgaaacacactagagcagacggcagtcctgctttcacgcgtgtcttcgacgaaccaacatcgagccctacacgtcgcgttcctccaagccacggtaacaactcagggctgagcagcacttccgtcaatgcctcctcaccttcgaacggcattaatcggcgcatgcacgtgatgactgtcagttag

SEQ ID NO: 808 - protein, 1133 aa, Muscodor strobelii
  misc_feature: SGI Peptide ID NO. 559848
  misc_feature (63)..(1132): NCBI GI: 256727703 Blast Desc: NECHADRAFT_103550 [Nectria haematococca mpVI 77-13-4]
  misc_feature (1)..(1132): NCBI GI: 116202313 Blast Desc: CHGG_09041 [Chaetomium globosum CBS 148.51] gi|88177559|gb|EAQ85027.1| CHGG_09041 [Chaetomium globosum CBS 148.51]
  misc_feature (1)..(1133): NCBI GI: 46136023 Blast Desc: FG09527.1 [Gibberella zeae PH-1]
  misc_feature (1)..(1133): NCBI GI: 171682252 Blast Desc: protein product [Podospora anserina] gi|170941085|emb|CAP66735.1| protein product [Podospora anserina]
  misc_feature (481)..(1133): NCBI GI: 261359646 Blast Desc: conserved [Verticillium albo-atrum VaMs.102]
  misc_feature (160)..(1133): NCBI GI: 39979247 Blast Desc: [Neurospora crassa]
  misc_feature (160)..(1103): NCBI GI: 85086282 Blast Desc: NCU04053 [Neurospora crassa OR74A] gi|28918762|gb|EAA28432.1| [Neurospora crassa OR74A]
  misc_feature (518)..(1132): NCBI GI: 154323462 Blast Desc: BC1G_00130 [Botryotinia fuckeliana B05.10] gi|150842359|gb|EDN17552.1| BC1G_00130 [Botryotinia fuckeliana B05.10]
  misc_feature (585)..(1132): NCBI GI: 156057825 Blast Desc: SS1G_04644 [Sclerotinia sclerotiorum 1980] gi|154702429|gb|EDO02168.1| SS1G_04644 [Sclerotinia sclerotiorum 1980]
  misc_feature (159)..(1092): NCBI GI: 67528216 Blast Desc: AN4314.2 [Aspergillus nidulans FGSC A4] gi|40741285|gb|EAA60475.1| AN4314.2 [Aspergillus nidulans FGSC A4] gi|259482883|tpe|CBF77785.1| TPA: conserved [Aspergillus FGSC
  misc_feature: Useful for introducing or modulating the production of volatile compounds
MQSVPSLIGAGTAVAAAATGLVFGQLAEGQPEDTPQNSPGSSKHGYVSDHDHDHDHDRSTAVHSTPEDAVPVAATPATLTTAATAARRGDEPVLSSARPSMHANAPSAQPRLARRASPHAHITPTKPSSARQSLTKNREFPLVAPVAEDPRDSLSSNGSWMRRLSIRPLSQHGSLRSSLGPDSPSIFSFGSNAPILPSPRDAPAQLPPNKLVKRAPGTSGADAGFPTRRGSRAQMTLRRPATSHQRSATLQHQIDPESLPPLPSFSIDEQKRPRAKTVGNRFQQQVTPHRKTEEPSRWRSFWHSRISFGVIKGSPLRGSESNTNSTGKRIGIGQEAPERVYLVAPTAIMKNNPDETAVGPRREPEHLTSTDNSPQSSEKSQLEVESTPSKQPKRSISMQFSSPTNWIARTKPGSLRRRKRGGDTLPGKRNVSAPVSGDIQRVESSKRTQNEYVSNSTEISQAEADLAAIFRPPETNQGPPSPLPPLSRLSSFHMELNRLGSSSSTSQDRPEEPRMNQTINSRVNSQTSNTRTLERASTVGSSDYHRGFTSGDDDDTDFKTDTPFDSFRTVASGRKRTLDSPLESMFDDSPPSTAANHNKPKRLSIQEILGPSFDVGNKITEEDENVPTPVRTTYEEFEARFRVASIEDDDASIQRSLLPDAPVERDYSRLSLDDDDDLSWAREDEVEVYHHLSPPSSMNSRRGSPNFRSALRGISGNAKSDVRFDSVSERPRSTVFDWTEPSVHDKRERNGHGYRPKTVHGKQESDMRGGRSSSRRSLLPNHVRSQSVPIVPDPTEATKSAPKFGTWGLGQKNVSEDWDDDFDFDEDKGSASGPAEREERRFSMLVPANIQATQPTVRAHSGQIRELSLLVNDLKRLCRLGREMDMVSGPTAKLWNEAEGIIALASPDEDISEIEDAQAMDEFDLDVIDDRYIDQGFNGDSLDGIETPAHTEQSIKLARRRSVFSPEDDIFGSWDQRDRASAANRPTTPENPIPEPRSTSVARSVMESMRVRRTTMGDVEELSETAERSSKYRLNFDTNSLKELVKRAGDLRDSLSEVVRRVDRITNSPIRTPKHTRADGSPAFTRVFDEPTSSPTRRVPPSHGNNSGLSSTSVNASSPSNGINRRMHVMTVS

SEQ ID NO: 809 - DNA, 1341 bp, Muscodor strobelii
  misc_feature: SGI cDNA ID NO. 559849
  misc_feature: Encodes the peptide sequence at SEQ ID NO 810
atgcgtgagattgttcatcttcagaccggtcagtgcggtaaccaaattggtgctgctttctggcaacagatctccggcgagcatggcctcgacggcaatggcgtctacaacggcacctccgagctccagctcgagcgcatgagcgtctacttcaacgagggtgccggcaacaagtatgtcccccgcgccgtcctcgtcgatctcgagcccggcaccatggatgccgtccgcgctggtcccttcggtcagctcttccgccccgacaacttcgtcttcggccagtctggtgctggcaacaactgggccaagggtcactacactgagggtgccgagcttgtcgacaacgtcctcgatgtcgtccgtcgcgaggctgagggttgcgactgcctccagggcttccagatcacccactcgctcggtggtggtaccggtgccggtatgggcacgctgttgatctccaagatccgtgaggagttccccgaccgcatgatggccaccttctccgtcgtcccctcccccaaggtctccgacaccgtcgtcgagccctacaacgccaccctctccgtccaccagctggtcgagaactcggacgagaccttctgcattgacaacgaggctctctacgacatctgcatgcgtaccctcaagttgtccaacccttcctacggcgacctgaaccacctcgtctccgccgtcatgtctggcgtcaccacctgtctccgcttccccggccagctgaactctgacctgcgcaagttggctgtcaacatggtgcccttcccccgtctccacttcttcatggtcggcttcgctcctctgaccagccgtggcgctggtgctttccgcgctgtcactgttcccgagttgacccagcagatgttcgaccccaagaacatgatggctgcttctgacttccgcaatggtcgctacctcacatgctctgccatcttccgtggcaaggtttccatgaaggaggtcgaggaccagatgcgcaacgtccagaacaagaactcatcctacttcgtcgagtggattcccaacaatgtccagaccgctctctgctccattcctccccgtggcctcaagatgtcgtctaccttcgtcggtaactcgactgccatccaggagctcttcaagcgtgtcggtgagcagttcactgccatgttccgtcgcaaggctttcttgcattggtacactggcgagggtatggacgagatggagttcactgaggctgagtccaacatgaacgacttggtcagcgagtaccagcaataccaggatgctggtgttgatgaagaagaggaggagtacgaggaggaggtcccccttgaggaggagtaa

SEQ ID NO: 810 - protein, 446 aa, Muscodor strobelii
  misc_feature: SGI Peptide ID NO. 559849
  misc_feature (45)..(244): Pfam Id: PF00091 Pfam Desc: Tubulin/FtsZ family, GTPase domain
  misc_feature (246)..(383): Pfam Id: PF03953 Pfam Desc: Tubulin/FtsZ family, C-terminal domain
  misc_feature (1)..(446): NCBI GI: 189189682 Blast Desc: tubulin beta chain [Pyrenophora tritici-repentis Pt-1C-BFP] gi|74705272|sp|Q4R9N3.1|TBB_COCHE RecName: Full=Tubulin beta chain; AltName: Full=Beta-tubulin beta-tubulin
  misc_feature (1)..(431): NCBI GI: 849160 Blast Desc: beta-tubulin [Gibberella fujikuroi]
  misc_feature (1)..(446): NCBI GI: 31043659 Blast Desc: beta-tubulin [Blumeria graminis f. sp. avenae]
  misc_feature (1)..(446): NCBI GI: 4033472 Blast Desc: TBB_MYCPJ RecName: Full=Tubulin beta chain; AltName: Full=Beta-tubulin gi|2852439|gb|AAC02112.1| beta-tubulin [Mycosphaerella pini]
  misc_feature (1)..(430): NCBI GI: 1351201 Blast Desc: TBB2_ERYPI RecName: Full=Tubulin beta-2 chain; AltName: Full=Beta-2-tubulin gi|602578|emb|CAA57491.1| beta-tubulin [Erysiphe pisi]
  misc_feature (1)..(430): NCBI GI: 1729851 Blast Desc: TBB_RHYSE RecName: Full=Tubulin beta chain; AltName: Full=Beta-tubulin gi|1263904|emb|CAA56936.1| beta-tubulin [Rhynchosporium secalis]
  misc_feature (1)..(430): NCBI GI: 51701887 Blast Desc: TBB_UNCNE RecName: Full=Tubulin beta chain; AltName: Full=Beta-tubulin gi|30720144|gb|AAM23017.1| tubulin beta chain [Erysiphe necator]
  misc_feature (1)..(431): NCBI GI: 148910832 Blast Desc: beta-tubulin [Fusarium oxysporum f. sp. phaseoli]
  misc_feature (1)..(428): NCBI GI: 77023492 Blast Desc: beta tubulin [Verticillium albo-atrum]
  misc_feature (1)..(446): NCBI GI: 61678003 Blast Desc: beta-tubulin [Cercospora beticola]
MREIVHLQTGQCGNQIGAAFWQQISGEHGLDGNGVYNGTSELQLERMSVYFNEGAGNKYVPRAVLVDLEPGTMDAVRAGPFGQLFRPDNFVFGQSGAGNNWAKGHYTEGAELVDNVLDVVRREAEGCDCLQGFQITHSLGGGTGAGMGTLLISKIREEFPDRMMATFSVVPSPKVSDTVVEPYNATLSVHQLVENSDETFCIDNEALYDICMRTLKLSNPSYGDLNHLVSAVMSGVTTCLRFPGQLNSDLRKLAVNMVPFPRLHFFMVGFAPLTSRGAGAFRAVTVPELTQQMFDPKNMMAASDFRNGRYLTCSAIFRGKVSMKEVEDQMRNVQNKNSSYFVEWIPNNVQTALCSIPPRGLKMSSTFVGNSTAIQELFKRVGEQFTAMFRRKAFLHWYTGEGMDEMEFTEAESNMNDLVSEYQQYQDAGVDEEEEEYEEEVPLEEE

SEQ ID NO: 811 - DNA, 2002 bp, Muscodor strobelii
  misc_feature: SGI EST ID NO. CUFF.2303.0
  misc_feature: Variant of the nucleotide sequence at SEQ ID NO 809
ctgatctcctctccaagcatcaaaattgaccaatttgaccaaccagagcagagctgcagcccatagcttcagcttctgccactccctgtcttccactgtacctaggtagtccaaccggctggctggcgtgcaccccgacccgccgtcgtccctcgcaccaacacatcaattggcactagccccagaccagaaacaccagcaccaccacaccgctcctcttttctccttctttaactcaactcccctttctcccttcaacccatctgtgttgctgtcctgtcttcctccatcccgctctacgaccgcctcattccacacccgtctacactcctcaagtcaacaagccgccaacatgcgtgagattgttcatcttcagaccggtcagtgcggtaaccaaattggtgctgctttctggcaacagatctccggcgagcatggcctcgacggcaatggcgtctacaacggcacctccgagctccagctcgagcgcatgagcgtctacttcaacgagggtgccggcaacaagtatgtcccccgcgccgtcctcgtcgatctcgagcccggcaccatggatgccgtccgcgctggtcccttcggtcagctcttccgccccgacaacttcgtcttcggccagtctggtgctggcaacaactgggccaagggtcactacactgagggtgccgagcttgtcgacaacgtcctcgatgtcgtccgtcgcgaggctgagggttgcgactgcctccagggcttccagatcacccactcgctcggtggtggtaccggtgccggtatgggcacgctgttgatctccaagatccgtgaggagttccccgaccgcatgatggccaccttctccgtcgtcccctcccccaaggtctccgacaccgtcgtcgagccctacaacgccaccctctccgtccaccagctggtcgagaactcggacgagaccttctgcattgacaacgaggctctctacgacatctgcatgcgtaccctcaagttgtccaacccttcctacggcgacctgaaccacctcgtctccgccgtcatgtctggcgtcaccacctgtctccgcttccccggccagctgaactctgacctgcgcaagttggctgtcaacatggtgcccttcccccgtctccacttcttcatggtcggcttcgctcctctgaccagccgtggcgctggtgctttccgcgctgtcactgttcccgagttgacccagcagatgttcgaccccaagaacatgatggctgcttctgacttccgcaatggtcgctacctcacatgctctgccatcttccgtggcaaggtttccatgaaggaggtcgaggaccagatgcgcaacgtccagaacaagaactcatcctacttcgtcgagtggattcccaacaatgtccagaccgctctctgctccattcctccccgtggcctcaagatgtcgtctaccttcgtcggtaactcgactgccatccaggagctcttcaagcgtgtcggtgagcagttcactgccatgttccgtcgcaaggctttcttgcattggtacactggcgagggtatggacgagatggagttcactgaggctgagtccaacatgaacgacttggtcagcgagtaccagcaataccaggatgctggtgttgatgaagaagaggaggagtacgaggaggaggtcccccttgaggaggagtaaatattgccttcagatacccacggtttggacgagtttcagggcctcaattcgcaatgcagcgggtcgaattgagtgtttgggtgtgtcgcgcttctgtcggatcactatcctgccccaatctcgagctccctttctgttgttccctggaaaacgcagtaactgtcatgtaatggaattggccgattgcgacattgagcggtgtatagggttgttagatatacctcttcagtcttcgcttctaaaccaacaaaacaggaggaccattattgattgcctgtagtgacaaagaaataaatcattccttgtaca

SEQ ID NO: 812 - DNA, 3342 bp, Muscodor strobelii
  misc_feature: SGI cDNA ID NO. 559850
  misc_feature: Encodes the peptide sequence at SEQ ID NO 813
atggcttctggtcaaagaaagaggcttgtcgtcgttgggttgggtatggttggtatcgcttttatagagaaagtgttaaaactagactctcgagctcgtgaatacgacatcatagttataggcgacgagccacacttcgcttacaaccgtgttggcctaacgagcttcttcgcccatcggaaagtcgagaatctctatctggcgcctcaagaatggtactcagatcacgcaccagacaaccaacttaattaccacatcaacacgcctgtaacgggtatcgattcttcaaagaaaacagtaacatgcgcaaatggcgatgttgtcgcatacgatatcctggtgctcgccaccggctcagatgcagtcctgccaacgcatacgccaggttatgatgccaagggggtcttcgtctaccgcacgatcgacgacctgcagaagctgatagaatacggtgagatacgcaaagggactgtaggggctgtggtaggtggtggtctcctgggtctcgaggcagcgagtgcaatgcttgatctcaagtcatttgagaaaatcaaactcatcgaacgcaaccgctgggtcatgagccgacaactagactccgaagcagggaatctcgtcgtcgagaaggtcactaaccttggcatcgatgttatgctaactaaaagggtgaaagtgatcaagacggacgagacgaatagtgtatcaggagtcgtattcgaggacggcgaggaaatggaatgctcgactatttgcttcgcgattggggttaagccacgagatgaacttgcaaagggagcaggtatcacttgttcggagcgaagcggcggtattctcgtgaaagacgatctctcaacaaatattacggatatttatgctattggagagtgcgcgagctgggaaaaccacacattcggtctcatcgcgccgggcattgaaatggcagacgtgctctcgtttaacctaacgcaagcaaagttacatcaaccacgagccttcaagcgaccagatttgagcaccaagttaaaactcctcggcgttgatgtagccagctttggagactttttcgcagatagggatgggccaagtttcttaccagcgaaagtggcgcggaaaaagacaacgacggcagaaggcgaaaagccaaagcctcaagttcaagccctcgtctacaaagatccgttcgcccaagtgtataagaaatatctcttcacggccgacggtaagtttctactgggtggcatgatgataggcgatacaagcgactacgtcaagcttgtgccaatggtcaagaatcagaaagaactcgatataccaccttcacagttgatactcggcgcaaagaaagacggtgatgatggctctgatgacctcgacgacgacacgcaaatctgctcgtgccacaacgtgtccaagggtgatgtagtcaagacggctaaagaagggacctgtaagtcggtgggcgaggtcaaagcctgcacgaaagccggcacgggttgtggtggatgcatgccgctcgtgacgagtatatttaacaaggcgatggcggatatgggcacagaagttaagaactacctgtgttctcactttgactactcgcgtgccgatctatacaacatcgtcatggtgaagcagctcaccaccatagaggaggtgatgagggaagctggaaatgacaagagttccgatgggtgcgaagcttgcaaaccagctattggaagcatattcgcctcgctttataaccgccacattctgaccaagcccctacacgggttacaggacaccaacgataggtttttgggcaatatccaaagaaacggaacatactctattattccacgggtctcagctggcgagatattacccgagcatttgatcttgataggtgatatcgctaaagagtacgatctatacactaagattacaggtggacaacgcatcgatatgtttggagctaagaaacaggatctcattgcaatatggaagaaacttattgacggtggcatggaaagtggacacgcatatgctaaatctctacgaactgtcaagagttgcgtcggctcaacgtggtgtagatacggagttggagacagtgtgggaatggcagttcgtgttgaggagcgttataagagtatacgaagtcctcataaactgaaaggcggcgttagcgggtgtgtaagagaatgtgctgaggcgcagagtaaagacttcggacttatcgcaactgaaaaggggttcaatatcttcgtaggcggaaacggcggcgcaaaaccgcgacatgcccaactcctcgccaaagatgtcccgccgttagaagtggtcccaatacttgaccggtatctaatgttctacatccggactgccgacaaattacaacgtacagccccctggcttgaagccctgccgggtggactcaaataccttcgtgaagtaatcctcgacgacaaactaggaatctgcgcctctctagaatcccagatgcaagcactagtagactcattcttcgacgaatgggctgaggcaatcaagagtcccgagatagcctccaaattccaacaattcgcaaacacaaccgagaccctcgaaaacgtcgaggtggaacaagaccggggacaatcacgccccgcgttttggcccacggaatcagcaacggtggacttcaagggactgaaagaccgctggtctagcacggcatggcagccagtcattgaagcgaattacttcgccggagcagacgaaacaccaaatggaatatcagctaatatcaaacgtggcgacacacaacttgccctctggcgtgtacgggggaaatattatgcaacacagcagatgtgtcctcataaacgaacctttgccttgtccgaaggactcatcgggcaagaagccttacctcccacaccacctaccacacctccctcatcctctccaccactttcaccatccgcagatacgtctactgcatcgcagaaagagccttgcggtagctctaagactccctgggtatcatgccccttccacaagcgaaacttcgacttatcttctggctcatgtacaaacgacgagaccctttctatcgccacatttcccgctgaagaacgcccagatggtcttatatacctactcctcccaccaattgccgaactcgatgccgagcttggcacaacgaagtggaaagtcaagaaatctgacgccggaccaagtgaattcgaggaccttgacaagaagatttcgtttaagggccggcgggcgaagaaagccagtgttagaccactggccgagacaactgtgaagaaacagccacttggatcgggatatggaggatgtggcggagggattgaatggtga

SEQ ID NO: 813 - protein, 1113 aa, Muscodor strobelii
  misc_feature: SGI Peptide ID NO. 559850
  misc_feature (461)..(514): Pfam Id: PF04324 Pfam Desc: BFD-like [2Fe-2S] binding domain
  misc_feature (674)..(820): Pfam Id: PF01077 Pfam Desc: Nitrite and sulphite reductase 4Fe-4S domain
  misc_feature (599)..(666): Pfam Id: PF03460 Pfam Desc: Nitrite/Sulfite reductase ferredoxin-like half domain
  misc_feature (158)..(255): Pfam Id: PF00070 Pfam Desc: Pyridine nucleotide-disulphide oxidoreductase
  misc_feature (8)..(301): Pfam Id: PF07992 Pfam Desc: Pyridine nucleotide-disulphide oxidoreductase
  misc_feature (903)..(1034): Pfam Id: PF00355 Pfam Desc: Rieske [2Fe-2S] domain
  misc_feature (1)..(1113): NCBI GI: 145611126 Blast Desc: MGG_00634 [Magnaporthe grisea 70-15] gi|145018451|gb|EDK02730.1| MGG_00634 [Magnaporthe grisea 70-15]
  misc_feature (6)..(1113): NCBI GI: 171682432 Blast Desc: protein product [Podospora anserina] gi|170941175|emb|CAP66825.1| protein product [Podospora anserina]
  misc_feature (3)..(1100): NCBI GI: 256733542 Blast Desc: [Nectria haematococca mpVI 77-13-4]
  misc_feature (1)..(1113): NCBI GI: 46128049 Blast Desc: FG08402.1 [Gibberella zeae PH-1]
  misc_feature (1)..(1113): NCBI GI: 116202233 Blast Desc: CHGG_09001 [Chaetomium globosum CBS 148.51] gi|88177519|gb|EAQ84987.1| CHGG_09001 [Chaetomium globosum CBS 148.51]
  misc_feature (5)..(1077): NCBI GI: 154324076 Blast Desc: BC1G_00437 [Botryotinia fuckeliana B05.10] gi|150842666|gb|EDN17859.1| BC1G_00437 [Botryotinia fuckeliana B05.10]
  misc_feature (5)..(1094): NCBI GI: 119495389 Blast Desc: nitrite reductase NiiA [Neosartorya fischeri NRRL 181] gi|119412642|gb|EAW22583.1| nitrite reductase NiiA [Neosartorya fischeri NRRL 181]
  misc_feature (1)..(1113): NCBI GI: 114650032 Blast Desc: nitrite reductase [Fusarium oxysporum]
  misc_feature (5)..(1085): NCBI GI: 70995798 Blast Desc: nitrite reductase NiiA [Aspergillus fumigatus Af293] gi|19577345|emb|CAD28426.1| nitrite reductase [Aspergillus fumigatus] gi|42820687|emb|CAF32000.1| nitrite reductase, nitrite
  misc_feature (6)..(1084): NCBI GI: 161784349 Blast Desc: NIR_NEUCR RecName: Full=Nitrite reductase [NAD(P)H]
  misc_feature (6)..(1085): SWISSPROT Homolog: EC 1.7.1.4 Nitrite reductase (NAD(P)H)
MASGQRKRLVVVGLGMVGIAFIEKVLKLDSRAREYDIIVIGDEPHFAYNRVGLTSFFAHRKVENLYLAPQEWYSDHAPDNQLNYHINTPVTGIDSSKKTVTCANGDVVAYDILVLATGSDAVLPTHTPGYDAKGVFVYRTIDDLQKLIEYGEIRKGTVGAVVGGGLLGLEAASAMLDLKSFEKIKLIERNRWVMSRQLDSEAGNLVVEKVTNLGIDVMLTKRVKVIKTDETNSVSGVVFEDGEEMECSTICFAIGVKPRDELAKGAGITCSERSGGILVKDDLSTNITDIYAIGECASWENHTFGLIAPGIEMADVLSFNLTQAKLHQPRAFKRPDLSTKLKLLGVDVASFGDFFADRDGPSFLPAKVARKKTTTAEGEKPKPQVQALVYKDPFAQVYKKYLFTADGKFLLGGMMIGDTSDYVKLVPMVKNQKELDIPPSQLILGAKKDGDDGSDDLDDDTQICSCHNVSKGDVVKTAKEGTCKSVGEVKACTKAGTGCGGCMPLVTSIFNKAMADMGTEVKNYLCSHFDYSRADLYNIVMVKQLTTIEEVMREAGNDKSSDGCEACKPAIGSIFASLYNRHILTKPLHGLQDTNDRFLGNIQRNGTYSIIPRVSAGEILPEHLILIGDIAKEYDLYTKITGGQRIDMFGAKKQDLIAIWKKLIDGGMESGHAYAKSLRTVKSCVGSTWCRYGVGDSVGMAVRVEERYKSIRSPHKLKGGVSGCVRECAEAQSKDFGLIATEKGFNIFVGGNGGAKPRHAQLLAKDVPPLEVVPILDRYLMFYIRTADKLQRTAPWLEALPGGLKYLREVILDDKLGICASLESQMQALVDSFFDEWAEAIKSPEIASKFQQFANTTETLENVEVEQDRGQSRPAFWPTESATVDFKGLKDRWSSTAWQPVIEANYFAGADETPNGISANIKRGDTQLALWRVRGKYYATQQMCPHKRTFALSEGLIGQEALPPTPPTTPPSSSPPLSPSADTSTASQKEPCGSSKTPWVSCPFHKRNFDLSSGSCTNDETLSIATFPAEERPDGLIYLLLPPIAELDAELGTTKWKVKKSDAGPSEFEDLDKKISFKGRRAKKASVRPLAETTVKKQPLGSGYGGCGGGIEW

SEQ ID NO: 814 - DNA, 1648 bp, Muscodor strobelii
  misc_feature: SGI EST ID NO. CUFF.2247.0
  misc_feature: Variant of the nucleotide sequence at SEQ ID NO 812
ggttggtatcgcttttatagagaaagtgttaaaactagactctcgagctcgtgaatacgacatcatagttataggcgacgagccacacttcgcttacaaccgtgttggcctaacgagcttcttcgcccatcggaaagtcgagaatctctatctggcgcctcaagaatggtactcagatcacgcaccagacaaccaacttaattaccacatcaacacgcctgtaacgggtatcgattcttcaaagaaaacagtaacatgcgcaaatggcgatgttgtcgcatacgatatcctggtgctcgccaccggctcagatgcagtcctgccaacgcatacgccaggttatgatgccaagggggtcttcgtctaccgcacgatcgacgacctgcagaagctgatagaatacggtgagatacgcaaagggactgtaggggctgtggtaggtggtggtctcctgggtctcgaggcagcgagtgcaatgcttgatctcaagtcatttgagaaaatcaaactcatcgaacgcaaccgctgggtcatgagccgacaactagactccgaagcagggaatctcgtcgtcgagaaggtcactaaccttggcatcgatgttatgctaactaaaagggtgaaagtgatcaagacggacgagacgaatagtgtatcaggagtcgtattcgaggacggcgaggaaatggaatgctcgactatttgcttcgcgattggggttaagccacgagatgaacttgcaaagggagcaggtatcacttgttcggagcgaagcggcggtattctcgtgaaagacgatctctcaacaaatattacggatatttatgctattggagagtgcgcgagctgggaaaaccacacattcggtctcatcgcgccgggcattgaaatggcagacgtgctctcgtttaacctaacgcaagcaaagttacatcaaccacgagccttcaagcgaccagatttgagcaccaagttaaaactcctcggcgttgatgtagccagctttggagactttttcgcagatagggatgggccaagtttcttaccagcgaaagtggcgcggaaaaagacaacgacggcagaaggcgaaaagccaaagcctcaagttcaagccctcgtctacaaagatccgttcgcccaagtgtataagaaatatctcttcacggccgacggtaagtttctactgggtggcatgatgataggcgatacaagcgactacgtcaagcttgtgccaatggtcaagaatcagaaagaactcgatataccaccttcacagttgatactcggcgcaaagaaagacggtgatgatggctctgatgacctcgacgacgacacgcaaatctgctcgtgccacaacgtgtccaagggtgatgtagtcaagacggctaaagaagggacctgtaagtcggtgggcgaggtcaaagcctgcacgaaagccggcacgggttgtggtggatgcatgccgctcgtgacgagtatatttaacaaggcgatggcggatatgggcacagaagttaagaactacctgtgttctcactttgactactcgcgtgccgatctatacaacatcgtcatggtgaagcagctcaccaccatagaggaggtgatgagggaagctggaaatgacaagagttccgatgggtgcgaa

SEQ ID NO: 815 - DNA, 3819 bp, Muscodor strobelii
  misc_feature: SGI cDNA ID NO. 559851
  misc_feature: Encodes the peptide sequence at SEQ ID NO 816
atgggcaacaatcagggcaagcccgttgactacaacggcgaggtgaacctaaaccacttccgattattacgagtcgtaggccgaggcgcgtttggcaaagtacggatagtcgagagaaaggatacgggtttatcttttgcgctcaagtacatacgcaaagatgaggttgtacgatcagaaagcgtacgaaatatcattcgagaacgtcgcatgctcgagcaattaaaccacccctttatttgcaatctgcggtacagcttccaagatatcgagtatatgtatctggtcgtggatttgatgagcggaggtgacctacgattccacatatcacgcaaaacatttaccgaggagacggtacggttctggatagccgaactgggttgcgcattaaaatacgtacacgaacaacgcatcgtacatcgagatatcaagcccgacaatgttctactagacgccggaggccacgtccatttgacagattttaatgtcgcatccgatattccacaaggcaagatgcttaccagcaagtccggcacgctagcttatcttgcgccggaagtctacgccggcaaaggctacgatacgagagcagactggtggtccttgggcgtactcttctttgagtgcatatacaacaagcgaccgtttgagggcaattctgaaacctccttgaccaacgtcattctacatgcgaacgccaaattccccgtaactcagccacccgtgtcctcgagttgcttgcaggccatggcggcagctctcgaaccgaatcccgacaggagaatgggacgaacgtgggagagctttactcagcatcctttctttcagccaatcgattttgcgaaactcatagcgaagcaaattgagcctgagttcatcccatcagcagagaaaaccaacttcgatgcgacatacgatctcgaagaactattgttagaagaggctccactcgaagcccgggcgcggaggcagaagccgagagaaagattaaagaacgacgccagcgagaaggaggtccgagaggaaaatctctatcaatcgattgagaaggagtttcttatgtttgactacacgaccgtcgccctggagagactgaagagtggaagtttgcaattccaaggtaatgcggcgactggtgagcctcaagctctgacaacgaacgaagcgacaatggcaccaccgcctgtcaatggtcaccaacagaactataacaacgcacagaggagtggggctcaaccgcaggcaactcaacacttctctaacaaacacgctcctcagcgatccgttggcttggtgaaatcacccactggtggcatgtcgttcaccctcgaagggtggagtcaagcttcttgcgctcctatgaagctctacgagtacgcaccattagtaaaagaagatgatttccgtctggtgacgatattccccggtgaattcaacgacccaattcgtgtcgagattagagttgaaacattcccgatcatctccttggagaccaagacaagtcctttggaggctgctccgctgccaccagagggctactcgacttatgagaccttggagggccatgtactcttttcgaaccgcgtaaagtctcgatggggtacggcaccagatgatttcgaccgtttcgatggcgaacctcttctcgaggaggaggaaccagcgggtgtggaatacgaggccttgtcgtatacgtggggagggtcaggaaaaacgatgtttatcctggtgggagaagatggctcgcaggagttgcccgttttgcccaacctggaaaatgcgatgaggcaccttcgatatgctgatcgaccacgaacgatgtggatagactcgatttgtatcaaccaaagagatatcgaagagcgagcgagagaagtaaaacgaatgggtctcatctactcgaatgcgagcagagtcgtggcgtggctagggccaagctttcctaatagctataaggcgttctatcaactaagccgtatcggacgacagatcgtactcacgaaagactggagcacgttaccggcgcccttcactatggaggattactggaggagggaggcctggatcacgaaagctacggtttccgaatacaatgcgatcgcccgactgtgctcgtcggagtactttcatagactctgggttgtgcaggagatccaacttggaaattcgaagacgatcttgaaatgtgggcgtgatgagatgccgtggtcgcactttcgtcgagccattgtttgtatgggtgataaactgcagggcgtgccgcgcaaggtaagggctgcgattgtttggcccaaggatctgtgtacgtctcagcagggccgcacgttgcatgagacgctatatgactttcgcggacggaaatgtgcggactatagggataaagtttatggtcttatgaatttatttgacaccgatgcagcgacagatgttgtggtggattactcggcaaggagatccgctgaggataccttcaagcaggtgttttggaaattcgttgagaaggaagataggttgtcacagttacgcttcgctggactccgccatcgattgggcactgcgagatcaacctcgatagccgggtccctcgagcgagaccctgcctcaactcaaacatggccgacatggctgcctcaatggtcacaaaacatcaggacgaccatatctccagctgttgggttctgcgctagtggtgtctcggcctcccaggccaaaagcgtatctttcaacgaagccgagatctcaggagttcccttctcaacagtctcgacagtaagtgagcctctcagttccgatcccgggatcttagatattgtcgagtttctcagaagccttgggcttaagaagttgcaaacgtctagatacaagactggtgagacgtgtctggacgcctacctccagactttcagtctggggcaattggaagacagggtgccatatcgtcatttgaaatatcctagcctgagcgcaattagagaggaagtcttgagactggcgggtcttcctaggaggacagaacgggcgcttgcgaagctgtatcaagacacattcacagattggtggtcaaagcggaacacagatatttacactaaatctgaagattcatttcgaagcgacgagagcgaagaagacacgaaccagtttttatcttcggtagcctatcgaaggccaataactttgtcgtccttgtgggagtcactcgatgtcacatatcttttcaatccagctgtcaggcaaataagaagagcccgtcgaagattatgggcaagcctgagcgagccctgtacacctccggcgtatttccacaatatcgctgcgcgctggcttcacggatgttgtgtgtttaccttgtctaatgggtacataggcataatctatggacgacccaaaatcggtgaccaggtcttcgttattccaggctgtgatgttccattactcctcagaccaacctcgagcgggaaatacgagatagtcggcgactgctacgtgcacggcatcatggatggcgaggtactcctgggacctttgccaccgtcttggcacgttgaggtatgggttcataaaacgaatggaaggcgggatgatatcttttttcggaaccgagatcaggaatgtgatgtacagcaagacccaaggatggatgccataccattgcctgttgaatgggagagcgtagactttgagtggtctcgctcggacccagtacattgcaagaaatttaggaataaagagacgggcaaggttattaattcggatccgagactgtctcccgaggcgctgaaagctaggggagttttactcgagacgattactcttgtataa

SEQ ID NO: 816 - protein, 1272 aa, Muscodor strobelii
  misc_feature: SGI Peptide ID NO. 559851
  misc_feature (559)..(717): Pfam Id: PF06985 Pfam Desc: Heterokaryon incompatibility protein (HET)
  misc_feature (20)..(275): Pfam Id: PF00069 Pfam Desc: Protein kinase domain
  misc_feature (559)..(661): Pfam Id: PF06985 Pfam Desc: Heterokaryon incompatibility protein (HET)
  misc_feature (20)..(208): Pfam Id: PF07714 Pfam Desc: Protein tyrosine kinase
  misc_feature (1)..(448): NCBI GI: 46128507 Blast Desc: FG08631.1 [Gibberella zeae PH-1]
  misc_feature (1)..(448): NCBI GI: 256734036 Blast Desc: [Nectria haematococca mpVI 77-13-4]
  misc_feature (1)..(364): NCBI GI: 14582566 Blast Desc: AF283107_1 protein kinase C-like protein [Blumeria graminis]
  misc_feature (1)..(388): NCBI GI: 154301355 Blast Desc: BC1G_10347 [Botryotinia fuckeliana B05.10] gi|150856087|gb|EDN31279.1| BC1G_10347 [Botryotinia fuckeliana B05.10]
  misc_feature (1)..(364): NCBI GI: 169606762 Blast Desc: SNOG_06430 [Phaeosphaeria nodorum SN15] gi|160707073|gb|EAT86261.2| SNOG_06430 [Phaeosphaeria nodorum SN15]
  misc_feature (1)..(360): NCBI GI: 242764383 Blast Desc: protein kinase, [Talaromyces stipitatus ATCC 10500] gi|218723956|gb|EED23373.1| protein kinase, [Talaromyces stipitatus ATCC 10500]
  misc_feature (1)..(437): NCBI GI: 115400549 Blast Desc: ATEG_06685 [Aspergillus terreus NIH2624] gi|114191529|gb|EAU33229.1| ATEG_06685 [Aspergillus terreus NIH2624]
  misc_feature (1)..(363): NCBI GI: 261205496 Blast Desc: protein kinase [Ajellomyces dermatitidis SLH14081] gi|239592544|gb|EEQ75125.1| protein kinase [Ajellomyces dermatitidis SLH14081] gi|239611304|gb|EEQ88291.1| protein kinase
  misc_feature (1)..(360): NCBI GI: 212529130 Blast Desc: protein kinase, [Penicillium marneffei ATCC 18224] gi|210074120|gb|EEA28207.1| protein kinase, [Penicillium marneffei ATCC 18224]
  misc_feature (1)..(426): NCBI GI: 119470475 Blast Desc: protein kinase, [Neosartorya fischeri NRRL 181] gi|119406193|gb|EAW16144.1| protein kinase, [Neosartorya fischeri NRRL 181]
MGNNQGKPVDYNGEVNLNHFRLLRVVGRGAFGKVRIVERKDTGLSFALKYIRKDEVVRSESVRNIIRERRMLEQLNHPFICNLRYSFQDIEYMYLVVDLMSGGDLRFHISRKTFTEETVRFWIAELGCALKYVHEQRIVHRDIKPDNVLLDAGGHVHLTDFNVASDIPQGKMLTSKSGTLAYLAPEVYAGKGYDTRADWWSLGVLFFECIYNKRPFEGNSETSLTNVILHANAKFPVTQPPVSSSCLQAMAAALEPNPDRRMGRTWESFTQHPFFQPIDFAKLIAKQIEPEFIPSAEKTNFDATYDLEELLLEEAPLEARARRQKPRERLKNDASEKEVREENLYQSIEKEFLMFDYTTVALERLKSGSLQFQGNAATGEPQALTTNEATMAPPPVNGHQQNYNNAQRSGAQPQATQHFSNKHAPQRSVGLVKSPTGGMSFTLEGWSQASCAPMKLYEYAPLVKEDDFRLVTIFPGEFNDPIRVEIRVETFPIISLETKTSPLEAAPLPPEGYSTYETLEGHVLFSNRVKSRWGTAPDDFDRFDGEPLLEEEEPAGVEYEALSYTWGGSGKTMFILVGEDGSQELPVLPNLENAMRHLRYADRPRTMWIDSICINQRDIEERAREVKRMGLIYSNASRVVAWLGPSFPNSYKAFYQLSRIGRQIVLTKDWSTLPAPFTMEDYWRREAWITKATVSEYNAIARLCSSEYFHRLWVVQEIQLGNSKTILKCGRDEMPWSHFRRAIVCMGDKLQGVPRKVRAAIVWPKDLCTSQQGRTLHETLYDFRGRKCADYRDKVYGLMNLFDTDAATDVVVDYSARRSAEDTFKQVFWKFVEKEDRLSQLRFAGLRHRLGTARSTSIAGSLERDPASTQTWPTWLPQWSQNIRTTISPAVGFCASGVSASQAKSVSFNEAEISGVPFSTVSTVSEPLSSDPGILDIVEFLRSLGLKKLQTSRYKTGETCLDAYLQTFSLGQLEDRVPYRHLKYPSLSAIREEVLRLAGLPRRTERALAKLYQDTFTDWWSKRNTDIYTKSEDSFRSDESEEDTNQFLSSVAYRRPITLSSLWESLDVTYLFNPAVRQIRRARRRLWASLSEPCTPPAYFHNIAARWLHGCCVFTLSNGYIGIIYGRPKIGDQVFVIPGCDVPLLLRPTSSGKYEIVGDCYVHGIMDGEVLLGPLPPSWHVEVWVHKTNGRRDDIFFRNRDQECDVQQDPRMDAIPLPVEWESVDFEWSRSDPVHCKKFRNKETGKVINSDPRLSPEALKARGVLLETITLV

SEQ ID NO: 817 - DNA, 2939 bp, Muscodor strobelii
  misc_feature: SGI EST ID NO. CUFF.2276.0
  misc_feature: Variant of the nucleotide sequence at SEQ ID NO 815
cagatgcggccctcaaaccccctcccttgcaccgtcgcatacacagtgtgtaatttctccttggcacggaatatcagtgggattgtctcctcttgtttcctgcttcccccttctaagacgccgagtgcatgattgtatcagtctgcagaacagacactggacaggctcatcagacaacgcaacttcccctccagccctacggtcttgttaccagcactgtccagggcctatccgccaccacacgccgctgcacctccggacctttcacagcgacgacagtcttttgttcgtgtcgtccaggccaccccgtctcgccgtcccgcacactcttcaacgggcctcgacgagactacggcgttcgctgtctccaccgctggggaaatgggtagcgagggtagcccgaccacgagttccaccacgcattgcaccaccgaacccagacaggctggcctgcctggctgctgcccttgtcccatcgtgaactcctccctctctcttcttgatccttaatccatagtcatcccatcccgtcatcgtcagctcttttttcgacctgtcgcctgcctggcgcaacaaccccttcccaccgccaaaagtgctggtcgtacccgagcggccgagcccgattctctggtgcccccttccgctgacatcgtcaccatattctcataactacttactgctcactgtagtctccgctcttgtcgccaggtcccctacgccgcttgatacacatccatgctgacttatctcgcccgtttcacgtgcactgaaacctgcctcttcctctcattacctcacaggcccccctgccctgcctgttaccggcttggatcagctgccaaggtggatagcgagccttgacagggcctgtctcctctcactcctctgcaactttgcgacttgtgctgccatttgaatttcgacctgttgccaattaataccgccgaccttgctgtcgcccaccattccgtctcccaggccatcgccggcctgaactctccttcctaccaaccgaggcgacggacctccccccgactcgtgcagatgggcaacaatcagggcaagcccgttgactacaacggcgaggtgaacctaaaccacttccgattattacgagtcgtaggccgaggcgcgtttggcaaagtacggatagtcgagagaaaggatacgggtttatcttttgcgctcaagtacatacgcaaagatgaggttgtacgatcagaaagcgtacgaaatatcattcgagaacgtcgcatgctcgagcaattaaaccacccctttatttgcaatctgcggtacagcttccaagatatcgagtatatgtatctggtcgtggatttgatgagcggaggtgacctacgattccacatatcacgcaaaacatttaccgaggagacggtacggttctggatagccgaactgggttgcgcattaaaatacgtacacgaacaacgcatcgtacatcgagatatcaagcccgacaatgttctactagacgccggaggccacgtccatttgacagattttaatgtcgcatccgatattccacaaggcaagatgcttaccagcaagtccggcacgctagcttatcttgcgccggaagtctacgccggcaaaggctacgatacgagagcagactggtggtccttgggcgtactcttctttgagtgcatatacaacaagcgaccgtttgagggcaattctgaaacctccttgaccaacgtcattctacatgcgaacgccaaattccccgtaactcagccacccgtgtcctcgagttgcttgcaggccatggcggcagctctcgaaccgaatcccgacaggagaatgggacgaacgtgggagagctttactcagcatcctttctttcagccaatcgattttgcgaaactcatagcgaagcaaattgagcctgagttcatcccatcagcagagaaaaccaacttcgatgcgacatacgatctcgaagaactattgttagaagaggctccactcgaagcccgggcgcggaggcagaagccgagagaaagattaaagaacgacgccagcgagaaggaggtccgagaggaaaatctctatcaatcgattgagaaggagtttcttatgtttgactacacgaccgtcgccctggagagactgaagagtggaagtttgcaattccaaggtaatgcggcgactggtgagcctcaagctctgacaacgaacgaagcgacaatggcaccaccgcctgtcaatggtcaccaacagaactataacaacgcacagaggagtggggctcaaccgcaggcaactcaacacttctctaacaaacacgctcctcagcgatccgttggcttggtgaaatcacccactggtggcatgtcgttcaccctcgaaggtacgggaagttggagcgatttggcccgtcaagacgccacattacctccagatgcaaacgtacttggcgacgacaaatctggtggctctggggggtgtctttggtttgtttgggcggaaaaagcgaggcttcagcccgaaaccgaaagaaagaggtgttctgggcaaggaaggcgcaagacaaataataggatgattgagatgcatttaagaggtgaccacgggaaggtaggacgcatcatttgcacgcaaccggagtttgggtatacatggcggtgatctgcaggggaacaatcccttttatcgtttggaaggtgctcgtttggtgatatacccgctgcttttgtccgctgctctttgcacgatgaggaaatggacgaatataccaacgccagtcgttacgagaccggacaaatagtagtctggcaattgatacaaaaagactctcatacagttcgcctactgcccgtcatttgatccgaattcgatgaatcagcagccaggaaagacgtattgcttacctaaggtaggctaaatagagataccagtgtaattctaac

SEQ ID NO: 818 - DNA, 1752 bp, Muscodor strobelii
  misc_feature: SGI cDNA ID NO. 559852
  misc_feature: Reduced expression when VOC is produced
  misc_feature: Encodes the peptide sequence at SEQ ID NO 819
atggcctctactcgtcccaacgtcctccccaacttcattcttacccctcagcagcaaaatctgctctttcgggccctgacttccaatcagccagatagcaagaatgctagcgcaaataaaggcgctgccccagccagcgacgctgtcgccacacccccagttcagctccagaagactggcggctttgaccccgcacacctacccgacaatttcctagattacgactttgatcttgccgacagcagcttcgattttgatttcggtgacaacagccagcttgttgaaccaggacagacggatctcaccggtggaagcccggccgagagtgaaaatacaaaggatgggtctaaggccagctccccagagaatgattcaccagataagaggagtctcccagacgacgacgaagatgatgatgttgaggacggaggtggcaagcgtagagaaagtgaagggaaagtacccaagaaacctggccgcaagccgcttacaaatgagcccagctcgaagagaaaggctcaaaaccgtgctgctcagcgagctttccgtgagcgaaaagagaagcacctgaaggacctggaggacaaggtggatgaactcgaaaaagcatcggccgctgccaacaatgagaacagccaactcaagactcaggtcgagaaaatgaccgccgagttggagcagtacaaaaagagactggctctagtatcgagtgcgacgaggtctgcatctggcagctccggtcggggtcgtggatttggcaccgctgcaatccagaacatcaatgatgtcaactttcagttcgaattccccaaatttggtatgttcccaggatcaacacctgtgaacacgaccaagcagacaacgccatactcgccgccatcgctgggcaatagccccaacagtcaggtcagcgccgccgagccggcgaaagacacgacgaagagtcgcgagacttcagagacccagggaatagtgaactttgctagtcttttcaatggttcctctcctttcgatgcgctaaatggcaacaccctttccagaagcagtctggactcggctccattcagcttagctggaaccaacacgggatccccctcatcgtcttccaactccgcaatgggtcctagctcatcatgcggaacatctccagagcctttcacgcagtccccgcttgggttcaagccgctcgaaacattgacaacgattggtgaagagcagccagctactacgagcgatagtaattcagcatttgcaaatctgaacaatctagatttcaccaacttcgactggctttcgcagcaaaatggtggccaattcgacccacaattatttggcgagtatcgcgagcctcaggagaacgtactgggcaacgctggatttgacgacggcttcttcaatgacgcattcgatatcgattttaccgcccctttcaatgcgcctgcgctcaccagccctaagcctgcggcgaagaaagatatctgtgctgaaatcgatgcccgaaaggagaccgaagacacaattgtaccagccgccaatggcaagctcctgacatgtaacaacatatgggaacaactccaaggctgccctcgtgtgcaagccggcgacttggacctcgatggcctgtgctccgaccttcagaagaaggccaagtgtggtggcagcggtgccgtggttgatgagcaagattttaaagctgtcatgaccaaataccttgggaaagactccgaaaactgcaagttctcatcttcgtag

SEQ ID NO: 819 - protein, 583 aa, Muscodor strobelii
  misc_feature: SGI Peptide ID NO. 559852
  misc_feature (160)..(226): Pfam Id: PF00170 Pfam Desc: bZIP transcription factor
  misc_feature (244)..(570): Pfam Id: PF08601 Pfam Desc: Transcription factor PAP1
  misc_feature (170)..(226): Pfam Id: PF00170 Pfam Desc: bZIP transcription factor
  misc_feature (2)..(578): NCBI GI: 256733526 Blast Desc: NECHADRAFT_99622 [Nectria haematococca mpVI 77-13-4]
  misc_feature (10)..(578): NCBI GI: 46129230 Blast Desc: FG08800.1 [Gibberella zeae PH-1]
  misc_feature (1)..(571): NCBI GI: 171682004 Blast Desc: protein product [Podospora anserina] gi|170940961|emb|CAP66611.1| protein product [Podospora anserina]
  misc_feature (1)..(578): NCBI GI: 145608602 Blast Desc: MGG_12814 [Magnaporthe grisea 70-15] gi|145016054|gb|EDK00544.1| MGG_12814 [Magnaporthe grisea 70-15]
  misc_feature (1)..(571): NCBI GI: 164426604 Blast Desc: NCU03905 [Neurospora crassa OR74A] gi|16945426|emb|CAB91681.2| related to AP-1-like transcription factor [Neurospora crassa] gi|157071403|gb|EAA28308.2| NCU03905
  misc_feature (8)..(570): NCBI GI: 283483316 Blast Desc: Ap1-like transcription factor [Botryotinia fuckeliana]
  misc_feature (145)..(575): NCBI GI: 261359552 Blast Desc: Chap1 [Verticillium albo-atrum VaMs.102]
  misc_feature (1)..(573): NCBI GI: 156047743 Blast Desc: SS1G_09561 [Sclerotinia sclerotiorum 1980] gi|154693956|gb|EDN93694.1| SS1G_09561 [Sclerotinia sclerotiorum 1980]
  misc_feature (8)..(570): NCBI GI: 154293693 Blast Desc: BC1G_14094 [Botryotinia fuckeliana B05.10] gi|150845250|gb|EDN20443.1| BC1G_14094 [Botryotinia fuckeliana B05.10]
  misc_feature (7)..(576): NCBI GI: 116202523 Blast Desc: CHGG_09146 [Chaetomium globosum CBS 148.51] gi|88177664|gb|EAQ85132.1| CHGG_09146 [Chaetomium globosum CBS 148.51]
  misc_feature: Useful for introducing or modulating the production of volatile compounds
MASTRPNVLPNFILTPQQQNLLFRALTSNQPDSKNASANKGAAPASDAVATPPVQLQKTGGFDPAHLPDNFLDYDFDLADSSFDFDFGDNSQLVEPGQTDLTGGSPAESENTKDGSKASSPENDSPDKRSLPDDDEDDDVEDGGGKRRESEGKVPKKPGRKPLTNEPSSKRKAQNRAAQRAFRERKEKHLKDLEDKVDELEKASAAANNENSQLKTQVEKMTAELEQYKKRLALVSSATRSASGSSGRGRGFGTAAIQNINDVNFQFEFPKFGMFPGSTPVNTTKQTTPYSPPSLGNSPNSQVSAAEPAKDTTKSRETSETQGIVNFASLFNGSSPFDALNGNTLSRSSLDSAPFSLAGTNTGSPSSSSNSAMGPSSSCGTSPEPFTQSPLGFKPLETLTTIGEEQPATTSDSNSAFANLNNLDFTNFDWLSQQNGGQFDPQLFGEYREPQENVLGNAGFDDGFFNDAFDIDFTAPFNAPALTSPKPAAKKDICAEIDARKETEDTIVPAANGKLLTCNNIWEQLQGCPRVQAGDLDLDGLCSDLQKKAKCGGSGAVVDEQDFKAVMTKYLGKDSENCKFSSS

SEQ ID NO: 820 - DNA, 3183 bp, Muscodor strobelii
  misc_feature: SGI EST ID NO. CUFF.2552.0
  misc_feature: Variant of the nucleotide sequence at SEQ ID NO 818
ctcggggtcaactctaatcgtagccactgggatctgactagggtaggtagaagacgctcttcttggctggagatgaagccaaagcggagcttacaaatcggatttcttcatcgtcttctgcccccctctctccatttccttccctatcgatgctgaaaacactacgtagcctcttcacatcgtacacccaatcagtctatgtgaggacagcgtagattccattccacccagcttgcccagccctcagcgagaatccccccatctgaagacggggttcatctgccaggaaccagcaagtctgcgcgtccaccagtgagacaagggtttttctcctctatcagaatcaggcagaaaggctgctattctcaactctttcactccctccatacccaccatcgccacctattcagcctttccaattcttagagacaaaccctttttgacctagttcactccgcgctctctttatcgtctcataataatcccttgttgtcgctcagtggattcacggatttctggtatctgattgtcgtcagtactcattgcccgcccgtgcccgttttctgggtcaataggagcatagtccacgagttgctgttggtaaagatcttacagtctcgttgcgagtggcgactctctcttaagggtcgccagcttacactgattgagcgtcgttgcgaacgcttgctattacgacatctgatacgaaatcttgcattcctctgcactaccgtttcccgataatcacaatggcctctactcgtcccaacgtcctccccaacttcattcttacccctcagcagcaaaatctgctctttcgggccctgacttccaatcagccagatagcaagaatgctagcgcaaataaaggcgctgccccagccagcgacgctgtcgccacacccccagttcagctccagaagactggcggctttgaccccgcacacctacccgacaatttcctagattacgactttgatcttgccgacagcagcttcgattttgatttcggtgacaacagccagcttgttgaaccaggacagacggatctcaccggtggaagcccggccgagagtgaaaatacaaaggatgggtctaaggccagctccccagagaatgattcaccagataagaggagtctcccagacgacgacgaagatgatgatgttgaggacggaggtggcaagcgtagagaaagtgaagggaaagtacccaagaaacctggccgcaagccgcttacaaatgagcccagctcgaagagaaaggctcaaaaccgtgctgctcagcgagctttccgtgagcgaaaagagaagcacctgaaggacctggaggacaaggtggatgaactcgaaaaagcatcggccgctgccaacaatgagaacagccaactcaagactcaggtcgagaaaatgaccgccgagttggagcagtacaaaaagagactggctctagtatcgagtgcgacgaggtctgcatctggcagctccggtcggggtcgtggatttggcaccgctgcaatccagaacatcaatgatgtcaactttcagttcgaattccccaaatttggtatgttcccaggatcaacacctgtgaacacgaccaagcagacaacgccatactcgccgccatcgctgggcaatagccccaacagtcaggtcagcgccgccgagccggcgaaagacacgacgaagagtcgcgagacttcagagacccagggaatagtgaactttgctagtcttttcaatggttcctctcctttcgatgcgctaaatggcaacaccctttccagaagcagtctggactcggctccattcagcttagctggaaccaacacgggatccccctcatcgtcttccaactccgcaatgggtcctagctcatcatgcggaacatctccagagcctttcacgcagtccccgcttgggttcaagccgctcgaaacattgacaacgattggtgaagagcagccagctactacgagcgatagtaattcagcatttgcaaatctgaacaatctagatttcaccaacttcgactggctttcgcagcaaaatggtggccaattcgacccacaattatttggcgagtatcgcgagcctcaggagaacgtactgggcaacgctggatttgacgacggcttcttcaatgacgcattcgatatcgattttaccgcccctttcaatgcgcctgcgctcaccagccctaagcctgcggcgaagaaagatatctgtgctgaaatcgatgcccgaaaggagaccgaagacacaattgtaccagccgccaatggcaagctcctgacatgtaacaacatatgggaacaactccaaggctgccctcgtgtgcaagccggcgacttggacctcgatggcctgtgctccgaccttcagaagaaggccaagtgtggtggcagcggtgccgtggttgatgagcaagattttaaagctgtcatgaccaaataccttgggaaagactccgaaaactgcaagttctcatcttcgtagtactctggttgatgtctttgtctttcgcccggggttactgttggccacgggcttgtgccataaaacaacaccacattgggatcggggcttttgttcaatattggcgggggttacgggattacggtttataccacgtccacactgctatgacttcatgaataccatgtcaccagactgaagtactcgtgactgtctgcgttgagacatttgcggggaatctggagtttttatcagacaggcactggcacaaaagttcggcttttctcacgaactggtcgcacgtatgatcggcggacggaaacatgcattgctggatggtgcaccacacacggagtcaatcaaataaatttacatgcgacggagtcagtagctattttcttggagacaaacttggaggataggtgtcgtgacagacattggacgaaatctatgccttcggaatttccgtcaatcttcatttaccttctttaactaactccattctttggtctgtgagtcgcttaccgggtcgagggatggaaggattttctgtcttgatatttgtgttgagaggagatggggatgaaaactaaattacgtgccatgaggtgaaaaggacaagacatttcacgagtaggggttatgctatgataggtatctatctgggaactatagtttctttaacatgatattgatatcacct

SEQ ID NO: 821 - DNA, 1257 bp, Muscodor strobelii
  misc_feature: SGI cDNA ID NO. 559853
  misc_feature: Encodes the peptide sequence at SEQ ID NO 822
atggacttcgcttttgatcgcattgtcgaagagtcgctgcccaaagacaacagctccagtagaggggagggcacatctgctggccagaagcccgagcaacaagcgacgctgaacgaggaggttcaggtagcactgcgcgcctctcagcaggcactacagaacctgtccaacagcagctggggaagctggtttcagaagtctgcccagaaccttcgtgagcaaactgagtccgtagtccaccaagcgagccaggaggtcacttcgctcggtctcgatagaggcatcgccaatctacgagcgcgtgccatatccctcacgaccggcccgtcgcaggacacaactgtcagtcagccgagcagtgaacagtctgtagacaaagacaccgactcggctacgacgccaactacttcccaagcacctcgatcctcatctgatgagacgtactactcgcgactacggaccgaggctgccaagaggttaaaagacattcagcgagctgaagatgctgccgacgaagctcttttgaagttcggcaccaacgtccgggacttcttccgcgacgcaattatcgtgaatcccgcagctacggactctgagggcaacggccggttcgagagtaaggatgactcgggcaagcgcgtgatccacagctcaaggtacgatgcgcagctgcacgttttgcacacggcggagaagagcttcaccgaggatcccgcgacggccgagtttgaggcatgggctaaagactttgatgccgaggccaagacagagagcatcagtgccgatctggccaaataccccgagctgaggaccaatatggagaaactcgtacccggcagggtaccctataccgatttctggaagcgttactacttccttagacatagtgtagacacagcagaggctcgccgtcgggatctgcttaaagctgcgtctgctgaagaagaggttggctggggcgacgaggactcggacgacgaaacggccgccgacaataaaccaaccgagaagcgacccggctcgaccgagtcatccaccactatccatccacctaccgccgctgcagctaccacagtcgacaagtcagcctacttgaagccatcggagccccggaaatcaaacgatgagaagtcgcaggcagatagcgacaccagctatgatgtggtaggagccgcctcgggcaaccccagccaagcgcctagcagccctaaggagtcccggaaggcggaggatagcgatgatgaggaatgggagtag

SEQ ID NO: 822 - protein, 418 aa, Muscodor strobelii
  misc_feature: SGI Peptide ID NO. 559853
  misc_feature (239)..(304): Pfam Id: PF03909 Pfam Desc: BSD domain
  misc_feature (1)..(418): NCBI GI: 39977227 Blast Desc: MGG_06516 [Magnaporthe grisea 70-15] gi|145016052|gb|EDK00542.1| MGG_06516 [Magnaporthe grisea 70-15]
  misc_feature (1)..(408): NCBI GI: 171682006 Blast Desc: protein product [Podospora anserina] gi|170940962|emb|CAP66612.1| protein product [Podospora anserina]
  misc_feature (1)..(418): NCBI GI: 164426606 Blast Desc: NCU03906 [Neurospora crassa OR74A] gi|16945427|emb|CAB91683.2| related to DOS1 protein [Neurospora crassa] gi|157071404|gb|EAA28309.2| conserved [Neurospora crassa
  misc_feature (1)..(418): NCBI GI: 261359553 Blast Desc: BSD domain-containing protein [Verticillium albo-atrum VaMs.102]
  misc_feature (1)..(403): NCBI GI: 256734035 Blast Desc: [Nectria haematococca mpVI 77-13-4]
  misc_feature (1)..(405): NCBI GI: 154293719 Blast Desc: BC1G_14096 [Botryotinia fuckeliana B05.10] gi|150845252|gb|EDN20445.1| BC1G_14096 [Botryotinia fuckeliana B05.10]
  misc_feature (1)..(403): NCBI GI: 156047739 Blast Desc: SS1G_09559 [Sclerotinia sclerotiorum 1980] gi|154693954|gb|EDN93692.1| SS1G_09559 [Sclerotinia sclerotiorum 1980]
  misc_feature (1)..(319): NCBI GI: 116202525 Blast Desc: CHGG_09147 [Chaetomium globosum CBS 148.51] gi|88177665|gb|EAQ85133.1| CHGG_09147 [Chaetomium globosum CBS 148.51]
  misc_feature (1)..(418): NCBI GI: 238837989 Blast Desc: BSD domain-containing protein [Microsporum canis CBS 113480]
  misc_feature (1)..(314): NCBI GI: 46128733 Blast Desc: FG08744.1 [Gibberella zeae PH-1]
MDFAFDRIVEESLPKDNSSSRGEGTSAGQKPEQQATLNEEVQVALRASQQALQNLSNSSWGSWFQKSAQNLREQTESVVHQASQEVTSLGLDRGIANLRARAISLTTGPSQDTTVSQPSSEQSVDKDTDSATTPTTSQAPRSSSDETYYSRLRTEAAKRLKDIQRAEDAADEALLKFGTNVRDFFRDAIIVNPAATDSEGNGRFESKDDSGKRVIHSSRYDAQLHVLHTAEKSFTEDPATAEFEAWAKDFDAEAKTESISADLAKYPELRTNMEKLVPGRVPYTDFWKRYYFLRHSVDTAEARRRDLLKAASAEEEVGWGDEDSDDETAADNKPTEKRPGSTESSTTIHPPTAAAATTVDKSAYLKPSEPRKSNDEKSQADSDTSYDVVGAASGNPSQAPSSPKESRKAEDSDDEEWE

SEQ ID NO: 823 - DNA, 2644 bp, Muscodor strobelii
  misc_feature: SGI EST ID NO. CUFF.2980.0
  misc_feature: Variant of the nucleotide sequence at SEQ ID NO 821
ctttccatggcgtcagtgacagagcgtgaaagtgaacaggccacatggtcgcctgtccctacggccgatagccctgtaccacagcggccgagtgccgtagccccctttgtgggcaacagtgggaaccttgtcgggaaaagaggggagcttcgacgtccaagtccgtaaccagtgaccacgccaaccgaccagcctgaatcagatgccgtaaggtggacgtacgtcaacaaatgaatgagcaccgccatcagcctcgtgaccgacatcaacgttgaaaccgtctatcaagacacagtatcatttttatattagagagatacctatacacgattgacgaacgaggacaacgaccatcgcatagggttggtcctttcaaccaactggtgtacacactgtcgtcacagacccgacactcttcgatgaaaccgcgaaccggcgtcgccccattccagccgtagccatggacttcgcttttgatcgcattgtcgaagagtcgctgcccaaagacaacagctccagtagaggggagggcacatctgctggccagaagcccgagcaacaagcgacgctgaacgaggaggttcaggtagcactgcgcgcctctcagcaggcactacagaacctgtccaacagcagctggggaagctggtttcagaagtctgcccagaaccttcgtgagcaaactgagtccgtagtccaccaagcgagccaggaggtcacttcgctcggtctcgatagaggcatcgccaatctacgagcgcgtgccatatccctcacgaccggcccgtcgcaggacacaactgtcagtcagccgagcagtgaacagtctgtagacaaagacaccgactcggctacgacgccaactacttcccaagcacctcgatcctcatctgatgagacgtactactcgcgactacggaccgaggctgccaagaggttaaaagacattcagcgagctgaagatgctgccgacgaagctcttttgaagttcggcaccaacgtccgggacttcttccgcgacgcaattatcgtgaatcccgcagctacggactctgagggcaacggccggttcgagagtaaggatgactcgggcaagcgcgtgatccacagctcaaggtacgatgcgcagctgcacgttttgcacacggcggagaagagcttcaccgaggatcccgcgacggccgagtttgaggcatgggctaaagactttgatgccgaggccaagacagagagcatcagtgccgatctggccaaataccccgagctgaggaccaatatggagaaactcgtacccggcagggtaccctataccgatttctggaagcgttactacttccttagacatagtgtagacacagcagaggctcgccgtcgggatctgcttaaagctgcgtctgctgaagaagaggttggctggggcgacgaggactcggacgacgaaacggccgccgacaataaaccaaccgagaagcgacccggctcgaccgagtcatccaccactatccatccacctaccgccgctgcagctaccacagtcgacaagtcagcctacttgaagccatcggagccccggaaatcaaacgatgagaagtcgcaggcagatagcgacaccagctatgatgtggtaggagccgcctcgggcaaccccagccaagcgcctagcagccctaaggagtcccggaaggcggaggatagcgatgatgaggaatgggagtagacactgcggggtgtgtgagaaacaggaggacaacaaatgatcttggttttgccatgcggaatcgtaagctggcgttctcgggttatgcttgattaactgaatttcgatttagtggggtagtctatagcttcttctcttttgctttccctgggtctcagtggcttttgtacatcaatgcaatatctgaccgttgcaatgcaactcctgagcatcacccaatctataatcttgaagaccagatctgtatgccatgtgcccgctatgcgtgaaccacgcacaacaccaccgtccataactaggtatcctcaccgtttcctcaccacagtctcaaacccatcctcatcaacgatcttctcgggcttcggtcttcggacgcccgtatcaaccaactgcggcgcatcacccatctctacatcgacattttcttccccgtcgttctcgtcatcatcgtcactggcactatcatccgtctcctgatcaggcgcctcagtttctttaaggactactttcttcccccgtgcttcctcccacctcttccgcagatcccggactagtgtgaaattcccctcggcgcattgcgtccgacacttcatgattctgtctgcgacttcttgctcggagccgtcgtcgacgtttgtctcgaattcgtcggataggacttgtaggagggtttcttctatgtcttctggtattggctcttctgattgtttctggaatttcggttttgaggttgaggtggtggtgactgtggtaagggtgtggagagagggaaaggagggaaacatgtcgactattacgcccgctagccagtcgcgtttgtcggaggagtctggtccgccccattggttttgcacggccattgagagagaggtccagaggtggagggacattactatgccttgttcgaattcggattgtttcgtttct

SEQ ID NO: 824 - DNA, 654 bp, Muscodor strobelii
  misc_feature: SGI cDNA ID NO. 559854
  misc_feature: Encodes the peptide sequence at SEQ ID NO 825
atggcatcttcacctactgatgggccatcgcccgaaacgaaacaatccgaattcgaacaaggcatagtaatgtccctccacctctggacctctctctcaatggccgtgcaaaaccaatggggcggaccagactcctccgacaaacgcgactggctagcgggcgtaatagtcgacatgtttccctcctttccctctctccacacccttaccacagtcaccaccacctcaacctcaaaaccgaaattccagaaacaatcagaagagccaataccagaagacatagaagaaaccctcctacaagtcctatccgacgaattcgagacaaacgtcgacgacggctccgagcaagaagtcgcagacagaatcatgaagtgtcggacgcaatgcgccgaggggaatttcacactagtccgggatctgcggaagaggtgggaggaagcacgggggaagaaagtagtccttaaagaaactgaggcgcctgatcaggagacggatgatagtgccagtgacgatgatgacgagaacgacggggaagaaaatgtcgatgtagagatgggtgatgcgccgcagttggttgatacgggcgtccgaagaccgaagcccgagaagatcgttgatgaggatgggtttgagactgtggtgaggaaacggtga

SEQ ID NO: 825 - protein, 217 aa, Muscodor strobelii
  misc_feature: SGI Peptide ID NO. 559854
  misc_feature (1)..(217): NCBI GI: 256733525 Blast Desc: NECHADRAFT_35159 [Nectria haematococca mpVI 77-13-4]
  misc_feature (9)..(217): NCBI GI: 85085682 Blast Desc: NCU03907 [Neurospora crassa OR74A] gi|7899394|emb|CAB91684.1| conserved [Neurospora crassa] gi|28918639|gb|EAA28310.1| conserved [Neurospora crassa OR74A]
  misc_feature (1)..(217): NCBI GI: 116202527 Blast Desc: CHGG_09148 [Chaetomium globosum CBS 148.51] gi|88177666|gb|EAQ85134.1| CHGG_09148 [Chaetomium globosum CBS 148.51]
  misc_feature (15)..(217): NCBI GI: 261359554 Blast Desc: pre-rRNA-processing protein TSR2 [Verticillium albo-atrum VaMs.102]
  misc_feature (1)..(217): NCBI GI: 46128735 Blast Desc: FG08745.1 [Gibberella zeae PH-1]
  misc_feature (1)..(217): NCBI GI: 171682008 Blast Desc: protein product [Podospora anserina] gi|170940963|emb|CAP66613.1| protein product [Podospora anserina]
  misc_feature (8)..(217): NCBI GI: 189201609 Blast Desc: pre-rRNA-processing protein TSR2 [Pyrenophora tritici-repentis Pt-1C-BFP] gi|187984240|gb|EDU49728.1| pre-rRNA-processing protein TSR2 [Pyrenophora tritici-repentis
  misc_feature (1)..(217): NCBI GI: 39977229 Blast Desc: MGG_06517 [Magnaporthe grisea 70-15] gi|145016051|gb|EDK00541.1| MGG_06517 [Magnaporthe grisea 70-15]
  misc_feature (3)..(217): NCBI GI: 169619702 Blast Desc: SNOG_13049 [Phaeosphaeria nodorum SN15] gi|111058256|gb|EAT79376.1| SNOG_13049 [Phaeosphaeria nodorum SN15]
  misc_feature (16)..(217): NCBI GI: 255932569 Blast Desc: Pc12g10170 [Penicillium chrysogenum Wisconsin 54-1255] gi|211582460|emb|CAP80644.1| Pc12g10170 [Penicillium chrysogenum Wisconsin 54-1255]
MASSPTDGPSPETKQSEFEQGIVMSLHLWTSLSMAVQNQWGGPDSSDKRDWLAGVIVDMFPSFPSLHTLTTVTTTSTSKPKFQKQSEEPIPEDIEETLLQVLSDEFETNVDDGSEQEVADRIMKCRTQCAEGNFTLVRDLRKRWEEARGKKVVLKETEAPDQETDDSASDDDDENDGEENVDVEMGDAPQLVDTGVRRPKPEKIVDEDGFETVVRKR

SEQ ID NO: 826 - DNA, 2944 bp, Muscodor strobelii
  misc_feature: SGI EST ID NO. CUFF.2981.1
  misc_feature: Variant of the nucleotide sequence at SEQ ID NO 824
atgcgacaccaatgcgcccgcgcctgaatactgagaagagaaacctaaatttccacatcaactcgcgatacatcgcgctcgattccaacaatcacattgcaagatggcatcttcacctactgatgggccatcgcccgaaacgaaacaatccgaattcgaacaaggcatagtaatgtccctccacctctggacctctctctcaatggccgtgcaaaaccaatggggcggaccagactcctccgacaaacgcgactggctagcgggcgtaatagtcgacatgtttccctcctttccctctctccacacccttaccacagtcaccaccacctcaacctcaaaaccgaaattccagaaacaatcagaagagccaataccagaagacatagaagaaaccctcctacaagtcctatccgacgaattcgagacaaacgtcgacgacggctccgagcaagaagtcgcagacagaatcatgaagtgtcggacgcaatgcgccgaggggaatttcacactagtccgggatctgcggaagaggtgggaggaagcacgggggaagaaagtagtccttaaagaaactgaggcgcctgatcaggagacggatgatagtgccagtgacgatgatgacgagaacgacggggaagaaaatgtcgatgtagagatgggtgatgcgccgcagttggttgatacgggcgtccgaagaccgaagcccgagaagatcgttgatgaggatgggtttgagactgtggtgaggaaacggtgaggatacctagttatggacggtggtgttgtgcgtggttcacgcatagcgggcacatggcatacagatctggtcttcaagattatagattgggtgatgctcaggagttgcattgcaacggtcagatattgcattgatgtacaaaagccactgagacccagggaaagcaaaagagaagaagctatagactaccccactaaatcgaaattcagttaatcaagcataacccgagaacgccagcttacgattccgcatggcaaaaccaagatcatttgttgtcctcctgtttctcacacaccccgcagtgtctactcccattcctcatcatcgctatcctccgccttccgggactccttagggctgctaggcgcttggctggggttgcccgaggcggctcctaccacatcatagctggtgtcgctatctgcctgcgacttctcatcgtttgatttccggggctccgatggcttcaagtaggctgacttgtcgactgtggtagctgcagcggcggtaggtggatggatagtggtggatgactcggtcgagccgggtcgcttctcggttggtttattgtcggcggccgtttcgtcgtccgagtcctcgtcgccccagccaacctcttcttcagcagacgcagctagcttagttattagcatgactggggcaaaaatgtctttgtagtaaatattatttgaaaacaaacctttaagcagatcccgacggcgagcctctgctgtgtctacactatgtctaaggaagtagtaacgcttccagaaatcggtatagggtaccctgccgggtacgagtttctccatattggtcctcagctcggggtatttggccagatcggcactgatgctctctgtcttggcctcggcatcaaagtctttagcccatgcctcaaactcggccgtcgcgggatcctcggtgaagctcttctccgccgtgtgcaaaacgtgcagctgcgcatcgtaccttgagctgtggatcacgcgcttgcccgagtcatccttactctcgaaccggccgttgccctcagagtccgtagctgcgggattcacgataattgcgtcgcggaagaagtcccggacgttggtgccgaacttcaaaagagcttcgtcggcagcatcttcagctcgctgaatgtcttttaacctcttggcagcctcggtccgtagtcgcgagtagtacgtctcatcagatgaggatcgaggtgcttgggaagtagttggcgtcgtagccgagtcggtgtctttgtctacagactgttcactgctcggctgactgacagttgtgtcctgcgacgggccggtcgtgagggatatggcacgcgctcgtagattggcgatgcctctatcgagaccgagcgaagtgacctcctggctcgcttggtggactacggactcagtctggaaacatacaatgtcagatttcagttctcaggatagccagacagatcgtcaagcatgtcatgtgacctatatcatgagcacggggcttcgacatacttgctcacgaaggttctgggcagacttctgaaaccagcttccccagctgctgttggacaggttctgtagtgcctgctgagaggcgcgcagtgctacctgaacctcctcgttcagcgtcgcttgttgctcgggcttctggccagcagatgtgccctcccctctactggagctgttgtctttgggcagcgactcttcgacaatgcgatcaaaagcgaagtccatggctacggctggaatggggcgacgccggttcgcggtttcatcgaagagtgtcgggtctgtgacgacagtgtgtacaccagttggttgaaaggaccaaccctatgcgatggtcgttgtcctcgttcgtcaatcgtgtataggtatctctctaatataaaaatgatactgtgtcttgatagacggtttcaacgttgatgtcggtcacgaggctgatggcggtgctcattcatttgttgacgtacgtccaccttacggcatctgattcaggctggtcggttggcgtggtcactggttacggacttggacgtcgaagctcccctcttttcccgacaaggttcccactgttgcccacaaagggggctacggcactcggccgctgtggtacagggctatcggccgtagggacaggcgaccatgtggcctgttcactttcacgctctgtcactgacgccatggaaag

SEQ ID NO: 827 - DNA, 855 bp, Muscodor strobelii
  misc_feature: SGI cDNA ID NO. 559855
  misc_feature: Encodes the peptide sequence at SEQ ID NO 828
atgacgccagcaccgggaggagctccggtatcagtccaagagcaacattacaaatcatcttcagtgttaacgattaatgcgggctccctggtggaattactcaatatacgaggtctggacacaacggacactgcggacatcttgggccctgaggactccatcccactcagttcccgtagccaaatagagagtattgtcggcactaatgaattccgcgcctggttaacctctcctacgtcttgcgagttactcattgagggccataccagaaggaatatatcacaggccaaatcgcctcagtctctcgtagtggctaccatggcgcgcggcttccccatccataatcagtttcccccgatcgtcttcttctgtggactgcatgacgatctgagtgagtggtccagtggaccgcaggctttagtcagtagcctctgcacgcaacttcttgagcagcgctttatagatttcacctacttcccctcgcatgagcctcacctagagagagagaggctgcatgctcgagatattggcgccctttgccggctgtttgagggtctcgtcagacggctcccgtgggggacaacattactgtgcgcaatagacgcggttgagacgtatgaaacacctgagtccgaagcaaatctgcggacggtgatgaggttcttgttaagcctcgctagagacgcattcttggcgaccaaattcaagctcttggtgacgagccaccaaggaacagtgagcctggctgaagagttcaacagaaacgacttgagcattctacagatggagggactggagtcgaacggcgatgacacggatctgtcagagttacaggatgaattggaatcagcttga

SEQ ID NO: 828 - protein, 284 aa, Muscodor strobelii
  misc_feature: SGI Peptide ID NO. 559855
  misc_feature (3)..(279): NCBI GI: 169620734 Blast Desc: SNOG_13571 [Phaeosphaeria nodorum SN15] gi|111057898|gb|EAT79018.1| SNOG_13571 [Phaeosphaeria nodorum SN15]
  misc_feature (34)..(246): NCBI GI: 256721944 Blast Desc: NECHADRAFT_78308 [Nectria haematococca mpVI 77-13-4]
  misc_feature (43)..(245): NCBI GI: 154302113 Blast Desc: [Botryotinia fuckeliana B05.10] gi|150855511|gb|EDN30703.1| [Botryotinia fuckeliana B05.10]
  misc_feature (59)..(252): NCBI GI: 212544005 Blast Desc: conserved [Penicillium marneffei ATCC 18224] gi|210067064|gb|EEA21157.1| conserved [Penicillium marneffei ATCC 18224]
  misc_feature (31)..(208): NCBI GI: 145237768 Blast Desc: An07g04490 [Aspergillus niger] gi|134076005|emb|CAK48199.1| protein product [Aspergillus niger]
  misc_feature (60)..(208): NCBI GI: 256725449 Blast Desc: NECHADRAFT_83084 [Nectria haematococca mpVI 77-13-4]
  misc_feature (13)..(241): NCBI GI: 119467009 Blast Desc: NFIA_047490 [Neosartorya fischeri NRRL 181] gi|119405463|gb|EAW15414.1| NFIA_047490 [Neosartorya fischeri NRRL 181]
  misc_feature (69)..(250): NCBI GI: 116203339 Blast Desc: CHGG_09554 [Chaetomium globosum CBS 148.51] gi|88178072|gb|EAQ85540.1| CHGG_09554 [Chaetomium globosum CBS 148.51]
  misc_feature (54)..(240): NCBI GI: 189206646 Blast Desc: conserved [Pyrenophora tritici-repentis Pt-1C-BFP] gi|187975750|gb|EDU42376.1| conserved [Pyrenophora tritici-repentis Pt-1C-BFP]
  misc_feature (53)..(214): NCBI GI: 242800171 Blast Desc: TSTA_013960 [Talaromyces stipitatus ATCC 10500] gi|218716877|gb|EED16298.1| TSTA_013960 [Talaromyces stipitatus ATCC 10500]
MTPAPGGAPVSVQEQHYKSSSVLTINAGSLVELLNIRGLDTTDTADILGPEDSIPLSSRSQIESIVGTNEFRAWLTSPTSCELLIEGHTRRNISQAKSPQSLVVATMARGFPIHNQFPPIVFFCGLHDDLSEWSSGPQALVSSLCTQLLEQRFIDFTYFPSHEPHLERERLHARDIGALCRLFEGLVRRLPWGTTLLCAIDAVETYETPESEANLRTVMRFLLSLARDAFLATKFKLLVTSHQGTVSLAEEFNRNDLSILQMEGLESNGDDTDLSELQDELESA

SEQ ID NO: 829 - DNA, 571 bp, Muscodor strobelii
  misc_feature: SGI EST ID NO. CUFF.2297.0
  misc_feature: Variant of the nucleotide sequence at SEQ ID NO 827
ccccgatcgtcttcttctgtggactgcatgacgatctgagtgagtggtccagtggaccgcaggctttagtcagtagcctctgcacgcaacttcttgagcagcgctttatagatttcacctacttcccctcgcatgagcctcacctagagagagagaggctgcatgctcgagatattggcgccctttgccggctgtttgagggtctcgtcagacggctcccgtgggggacaacattactgtgcgcaatagacgcggttgagacgtatgaaacacctgagtccgaagcaaatctgcggacggtgatgaggttcttgttaagcctcgctagagacgcattcttggcgaccaaattcaagctcttggtgacgagccaccaaggaacagtgagcctggctgaagagttcaacagaaacgacttgagcattctacagatggagggactggagtcgaacggcgatgacacggatctgtcagagttacaggatgaattggaatcagcttgagttccataagcaatgacattatcatttctacttattcttctagcttggagaatcgtagagcacttgaa

SEQ ID NO: 830 - DNA, 2688 bp, Muscodor strobelii
  misc_feature: SGI cDNA ID NO. 559856
  misc_feature: Reduced expression when VOC is produced
  misc_feature: Encodes the peptide sequence at SEQ ID NO 831
atgaatacagcaacagtttcgttggcggtgacgccaactgtgctgtccacattcttgtcacattatctcaatcgcaaacccttgcgcgaacgacctacagctcatctctcgtacgacgaaggtttacatcttgtccgctcgttcctagccttcgcctcacatcacaccgtcgaagaccttcaggcatttaccgcgcaatgggtcccccatccacaatgggtcaaggtcgaggaggtcgaaattcctgcggaaaatctgctcgaatctgccactgcgatccaagaacaattgggccccgatggaattcgaaaagtaggaggtaaaaaatggtggcaatggcggaaacccgagtcctctttgaaagcagagtggatcgagatgcggtctgactataatgcgcgtaagaaggcgggagacccagggacgagggttatgctgtacgtccacggcggcgcttatttctttggcagcgtcgatgagcatcggtatcaaatgcaacgtcatgcgcggaaattgaaagccagggtcttggcacccaaataccgtctttcgcctcaatttccattcccctgcggtctacaagactgtctagctgcctacctgtatttgctcaagacacaagacccctcaacaatcatattagctggtgactcggctggaggtggtatggtaatgagcatgctccttaccataagagatcgcggaatccctctgccagcgggagccatcctcatttctccctgggtcgatttgacccattcatttcccagtgtttctggtgaagctccgtttgactacattccgtcgaatggatttcatcacaagccgtcgcccgcctggccacctctgaatgcggatgagtaccttttgctcaagacccagatcgagaagaatacacagcctgggcatacgaaattgatgaagcctgccacagtagcacacaaccatggagcccacgacgcaacgaatggtgcagcaactaccaatggcgtggaagaggtgccgaaaggaaaagctgagacgacatatttgcgttgcaatgttgatgggaaagaagtacttttgaaggatcaaattcagatgtacaccacaaatgagatgctatctcaccctcttgtcagtcccgttatgcaggctacacttggtggactaccacctctactcatcatggtcggtggcggagaattccttcgagacgagcagatctaccttgctcacaagtgtgccgatcccgtcaaatatgcaccagcagatatcaacatgaccgattttggccgagaacaactagcacgattcaaacccaccgatgttcagctccaagtttgggacgatctatgccacgtcgccccgacgttgagcttcactcgcccagccaagtacatgttccggtccatagctcagttcggcgcgtgggctctcgccagagcccagaagactggtattgagatcatggacgatgaccaaatttccattatctccgcttcaggctcggatgacggtagtgagcacacacggtcgatcaaggacgcgggcccaacggaagcaggccagacgcaggttggtaaagctggagatgctctcccgccgttccaaaatcacatgatcaggcaaaaagtaagccgccacggtatcatcacccatcttgccccagcggaggagctggaggcttgtatgatccctgccgcagaaatcggagtcgtgaaagaaggtccagtgagaaaatggttagaagcaaggagccaattcgacacccgcttcgccagcgcacgggctaagatccacaagagacgtcttaaagagatgatggcagggtacgaaggcttcgatggcgaaacaccacccccaagcgccctagcatccagacgcaaggcaggctacgcgaagaaagagaagaagaagagaaagagcatgggtctagcgatgtggtccctctggggttctaaacacgacgaagtcacagttcagaaagaacaacaagccgatcaagcgccggaggtgaaagtcgccgcgccagaagaagggcaaaatgctcgttcaccgtcggatctagagagacaggagagggatgtagcggagagaccgaaaccgtctgctaggaggagtcggtcgagaactaagatcgtgaaggatgagcagcagacggaggacacgcctatcgcaagcttgatggcgatgagagaggggaaacaggccgaggagggtaatggaatgctcaccccggattatgtgcctacgggtgctgcggggaagagaccgattgttgggggcatcgccgtaccgttctctctaggaaaagaagcggacactgctagtatgatcacgttgactagcgccatggatcagaacatgcgagttgcgagcccgacgccgacaaatcgggagttggatggtgcgtgtgctacgagtgcggaggttgttgcagagaagaatccgggagctggggatgagattgctgagccggaggatgtgaagagggagattctgctgactcccgagcccgtcagtcctgtgacggcaagagatgcctctgtgcgtggtgatgagacgccggtggttgtcagtccgctcgctacgccggcgactgaggtgggtgtcaatgggatgcttgttggtggtggtggtgaggccacaagaccaccgatagagactttctggacagcgcaagaggatttgccacaggcgaagtaa

SEQ ID NO: 831 - protein, 895 aa, Muscodor strobelii
  misc_feature: SGI Peptide ID NO. 559856
  misc_feature (145)..(426): Pfam Id: PF07859 Pfam Desc: alpha/beta hydrolase fold
  misc_feature (145)..(264): Pfam Id: PF07859 Pfam Desc: alpha/beta hydrolase fold
  misc_feature (1)..(895): NCBI GI: 46128737 Blast Desc: FG08746.1 [Gibberella zeae PH-1]
  misc_feature (1)..(893): NCBI GI: 145610667 Blast Desc: MGG_00998 [Magnaporthe grisea 70-15] gi|145018047|gb|EDK02326.1| MGG_00998 [Magnaporthe grisea 70-15]
  misc_feature (1)..(782): NCBI GI: 116202517 Blast Desc: CHGG_09143 [Chaetomium globosum CBS 148.51] gi|88177661|gb|EAQ85129.1| CHGG_09143 [Chaetomium globosum CBS 148.51]
  misc_feature (1)..(816): NCBI GI: 85095773 Blast Desc: NCU07059 [Neurospora crassa OR74A] gi|28921624|gb|EAA30912.1| conserved [Neurospora crassa OR74A]
  misc_feature (1)..(894): NCBI GI: 171682418 Blast Desc: protein product [Podospora anserina] gi|170941168|emb|CAP66818.1| protein product [Podospora anserina]
  misc_feature (1)..(571): NCBI GI: 261359555 Blast Desc: acetyl-hydrolase [Verticillium albo-atrum VaMs.102]
  misc_feature (1)..(891): NCBI GI: 169618277 Blast Desc: SNOG_12330 [Phaeosphaeria nodorum SN15] gi|160703586|gb|EAT80143.2| SNOG_12330 [Phaeosphaeria nodorum SN15]
  misc_feature (1)..(891): NCBI GI: 189201595 Blast Desc: acetyl-hydrolase [Pyrenophora tritici-repentis Pt-1C-BFP] gi|187984233|gb|EDU49721.1| acetyl-hydrolase [Pyrenophora tritici-repentis Pt-1C-BFP]
  misc_feature (1)..(684): NCBI GI: 156047735 Blast Desc: SS1G_09557 [Sclerotinia sclerotiorum 1980] gi|154693952|gb|EDN93690.1| SS1G_09557 [Sclerotinia sclerotiorum 1980]
  misc_feature (1)..(706): NCBI GI: 255946455 Blast Desc: Pc20g15210 [Penicillium chrysogenum Wisconsin 54-1255] gi|211588730|emb|CAP86850.1| Pc20g15210 [Penicillium chrysogenum Wisconsin 54-1255]
  misc_feature: Useful for introducing or modulating the production of volatile compounds
MNTATVSLAVTPTVLSTFLSHYLNRKPLRERPTAHLSYDEGLHLVRSFLAFASHHTVEDLQAFTAQWVPHPQWVKVEEVEIPAENLLESATAIQEQLGPDGIRKVGGKKWWQWRKPESSLKAEWIEMRSDYNARKKAGDPGTRVMLYVHGGAYFFGSVDEHRYQMQRHARKLKARVLAPKYRLSPQFPFPCGLQDCLAAYLYLLKTQDPSTIILAGDSAGGGMVMSMLLTIRDRGIPLPAGAILISPWVDLTHSFPSVSGEAPFDYIPSNGFHHKPSPAWPPLNADEYLLLKTQIEKNTQPGHTKLMKPATVAHNHGAHDATNGAATTNGVEEVPKGKAETTYLRCNVDGKEVLLKDQIQMYTTNEMLSHPLVSPVMQATLGGLPPLLIMVGGGEFLRDEQIYLAHKCADPVKYAPADINMTDFGREQLARFKPTDVQLQVWDDLCHVAPTLSFTRPAKYMFRSIAQFGAWALARAQKTGIEIMDDDQISIISASGSDDGSEHTRSIKDAGPTEAGQTQVGKAGDALPPFQNHMIRQKVSRHGIITHLAPAEELEACMIPAAEIGVVKEGPVRKWLEARSQFDTRFASARAKIHKRRLKEMMAGYEGFDGETPPPSALASRRKAGYAKKEKKKRKSMGLAMWSLWGSKHDEVTVQKEQQADQAPEVKVAAPEEGQNARSPSDLERQERDVAERPKPSARRSRSRTKIVKDEQQTEDTPIASLMAMREGKQAEEGNGMLTPDYVPTGAAGKRPIVGGIAVPFSLGKEADTASMITLTSAMDQNMRVASPTPTNRELDGACATSAEVVAEKNPGAGDEIAEPEDVKREILLTPEPVSPVTARDASVRGDETPVVVSPLATPATEVGVNGMLVGGGGEATRPPIETFWTAQEDLPQAK

SEQ ID NO: 832 - DNA, 2963 bp, Muscodor strobelii
  misc_feature: SGI EST ID NO. CUFF.2310.0
  misc_feature: Variant of the nucleotide sequence at SEQ ID NO 830
ctcacatcctcatcacacacctcggctcacctcgatcgattccagtgtcgaggagggccttgctcaatactttgggggctcccaatagtcttttgctttgtcaaatttgctacaatgaatacagcaacagtttcgttggcggtgacgccaactgtgctgtccacattcttgtcacattatctcaatcgcaaacccttgcgcgaacgacctacagctcatctctcgtacgacgaaggtttacatcttgtccgctcgttcctagccttcgcctcacatcacaccgtcgaagaccttcaggcatttaccgcgcaatgggtcccccatccacaatgggtcaaggtcgaggaggtcgaaattcctgcggaaaatctgctcgaatctgccactgcgatccaagaacaattgggccccgatggaattcgaaaagtaggaggtaaaaaatggtggcaatggcggaaacccgagtcctctttgaaagcagagtggatcgagatgcggtctgactataatgcgcgtaagaaggcgggagacccagggacgagggttatgctgtacgtccacggcggcgcttatttctttggcagcgtcgatgagcatcggtatcaaatgcaacgtcatgcgcggaaattgaaagccagggtcttggcacccaaataccgtctttcgcctcaatttccattcccctgcggtctacaagactgtctagctgcctacctgtatttgctcaagacacaagacccctcaacaatcatattagctggtgactcggctggaggtggtatggtaatgagcatgctccttaccataagagatcgcggaatccctctgccagcgggagccatcctcatttctccctgggtcgatttgacccattcatttcccagtgtttctggtgaagctccgtttgactacattccgtcgaatggatttcatcacaagccgtcgcccgcctggccacctctgaatgcggatgagtaccttttgctcaagacccagatcgagaagaatacacagcctgggcatacgaaattgatgaagcctgccacagtagcacacaaccatggagcccacgacgcaacgaatggtgcagcaactaccaatggcgtggaagaggtgccgaaaggaaaagctgagacgacatatttgcgttgcaatgttgatgggaaagaagtacttttgaaggatcaaattcagatgtacaccacaaatgagatgctatctcaccctcttgtcagtcccgttatgcaggctacacttggtggactaccacctctactcatcatggtcggtggcggagaattccttcgagacgagcagatctaccttgctcacaagtgtgccgatcccgtcaaatatgcaccagcagatatcaacatgaccgattttggccgagaacaactagcacgattcaaacccaccgatgttcagctccaagtttgggacgatctatgccacgtcgccccgacgttgagcttcactcgcccagccaagtacatgttccggtccatagctcagttcggcgcgtgggctctcgccagagcccagaagactggtattgagatcatggacgatgaccaaatttccattatctccgcttcaggctcggatgacggtagtgagcacacacggtcgatcaaggacgcgggcccaacggaagcaggccagacgcaggttggtaaagctggagatgctctcccgccgttccaaaatcacatgatcaggcaaaaagtaagccgccacggtatcatcacccatcttgccccagcggaggagctggaggcttgtatgatccctgccgcagaaatcggagtcgtgaaagaaggtccagtgagaaaatggttagaagcaaggagccaattcgacacccgcttcgccagcgcacgggctaagatccacaagagacgtcttaaagagatgatggcagggtacgaaggcttcgatggcgaaacaccacccccaagcgccctagcatccagacgcaaggcaggctacgcgaagaaagagaagaagaagagaaagagcatgggtctagcgatgtggtccctctggggttctaaacacgacgaagtcacagttcagaaagaacaacaagccgatcaagcgccggaggtgaaagtcgccgcgccagaagaagggcaaaatgctcgttcaccgtcggatctagagagacaggagagggatgtagcggagagaccgaaaccgtctgctaggaggagtcggtcgagaactaagatcgtgaaggatgagcagcagacggaggacacgcctatcgcaagcttgatggcgatgagagaggggaaacaggccgaggagggtaatggaatgctcaccccggattatgtgcctacgggtgctgcggggaagagaccgattgttgggggcatcgccgtaccgttctctctaggaaaagaagcggacactgctagtatgatcacgttgactagcgccatggatcagaacatgcgagttgcgagcccgacgccgacaaatcgggagttggatggtgcgtgtgctacgagtgcggaggttgttgcagagaagaatccgggagctggggatgagattgctgagccggaggatgtgaagagggagattctgctgactcccgagcccgtcagtcctgtgacggcaagagatgcctctgtgcgtggtgatgagacgccggtggttgtcagtccgctcgctacgccggcgactgaggtgggtgtcaatgggatgcttgttggtggtggtggtgaggccacaagaccaccgatagagactttctggacagcgcaagaggatttgccacaggcgaagtaagtgggtgaagaagaagcgatttgaaagaggcaaagaggggagggaagaagatcattattatacccacatgtcccgaggtaggaataggtttattttgtatacatatacgataccacagatataggtactgccattaattatctctgaactatgagtacgca

SEQ ID NO: 833 - DNA, 1308 bp, Muscodor strobelii
  misc_feature: SGI cDNA ID NO. 559857
  misc_feature: Reduced expression when VOC is produced
  misc_feature: Encodes the peptide sequence at SEQ ID NO 834
atgttccggtccatagctcagttcggcgcgtgggctctcgccagagcccagaagactggtattgagatcatggacgatgaccaaatttccattatctccgcttcaggctcggatgacggtagtgagcacacacggtcgatcaaggacgcgggcccaacggaagcaggccagacgcaggttggtaaagctggagatgctctcccgccgttccaaaatcacatgatcaggcaaaaagtaagccgccacggtatcatcacccatcttgccccagcggaggagctggaggcttgtatgatccctgccgcagaaatcggagtcgtgaaagaaggtccagtgagaaaatggttagaagcaaggagccaattcgacacccgcttcgccagcgcacgggctaagatccacaagagacgtcttaaagagatgatggcagggtacgaaggcttcgatggcgaaacaccacccccaagcgccctagcatccagacgcaaggcaggctacgcgaagaaagagaagaagaagagaaagagcatgggtctagcgatgtggtccctctggggttctaaacacgacgaagtcacagttcagaaagaacaacaagccgatcaagcgccggaggtgaaagtcgccgcgccagaagaagggcaaaatgctcgttcaccgtcggatctagagagacaggagagggatgtagcggagagaccgaaaccgtctgctaggaggagtcggtcgagaactaagatcgtgaaggatgagcagcagacggaggacacgcctatcgcaagcttgatggcgatgagagaggggaaacaggccgaggagggtaatggaatgctcaccccggattatgtgcctacgggtgctgcggggaagagaccgattgttgggggcatcgccgtaccgttctctctaggaaaagaagcggacactgctagtatgatcacgttgactagcgccatggatcagaacatgcgagttgcgagcccgacgccgacaaatcgggagttggatggtgcgtgtgctacgagtgcggaggttgttgcagagaagaatccgggagctggggatgagattgctgagccggaggatgtgaagagggagattctgctgactcccgagcccgtcagtcctgtgacggcaagagatgcctctgtgcgtggtgatgagacgccggtggttgtcagtccgctcgctacgccggcgactgaggtgggtgtcaatgggatgcttgttggtggtggtggtgaggccacaagaccaccgatagagactttctggacagcgcaagaggatttgccacaggcgaagtaa

SEQ ID NO: 834 - protein, 435 aa, Muscodor strobelii
  misc_feature: SGI Peptide ID NO. 559857
  misc_feature (1)..(435): NCBI GI: 46128737 Blast Desc: FG08746.1 [Gibberella zeae PH-1]
  misc_feature (1)..(433): NCBI GI: 145610667 Blast Desc: MGG_00998 [Magnaporthe grisea 70-15] gi|145018047|gb|EDK02326.1| MGG_00998 [Magnaporthe grisea 70-15]
  misc_feature (1)..(322): NCBI GI: 116202517 Blast Desc: CHGG_09143 [Chaetomium globosum CBS 148.51] gi|88177661|gb|EAQ85129.1| CHGG_09143 [Chaetomium globosum CBS 148.51]
  misc_feature (2)..(356): NCBI GI: 85095773 Blast Desc: NCU07059 [Neurospora crassa OR74A] gi|28921624|gb|EAA30912.1| conserved [Neurospora crassa OR74A]
  misc_feature (1)..(322): NCBI GI: 171682418 Blast Desc: protein product [Podospora anserina] gi|170941168|emb|CAP66818.1| protein product [Podospora anserina]
  misc_feature (1)..(203): NCBI GI: 154293723 Blast Desc: BC1G_14098 [Botryotinia fuckeliana B05.10] gi|150845254|gb|EDN20447.1| BC1G_14098 [Botryotinia fuckeliana B05.10]
  misc_feature (1)..(431): NCBI GI: 169618277 Blast Desc: SNOG_12330 [Phaeosphaeria nodorum SN15] gi|160703586|gb|EAT80143.2| SNOG_12330 [Phaeosphaeria nodorum SN15]
  misc_feature (1)..(224): NCBI GI: 156047735 Blast Desc: SS1G_09557 [Sclerotinia sclerotiorum 1980] gi|154693952|gb|EDN93690.1| SS1G_09557 [Sclerotinia sclerotiorum 1980]
  misc_feature (1)..(431): NCBI GI: 189201595 Blast Desc: acetyl-hydrolase [Pyrenophora tritici-repentis Pt-1C-BFP] gi|187984233|gb|EDU49721.1| acetyl-hydrolase [Pyrenophora tritici-repentis Pt-1C-BFP]
  misc_feature (1)..(222): NCBI GI: 212531141 Blast Desc: lipase/esterase family protein [Penicillium marneffei ATCC 18224] gi|210071091|gb|EEA25180.1| lipase/esterase family protein [Penicillium marneffei ATCC 18224]
  misc_feature: Useful for introducing or modulating the production of volatile compounds
MFRSIAQFGAWALARAQKTGIEIMDDDQISIISASGSDDGSEHTRSIKDAGPTEAGQTQVGKAGDALPPFQNHMIRQKVSRHGIITHLAPAEELEACMIPAAEIGVVKEGPVRKWLEARSQFDTRFASARAKIHKRRLKEMMAGYEGFDGETPPPSALASRRKAGYAKKEKKKRKSMGLAMWSLWGSKHDEVTVQKEQQADQAPEVKVAAPEEGQNARSPSDLERQERDVAERPKPSARRSRSRTKIVKDEQQTEDTPIASLMAMREGKQAEEGNGMLTPDYVPTGAAGKRPIVGGIAVPFSLGKEADTASMITLTSAMDQNMRVASPTPTNRELDGACATSAEVVAEKNPGAGDEIAEPEDVKREILLTPEPVSPVTARDASVRGDETPVVVSPLATPATEVGVNGMLVGGGGEATRPPIETFWTAQEDLPQAK

SEQ ID NO: 835 - DNA, 2963 bp, Muscodor strobelii; identical to SEQ ID NO: 832
  misc_feature: SGI EST ID NO. CUFF.2310.0
  misc_feature: Variant of the nucleotide sequence at SEQ ID NO 833

SEQ ID NO: 836 - DNA, 312 bp, Muscodor strobelii
  misc_feature: SGI cDNA ID NO. 559858
  misc_feature: Encodes the peptide sequence at SEQ ID NO 837
atgcagccgacacctgtgctctcgaaggcgtttcgcaaattccgcctgacgacgaaggatatcaagaagggtttctacaagggaacaggctccggatctatgggtagacacaccaaacacggtcgctatgttatcgagttcgagaaagtccgcacatacgtcgtgcctccaggtctcgattccttcaagttaacgcccttcgtcacgaaatccgtcgagaaagtaaaaggtcgatatgaaggaaatcccaagggtcctgatgatccagagctctatctcagacactggaaggatgtaaacgggctcgactaa

SEQ ID NO: 837 - protein, 103 aa, Muscodor strobelii
  misc_feature: SGI Peptide ID NO. 559858
  misc_feature (1)..(103): NCBI GI: 39973709 Blast Desc: MGG_00999 [Magnaporthe grisea 70-15] gi|145018046|gb|EDK02325.1| MGG_00999 [Magnaporthe grisea 70-15]
  misc_feature (1)..(103): NCBI GI: 116202515 Blast Desc: CHGG_09142 [Chaetomium globosum CBS 148.51] gi|88177660|gb|EAQ85128.1| CHGG_09142 [Chaetomium globosum CBS 148.51]
  misc_feature (1)..(100): NCBI GI: 156064617 Blast Desc: SS1G_00316 [Sclerotinia sclerotiorum 1980] gi|154691178|gb|EDN90916.1| SS1G_00316 [Sclerotinia sclerotiorum 1980]
  misc_feature (1)..(103): NCBI GI: 46128739 Blast Desc: FG08747.1 [Gibberella zeae PH-1]
  misc_feature (1)..(103): NCBI GI: 256733524 Blast Desc: [Nectria haematococca mpVI 77-13-4]
  misc_feature (1)..(103): NCBI GI: 85095765 Blast Desc: NCU07057 [Neurospora crassa OR74A] gi|28921622|gb|EAA30910.1| [Neurospora crassa OR74A]
  misc_feature (16)..(100): NCBI GI: 154322959 Blast Desc: BC1G_00822 [Botryotinia fuckeliana B05.10] gi|150848156|gb|EDN23349.1| BC1G_00822 [Botryotinia fuckeliana B05.10]
  misc_feature (1)..(65): NCBI GI: 171682416 Blast Desc: protein product [Podospora anserina] gi|170941167|emb|CAP66817.1| protein product [Podospora anserina]
  misc_feature (13)..(79): NCBI GI: 119496941 Blast Desc: 50S ribosomal protein YmL27 [Neosartorya fischeri NRRL 181] gi|119413404|gb|EAW23345.1| 50S ribosomal protein YmL27 [Neosartorya fischeri NRRL 181]
  misc_feature (13)..(79): NCBI GI: 70990642 Blast Desc: 50S ribosomal protein YmL27 [Aspergillus fumigatus Af293] gi|66847802|gb|EAL88132.1| 50S ribosomal protein YmL27 [Aspergillus fumigatus Af293] gi|159130647|gb|EDP55760.1| 50S
MQPTPVLSKAFRKFRLTTKDIKKGFYKGTGSGSMGRHTKHGRYVIEFEKVRTYVVPPGLDSFKLTPFVTKSVEKVKGRYEGNPKGPDDPELYLRHWKDVNGLD

SEQ ID NO: 838 - DNA, 914 bp, Muscodor strobelii
  misc_feature: SGI EST ID NO. CUFF.2380.1
  misc_feature: Variant of the nucleotide sequence at SEQ ID NO 836
ggattttcaacatcgcgaccgaaacatcgtcaatgctatcttgtccccatccaacttgcgcctcattaatcgacgatattttcaccatcatctgagccgatcgctgttcattcgactctctatacactcaacaacatagatacagcctaggcgtgcgacgccccaggagacgacatgcagccgacacctgtgctctcgaaggcgtttcgcaaattccgcctgacgacgaaggatatcaagaagggtttctacaagggaacaggctccggatctatgggtagacacaccaaacacggtcgctatgttatcgagttcgagaaagtccgcacatacgtcgtgcctccaggtctcgattccttcaagttaacgcccttcgtcacgaaatccgtcgagaaagtaaaaggtcgatatgaaggaaatcccaagggtcctgatgatccagagctctatctcagacactggaaggatgtaaacgggctcgactaaatgacctcatcccatacaccagaggggagcggctgctatttcttcgattctctcaaaaattggagatatgatcaattgggaagaggatacacgccacaattatcagggtctagtctctggacagacggatactgacaacgagagagtttgtattcgagccacaagcgatgatgagactgaagcgagttcatcacgtcaactcgggagtcactaagctcctgaatgtacatagtacggctcaaagtagccatgtaaacaccgcactgtacaacaagaatagacatatatacccttcttgtgtcctttaccattattccgaatcggtgcgcattcgatcctcctatcatgtgcaataagggtgattactcggttctggcagtccatgtgacacagcgatattttcttcgatagtttaggtgatgctccag

SEQ ID NO: 839 - DNA, 2682 bp, Muscodor strobelii
  misc_feature: SGI cDNA ID NO. 559859
  misc_feature: Encodes the peptide sequence at SEQ ID NO 840
atgccgggccgccagtcccacggccggcccctcctcaagtccaacggcggcggtagcaagagcaagaacaagtcttccaagtcgaggtccaacaagaaggccataaatgcctttgctgcagccgaggcagagtttggcggccaagagaagcgcacgcaacgaaacaggcagctcgatgcagacctaaacgacggagctccacgtggaaagcatgcccgagacgatgatgacgaggacgaagcggacgaagatgaagcgcccccaagaaagatgcgccgtggtgccgacgatgacgatgacatcgagtatggcagcgatagctctggcaattcgtggcgcgttggagctgtagacaaggatgatgactccgagattgacagcgacgaggcatttggtgagagtgataatgagcgttttgaggattacagatttaggggtagtaagaagaagcgcaaggaggaggacagcgatgatgaagatgatgacgaggatatcgacgacgctgacggggcctcactcggatccgacgctatcgatctcgcagccgccttggacatagtctcctctgacgacgatgcgccaccagacgatgaacacgaagatgacgattctgacgaagacgaagacgaagacgactctggcgatgagtcttccgacatcgaatcagacgcaggcggtgcgaccgaaggagacatcaatgcctgggcctcacagtttggtggcaaagacgccgaagaggaagaagattccatggcagtcgccaaaccaaaattaggactgaaagagctaggactattgaacatcaaagactcagacctcaagaagtcgctcaagctcatgaccaaggaagatcgagcaactaagaagcagaagctggatgtacccttggctcgacgagcacaggcgaaactggatcgatctgtagcttatgaaaagacaaatgagtctatgggacgttggctcgagactgtgaaggccatgcgtcgtgctgaccaaagtcttgtcttcccgcttgcccagcatgagactggtttggcgaagcacgacaatagcgaaattgttcccctaaaccaaaagaacgccggaaacgagctcgaaagtaccattatggcaattatggaagaaagtggcctgaacgtcaccgctgaaaaggagatacccgtcgtatacgatgagaatggcgatgtcatgtctaaaaaggccattgctcagcagcgacgtcacgagagagagctcaagtctagggaagaagccaaggctaaacgcatcaagaagatcaagtcgaaggcatatcacagagtgcaccggaaacagagggaaaggcaagagatgaaggatcatgaagcgaaagtcgccaatggcgagatcgacagcgaggaggaaagagaagctcaagaccgtcagcgtgctatggaaaggatgggagcacgccatcgcgagagcaaatgggcgaaacagtctaacaagaatggtcgagctgcctgggatgatgatgtccgcatgggtgtcaccgagatggcgaagcgagatgaggagcttcggcgtcgcatcgaaggaagatctgagaagcaaggctcggatgatgactctgacgactcagatgattcagatgagtcaggagtcgacgagagagtgaagctacttagaaagctgaaggccgttgctgaagatgaaggctcggagccgcaatcgaagctcatgagcatggcttttatgcagaaatcggaagcaaggcggaaacaagccaacgatgagctgatcactgaaattagaagagatctagcttcagatggagaagacgacagtgggtctgatgatggacctgacgacattggaagacggatattcggccggccggcagacaagaagaaggatgtgatcaagtcgaccaagaaaacgaaaggcataaatactgccgagactgaaactgactcaggcacagttgctgagtcgttaataagtcgctctaccaggccggcagctgcctcgccgcaccagcttaactcgaacggagctgttggcgcttggagccaggaagcaaagtcacaatctaggagaagaggtgacaagaagacagcatctggtgctgccacaatagacgccagcatggttgctacaggcaatgatgcagagccagctcctgcaaaacaaaaacccagaaagaagggcgctgcagctatggtcgaatactcttctgacgacgaggaccagcatctaccagtccaaatgaaagaccaagaaatcctcgaccgagccttcggaggcgaggatgtagtcgcccaattccaagaagagaaagacgagatcatggccgaagacgacgaaaagactaccgagacgacgcttccgggttggggcagctgggtaggcgaaggcgtcagtaatcgcagcaagaagaatatgcaccgcatcgtcaccaagaaagacggcgtgaaacctgaggaccgtagggatgccaagaagaacaatgtcattattaatgagaagcgtgttaagaagaatgacaagtatctggcatctcaactaccacatcagtacgagagccgggctcagtatgagaggagtctaagacttcctatgggtcctgagttcttgacgaagacgtccttccaggatgctacgaagccgagggttatcgttaagcagggtgttattgcaccgatatcgaaacctacgcattaa

SEQ ID NO: 840 - protein, 893 aa, Muscodor strobelii
  misc_feature: SGI Peptide ID NO. 559859
  misc_feature (188)..(892): Pfam Id: PF04615 Pfam Desc: Utp14 protein
  misc_feature (732)..(892): Pfam Id: PF04615 Pfam Desc: Utp14 protein
  misc_feature (410)..(618): Pfam Id: PF04615 Pfam Desc: Utp14 protein
  misc_feature (1)..(891): NCBI GI: 145610665 Blast Desc: MGG_01000 [Magnaporthe grisea 70-15] gi|145018045|gb|EDK02324.1| MGG_01000 [Magnaporthe grisea 70-15]
  misc_feature (1)..(893): NCBI GI: 156064619 Blast Desc: SS1G_00317 [Sclerotinia sclerotiorum 1980] gi|154691179|gb|EDN90917.1| SS1G_00317 [Sclerotinia sclerotiorum 1980]
  misc_feature (1)..(892): NCBI GI: 85095769 Blast Desc: NCU07058 [Neurospora crassa OR74A] gi|28921623|gb|EAA30911.1| [Neurospora crassa OR74A]
  misc_feature (1)..(893): NCBI GI: 116202513 Blast Desc: CHGG_09141 [Chaetomium globosum CBS 148.51] gi|88177659|gb|EAQ85127.1| CHGG_09141 [Chaetomium globosum CBS 148.51]
  misc_feature (232)..(892): NCBI GI: 261359503 Blast Desc: small nucleolar ribonucleoprotein complex subunit Utp14 [Verticillium albo-atrum VaMs.102]
  misc_feature (260)..(891): NCBI GI: 154322961 Blast Desc: BC1G_00823 [Botryotinia fuckeliana B05.10] gi|150848157|gb|EDN23350.1| BC1G_00823 [Botryotinia fuckeliana B05.10]
  misc_feature (1)..(891): NCBI GI: 240111061 Blast Desc: Utp14 protein [Coccidioides posadasii C735 delta SOWgp]
  misc_feature (1)..(892): NCBI GI: 238840980 Blast Desc: U3 small nucleolar RNA-associated protein 14 [Microsporum canis CBS 113480]
  misc_feature (1)..(891): NCBI GI: 212540248 Blast Desc: small nucleolar ribonucleoprotein complex subunit Utp14, putatrive [Penicillium marneffei ATCC 18224] gi|210067578|gb|EEA21670.1| small nucleolar ribonucleoprotein
  misc_feature (1)..(891): NCBI GI: 119189885 Blast Desc: CIMG_04990 [Coccidioides immitis RS]
MPGRQSHGRPLLKSNGGGSKSKNKSSKSRSNKKAINAFAAAEAEFGGQEKRTQRNRQLDADLNDGAPRGKHARDDDDEDEADEDEAPPRKMRRGADDDDDIEYGSDSSGNSWRVGAVDKDDDSEIDSDEAFGESDNERFEDYRFRGSKKKRKEEDSDDEDDDEDIDDADGASLGSDAIDLAAALDIVSSDDDAPPDDEHEDDDSDEDEDEDDSGDESSDIESDAGGATEGDINAWASQFGGKDAEEEEDSMAVAKPKLGLKELGLLNIKDSDLKKSLKLMTKEDRATKKQKLDVPLARRAQAKLDRSVAYEKTNESMGRWLETVKAMRRADQSLVFPLAQHETGLAKHDNSEIVPLNQKNAGNELESTIMAIMEESGLNVTAEKEIPVVYDENGDVMSKKAIAQQRRHERELKSREEAKAKRIKKIKSKAYHRVHRKQRERQEMKDHEAKVANGEIDSEEEREAQDRQRAMERMGARHRESKWAKQSNKNGRAAWDDDVRMGVTEMAKRDEELRRRIEGRSEKQGSDDDSDDSDDSDESGVDERVKLLRKLKAVAEDEGSEPQSKLMSMAFMQKSEARRKQANDELITEIRRDLASDGEDDSGSDDGPDDIGRRIFGRPADKKKDVIKSTKKTKGINTAETETDSGTVAESLISRSTRPAAASPHQLNSNGAVGAWSQEAKSQSRRRGDKKTASGAATIDASMVATGNDAEPAPAKQKPRKKGAAAMVEYSSDDEDQHLPVQMKDQEILDRAFGGEDVVAQFQEEKDEIMAEDDEKTTETTLPGWGSWVGEGVSNRSKKNMHRIVTKKDGVKPEDRRDAKKNNVIINEKRVKKNDKYLASQLPHQYESRAQYERSLRLPMGPEFLTKTSFQDATKPRVIVKQGVIAPISKPTH

SEQ ID NO: 841 - DNA, 3201 bp, Muscodor strobelii
  misc_feature: SGI EST ID NO. CUFF.2334.0
  misc_feature: Variant of the nucleotide sequence at SEQ ID NO 839
caggctcatatcgaaatcaatacagcgaattccgactagataatgtcctgttgcagatcgatttcagattgcagaacgggatgcgccttacaaaacaatcgtggtagagataacggtttgacgtttcgcaagctctcatcattctatatttggatttttaacaccgttcccttcattctctatcaactacatcgatcatgccgggccgccagtcccacggccggcccctcctcaagtccaacggcggcggtagcaagagcaagaacaagtcttccaagtcgaggtccaacaagaaggccataaatgcctttgctgcagccgaggcagagtttggcggccaagagaagcgcacgcaacgaaacaggcagctcgatgcagacctaaacgacggagctccacgtggaaagcatgcccgagacgatgatgacgaggacgaagcggacgaagatgaagcgcccccaagaaagatgcgccgtggtgccgacgatgacgatgacatcgagtatggcagcgatagctctggcaattcgtggcgcgttggagctgtagacaaggatgatgactccgagattgacagcgacgaggcatttggtgagagtgataatgagcgttttgaggattacagatttaggggtagtaagaagaagcgcaaggaggaggacagcgatgatgaagatgatgacgaggatatcgacgacgctgacggggcctcactcggatccgacgctatcgatctcgcagccgccttggacatagtctcctctgacgacgatgcgccaccagacgatgaacacgaagatgacgattctgacgaagacgaagacgaagacgactctggcgatgagtcttccgacatcgaatcagacgcaggcggtgcgaccgaaggagacatcaatgcctgggcctcacagtttggtggcaaagacgccgaagaggaagaagattccatggcagtcgccaaaccaaaattaggactgaaagagctaggactattgaacatcaaagactcagacctcaagaagtcgctcaagctcatgaccaaggaagatcgagcaactaagaagcagaagctggatgtacccttggctcgacgagcacaggcgaaactggatcgatctgtagcttatgaaaagacaaatgagtctatgggacgttggctcgagactgtgaaggccatgcgtcgtgctgaccaaagtcttgtcttcccgcttgcccagcatgagactggtttggcgaagcacgacaatagcgaaattgttcccctaaaccaaaagaacgccggaaacgagctcgaaagtaccattatggcaattatggaagaaagtggcctgaacgtcaccgctgaaaaggagatacccgtcgtatacgatgagaatggcgatgtcatgtctaaaaaggccattgctcagcagcgacgtcacgagagagagctcaagtctagggaagaagccaaggctaaacgcatcaagaagatcaagtcgaaggcatatcacagagtgcaccggaaacagagggaaaggcaagagatgaaggatcatgaagcgaaagtcgccaatggcgagatcgacagcgaggaggaaagagaagctcaagaccgtcagcgtgctatggaaaggatgggagcacgccatcgcgagagcaaatgggcgaaacagtctaacaagaatggtcgagctgcctgggatgatgatgtccgcatgggtgtcaccgagatggcgaagcgagatgaggagcttcggcgtcgcatcgaaggaagatctgagaagcaaggctcggatgatgactctgacgactcagatgattcagatgagtcaggagtcgacgagagagtgaagctacttagaaagctgaaggccgttgctgaagatgaaggctcggagccgcaatcgaagctcatgagcatggcttttatgcagaaatcggaagcaaggcggaaacaagccaacgatgagctgatcactgaaattagaagagatctagcttcagatggagaagacgacagtgggtctgatgatggacctgacgacattggaagacggatattcggccggccggcagacaagaagaaggatgtgatcaagtcgaccaagaaaacgaaaggcataaatactgccgagactgaaactgactcaggcacagttgctgagtcgttaataagtcgctctaccaggccggcagctgcctcgccgcaccagcttaactcgaacggagctgttggcgcttggagccaggaagcaaagtcacaatctaggagaagaggtgacaagaagacagcatctggtgctgccacaatagacgccagcatggttgctacaggcaatgatgcagagccagctcctgcaaaacaaaaacccagaaagaagggcgctgcagctatggtcgaatactcttctgacgacgaggaccagcatctaccagtccaaatgaaagaccaagaaatcctcgaccgagccttcggaggcgaggatgtagtcgcccaattccaagaagagaaagacgagatcatggccgaagacgacgaaaagactaccgagacgacgcttccgggttggggcagctgggtaggcgaaggcgtcagtaatcgcagcaagaagaatatgcaccgcatcgtcaccaagaaagacggcgtgaaacctgaggaccgtagggatgccaagaagaacaatgtcattattaatgagaagcgtgttaagaagaatgacaagtatctggcatctcaactaccacatcagtacgagagccgggctcagtatgagaggagtctaagacttcctatgggtcctgagttcttgacgaagacgtccttccaggatgctacgaagccgagggttatcgttaagcagggtgttattgcaccgatatcgaaacctacgcattaagtgctgtatgtgagatgtgttgtatatagctctggtgttatcatgggttgtctttgcgctggagaggatatgctggtgataagttaatggttgtttaacgttcaacgtcagagtggggtaagtagacatcaatacttagtacgatggtcatgatctgagttgaatggtcaatcaatgcaacgtgccaatacggggaaactgattgatttcgtatctgaaacttgcaaataggttgttcttgctgtagaagttacgtatttccatgaagcacttattccaaactgtgctgcttaggatttaaagagttgatacaacaccgcgt

SEQ ID NO: 842 - DNA, 2688 bp, Muscodor strobelii
  misc_feature: SGI cDNA ID NO. 559860
  misc_feature: Encodes the peptide sequence at SEQ ID NO 843
atgccgggccgccagtcccacggccggcccctcctcaagtccaacggcggcggtagcaagagcaagaacaagtcttccaagtcgaggtccaacaagaaggccataaatgcctttgctgcagccgaggcagagtttggcggccaagagaagcgcacgcaacgaaacaggcagctcgatgcagacctaaacgacggagctccacgtggaaagcatgcccgagacgatgatgacgaggacgaagcggacgaagatgaagcgcccccaagaaagatgcgccgtggtgccgacgatgacgatgacatcgagtatggcagcgatagctctggcaattcgtggcgcgttggagctgtagacaaggatgatgactccgagattgacagcgacgaggcatttggtgagagtgataatgagcgttttgaggattacagatttaggggtagtaagaagaagcgcaaggagatccaggaggacagcgatgatgaagatgatgacgaggatatcgacgacgctgacggggcctcactcggatccgacgctatcgatctcgcagccgccttggacatagtctcctctgacgacgatgcgccaccagacgatgaacacgaagatgacgattctgacgaagacgaagacgaagacgactctggcgatgagtcttccgacatcgaatcagacgcaggcggtgcgaccgaaggagacatcaatgcctgggcctcacagtttggtggcaaagacgccgaagaggaagaagattccatggcagtcgccaaaccaaaattaggactgaaagagctaggactattgaacatcaaagactcagacctcaagaagtcgctcaagctcatgaccaaggaagatcgagcaactaagaagcagaagctggatgtacccttggctcgacgagcacaggcgaaactggatcgatctgtagcttatgaaaagacaaatgagtctatgggacgttggctcgagactgtgaaggccatgcgtcgtgctgaccaaagtcttgtcttcccgcttgcccagcatgagactggtttggcgaagcacgacaatagcgaaattgttcccctaaaccaaaagaacgccggaaacgagctcgaaagtaccattatggcaattatggaagaaagtggcctgaacgtcaccgctgaaaaggagatacccgtcgtatacgatgagaatggcgatgtcatgtctaaaaaggccattgctcagcagcgacgtcacgagagagagctcaagtctagggaagaagccaaggctaaacgcatcaagaagatcaagtcgaaggcatatcacagagtgcaccggaaacagagggaaaggcaagagatgaaggatcatgaagcgaaagtcgccaatggcgagatcgacagcgaggaggaaagagaagctcaagaccgtcagcgtgctatggaaaggatgggagcacgccatcgcgagagcaaatgggcgaaacagtctaacaagaatggtcgagctgcctgggatgatgatgtccgcatgggtgtcaccgagatggcgaagcgagatgaggagcttcggcgtcgcatcgaaggaagatctgagaagcaaggctcggatgatgactctgacgactcagatgattcagatgagtcaggagtcgacgagagagtgaagctacttagaaagctgaaggccgttgctgaagatgaaggctcggagccgcaatcgaagctcatgagcatggcttttatgcagaaatcggaagcaaggcggaaacaagccaacgatgagctgatcactgaaattagaagagatctagcttcagatggagaagacgacagtgggtctgatgatggacctgacgacattggaagacggatattcggccggccggcagacaagaagaaggatgtgatcaagtcgaccaagaaaacgaaaggcataaatactgccgagactgaaactgactcaggcacagttgctgagtcgttaataagtcgctctaccaggccggcagctgcctcgccgcaccagcttaactcgaacggagctgttggcgcttggagccaggaagcaaagtcacaatctaggagaagaggtgacaagaagacagcatctggtgctgccacaatagacgccagcatggttgctacaggcaatgatgcagagccagctcctgcaaaacaaaaacccagaaagaagggcgctgcagctatggtcgaatactcttctgacgacgaggaccagcatctaccagtccaaatgaaagaccaagaaatcctcgaccgagccttcggaggcgaggatgtagtcgcccaattccaagaagagaaagacgagatcatggccgaagacgacgaaaagactaccgagacgacgcttccgggttggggcagctgggtaggcgaaggcgtcagtaatcgcagcaagaagaatatgcaccgcatcgtcaccaagaaagacggcgtgaaacctgaggaccgtagggatgccaagaagaacaatgtcattattaatgagaagcgtgttaagaagaatgacaagtatctggcatctcaactaccacatcagtacgagagccgggctcagtatgagaggagtctaagacttcctatgggtcctgagttcttgacgaagacgtccttccaggatgctacgaagccgagggttatcgttaagcagggtgttattgcaccgatatcgaaacctacgcattaa

SEQ ID NO: 843 - protein, 895 aa, Muscodor strobelii
  misc_feature: SGI Peptide ID NO. 559860
  misc_feature (190)..(894): Pfam Id: PF04615 Pfam Desc: Utp14 protein
  misc_feature (734)..(894): Pfam Id: PF04615 Pfam Desc: Utp14 protein
  misc_feature (412)..(620): Pfam Id: PF04615 Pfam Desc: Utp14 protein
  misc_feature (1)..(895): NCBI GI: 156064619 Blast Desc: SS1G_00317 [Sclerotinia sclerotiorum 1980] gi|154691179|gb|EDN90917.1| SS1G_00317 [Sclerotinia sclerotiorum 1980]
  misc_feature (1)..(893): NCBI GI: 145610665 Blast Desc: MGG_01000 [Magnaporthe grisea 70-15] gi|145018045|gb|EDK02324.1| MGG_01000 [Magnaporthe grisea 70-15]
  misc_feature (1)..(894): NCBI GI: 85095769 Blast Desc: NCU07058 [Neurospora crassa OR74A] gi|28921623|gb|EAA30911.1| [Neurospora crassa OR74A]
  misc_feature (1)..(895): NCBI GI: 116202513 Blast Desc: CHGG_09141 [Chaetomium globosum CBS 148.51] gi|88177659|gb|EAQ85127.1| CHGG_09141 [Chaetomium globosum CBS 148.51]
  misc_feature (234)..(894): NCBI GI: 261359503 Blast Desc: small nucleolar ribonucleoprotein complex subunit Utp14 [Verticillium albo-atrum VaMs.102]
  misc_feature (262)..(893): NCBI GI: 154322961 Blast Desc: BC1G_00823 [Botryotinia fuckeliana B05.10] gi|150848157|gb|EDN23350.1| BC1G_00823 [Botryotinia fuckeliana B05.10]
  misc_feature (1)..(893): NCBI GI: 240111061 Blast Desc: Utp14 protein [Coccidioides posadasii C735 delta SOWgp]
  misc_feature (1)..(894): NCBI GI: 238840980 Blast Desc: U3 small nucleolar RNA-associated protein 14 [Microsporum canis CBS 113480]
  misc_feature (1)..(893): NCBI GI: 212540248 Blast Desc: small nucleolar ribonucleoprotein complex subunit Utp14, putatrive [Penicillium marneffei ATCC 18224] gi|210067578|gb|EEA21670.1| small nucleolar ribonucleoprotein
  misc_feature (1)..(893): NCBI GI: 119189885 Blast Desc: CIMG_04990 [Coccidioides immitis RS]
MPGRQSHGRPLLKSNGGGSKSKNKSSKSRSNKKAINAFAAAEAEFGGQEKRTQRNRQLDADLNDGAPRGKHARDDDDEDEADEDEAPPRKMRRGADDDDDIEYGSDSSGNSWRVGAVDKDDDSEIDSDEAFGESDNERFEDYRFRGSKKKRKEIQEDSDDEDDDEDIDDADGASLGSDAIDLAAALDIVSSDDDAPPDDEHEDDDSDEDEDEDDSGDESSDIESDAGGATEGDINAWASQFGGKDAEEEEDSMAVAKPKLGLKELGLLNIKDSDLKKSLKLMTKEDRATKKQKLDVPLARRAQAKLDRSVAYEKTNESMGRWLETVKAMRRADQSLVFPLAQHETGLAKHDNSEIVPLNQKNAGNELESTIMAIMEESGLNVTAEKEIPVVYDENGDVMSKKAIAQQRRHERELKSREEAKAKRIKKIKSKAYHRVHRKQRERQEMKDHEAKVANGEIDSEEEREAQDRQRAMERMGARHRESKWAKQSNKNGRAAWDDDVRMGVTEMAKRDEELRRRIEGRSEKQGSDDDSDDSDDSDESGVDERVKLLRKLKAVAEDEGSEPQSKLMSMAFMQKSEARRKQANDELITEIRRDLASDGEDDSGSDDGPDDIGRRIFGRPADKKKDVIKSTKKTKGINTAETETDSGTVAESLISRSTRPAAASPHQLNSNGAVGAWSQEAKSQSRRRGDKKTASGAATIDASMVATGNDAEPAPAKQKPRKKGAAAMVEYSSDDEDQHLPVQMKDQEILDRAFGGEDVVAQFQEEKDEIMAEDDEKTTETTLPGWGSWVGEGVSNRSKKNMHRIVTKKDGVKPEDRRDAKKNNVIINEKRVKKNDKYLASQLPHQYESRAQYERSLRLPMGPEFLTKTSFQDATKPRVIVKQGVIAPISKPTH

SEQ ID NO: 844 - DNA, 3201 bp, Muscodor strobelii; identical to SEQ ID NO: 841
  misc_feature: SGI EST ID NO. CUFF.2334.0
  misc_feature: Variant of the nucleotide sequence at SEQ ID NO 842

SEQ ID NO: 845 - DNA, 4005 bp, Muscodor strobelii
  misc_feature: SGI cDNA ID NO. 559861
  misc_feature: Encodes the peptide sequence at SEQ ID NO 846
atgttcgctaaccggctccgggcaaacaatcgacatcgtgtctatgctacgccacctgtatcgacgtcgccacaatccgttttacacgatgaagcattatatcctcatatcaggacattacgagatgaccattcgtctcggtcacttctcagccgggaacaaacagcttttccatcagacttgatgtggcggcccatctggcttcgaggcaaaatattggctgcgttctctgtcctctttactctgatatggattgctctgataattacttggcgttatgccatccgcaacaatggaatcgctcttactctttctacgaaccactacttgtggacttatggccctactctcgtcgtcactgtagtaatgtctctctggcgcagagttgattattattgcaagctgaaccagccgtggaaaaacatgaaagaaggccctaagaatccagatatgggcgtgatgttagactatattacacctgtcccagttacgaccttctatcgggcctgcaggcttcgtcattgggctacagcattatctgtgctgacatattttctactgaaaactgcgacgctactctctaccgtcctcctcattcctcttgaagactcatatccatgcgcaataccactcacagtctcatcgaagttcgacggctctggtttctggaatagtttgggaccaaacccggctatgggagtttactcggtttcggaaacagacggtggtcatgacgcttacgcggtgcctatggaacctggtgaccggttggtggattatgaggcatctgacttgatctcgatatatcagagcctcaataaaggccttacgaaggagccatcgggggtccaaggcggagtggtgtttcaggtatacgagaaaccgttgaatctcaacggcaatctcacacagataacggccacagtcgaagcgttcattccaaatataacttgcgagacagctaccatgtcacttcgaaataagacccagtatcccgacagactattccgacgcctcgtagctttagacagttcgacttgctctgctggccattttgcagaaactcttccattcgacttgtgtaccctcaattgttcccccatccaagagacctacaactactttcgaatcaactgctttgaaagaagtgatatcgcagactacacattcagttacatccctatcaatgaacacacgccttatgatttacgttttgccttcatgactgcaaagtcctcaaatattgaagtattgcatggcaaagcgcacgatgataatcgaaacaaccagtcttggatagtaacaactttcgagagagcagcgatgatttgcaagttcgattacgcaattcagaatatcacgtccacgtttgactatgccacagactcaattgaaataaagcttcctaacgatctgtcttcgcaatcaacatcgctcgagttgacaggtgttcagttaggtgagatcatatacagtgcactgggaggttcacttatggatttgattgagactgcaactggttatacgacagattccgataattctagcttgctgatagataacgatctcctcgcaaacgtcacgcctgggatactgtccgagcttgcaggcctgcttgtccatagaaatttaacggctcaaagcagcgagtctattatcggaaacggcgtgtgtaacagaactcgattgcacgttcagccgttgactttgtggggcatggtttctgtctttatagtaaccagtgtgctgccgattctcattgcgttaaacatgtcggagggtgtggcaacgagcaacaccagctcaatcgcgtcattggcagcaattcttgctgccagtccttcattacagcgcctcttggcgcctacgggaagcctgcgaacaagtgaaatgaaagactggcttaatagccatgttttcagatccgatactggcgaacatggacgtttccaacttgttgctactcggcgcgctcccctcaactacaagacacgtgttaagcagcggccagttgatgaaacattgtatcctacagatatcaaagtgaagaagggcaattggttgcctctctccgctacatatccatttctgtctggcacatttctacttcctattctagcagtttgggcgcttgaagtcatctaccagatatctcagcaccactctggactgcaggatgcagactatgctgctttaccatttattcagtatgcgtcaagtttcgtaatacttgttatcgcaacaacatttaacagtgtggactttgccatacaggtcttttcgccgttctataggctttcagcaacgcagtcaaggtcagatcaagccatgcttcacaattttctcgggaagataccatttctggctttttacgaggctatactcaatggatacccgggagctgccttgtcgaacctcgcaacaatgattggaacgttcctggcaatcgtgtcttctggactatgggtgcttaatccttccgttccgataacagctccgatcagtactatgctcaacacatcttgggacttaaaatgggataacagttcagcgccattcaacgattacaatgcctcgtatctgtttgactctatcgatctcaaccaaacagccagtccagcgggcggagtgggtgtcctagtgttcccggacctcacttccgtcaatgaccccgtgtcgagcttgccgaaacatgtcgtcaatgataccgacagaagcttcgtgctcacagttccgtctctaaggccaagattggcatgtgacgcgattccgcaagaagatattcatgtcgagccctataagcttgggattcctgaggaaatatggagccatatttctgctggtttagatctccctgaagggtgttatggtggttctgatggtaacctcagtcgcattacctttcataataatggctcagaattgaactgggccgctcaacttcttgatgtattcgctaatgacaatgcaattcacctcgggccatgggataagagccgggcgtcttttgttgactttggggattggtctgacaatagagatcaacctaacaatccagacggatgtccctcgattcttattcacttgcagcattttggtccagaaaggccggcgaaggagaatgtcaccattctgctttgttctcaattaatccaggaggtgcaggttgaacttgagctggcaacaaattggacggggggtcgtatagatcagcaatacttattatcgtcgccgatcgtcaaagagtcaacggcaaggaatctgacgaacggcacaaaaggaacgaactcctttcaatatcgtgttgaaacctacttccacacgcttacatatttggacgtcgtgcccgatttaacagggtatgacttcgtagatgagtttttttcacatatagtggctggctcttatccgactcctttagagaatatggtgggccttgacaatattgagaccctgaaagctgctgtcaatcacctgtatcagagatatatggtacaggttatgaacacacctgtttttcgcaagcctgtcaaccactcacaaagtgtccgacctgagctgctagtcaacggcacctctatcgttcgtgttgcgaggcttactgtcgactatagctcgaagctagctttgcagatcatccttgcaacaatggtcgtgctacaggcagcagcactgagccaaattcgacttcgtggtctccttccacgcagtccatgctctattgcaagtgtcatgagcctacttgcagggagcgatctaagtagctgggactttcttccggatacgagagaaaagatcagccaagagcagctcgccaaagcaatccgtcatcgcaccttcagactgggctggtggcatcggggaggaggggacgcaagcccggaaagctcagaagacggcgacacagaagtaggacgcgcaggtattacaagatttgggattgacatgggagaacctgtgagattgggtttcggctggaaagagaagaagacaaagaatcaatag

SEQ ID NO: 846 - protein, 1334 aa, Muscodor strobelii
  misc_feature: SGI Peptide ID NO. 559861
  misc_feature (62)..(1308): NCBI GI: 239610037 Blast Desc: conserved [Ajellomyces dermatitidis ER-3]
  misc_feature (62)..(1308): NCBI GI: 261198575 Blast Desc: conserved [Ajellomyces dermatitidis SLH14081] gi|239594841|gb|EEQ77422.1| conserved [Ajellomyces dermatitidis SLH14081]
  misc_feature (518)..(1285): NCBI GI: 225557913 Blast Desc: conserved [Ajellomyces capsulatus G186AR]
  misc_feature (518)..(1285): NCBI GI: 240273977 Blast Desc: conserved [Ajellomyces capsulatus H143]
  misc_feature (264)..(1225): NCBI GI: 154271544 Blast Desc: [Ajellomyces capsulatus NAm1] gi|150409295|gb|EDN04745.1| [Ajellomyces capsulatus NAm1]
  misc_feature (498)..(1318): NCBI GI: 256721372 Blast Desc: NECHADRAFT_82379 [Nectria haematococca mpVI 77-13-4]
  misc_feature (59)..(1316): NCBI GI: 240110383 Blast Desc: CPC735_064150 [Coccidioides posadasii C735 delta SOWgp]
  misc_feature (41)..(1301): NCBI GI: 115400976 Blast Desc: [Aspergillus terreus NIH2624] gi|114190017|gb|EAU31717.1| [Aspergillus terreus NIH2624]
  misc_feature (52)..(1253): NCBI GI: 258573005 Blast Desc: [Uncinocarpus reesii 1704] gi|237900950|gb|EEP75351.1| [Uncinocarpus reesii 1704]
  misc_feature (16)..(382): NCBI GI: 225557913 Blast Desc: conserved [Ajellomyces capsulatus G186AR]
MFANRLRANNRHRVYATPPVSTSPQSVLHDEALYPHIRTLRDDHSSRSLLSREQTAFPSDLMWRPIWLRGKILAAFSVLFTLIWIALIITWRYAIRNNGIALTLSTNHYLWTYGPTLVVTVVMSLWRRVDYYCKLNQPWKNMKEGPKNPDMGVMLDYITPVPVTTFYRACRLRHWATALSVLTYFLLKTATLLSTVLLIPLEDSYPCAIPLTVSSKFDGSGFWNSLGPNPAMGVYSVSETDGGHDAYAVPMEPGDRLVDYEASDLISIYQSLNKGLTKEPSGVQGGVVFQVYEKPLNLNGNLTQITATVEAFIPNITCETATMSLRNKTQYPDRLFRRLVALDSSTCSAGHFAETLPFDLCTLNCSPIQETYNYFRINCFERSDIADYTFSYIPINEHTPYDLRFAFMTAKSSNIEVLHGKAHDDNRNNQSWIVTTFERAAMICKFDYAIQNITSTFDYATDSIEIKLPNDLSSQSTSLELTGVQLGEIIYSALGGSLMDLIETATGYTTDSDNSSLLIDNDLLANVTPGILSELAGLLVHRNLTAQSSESIIGNGVCNRTRLHVQPLTLWGMVSVFIVTSVLPILIALNMSEGVATSNTSSIASLAAILAASPSLQRLLAPTGSLRTSEMKDWLNSHVFRSDTGEHGRFQLVATRRAPLNYKTRVKQRPVDETLYPTDIKVKKGNWLPLSATYPFLSGTFLLPILAVWALEVIYQISQHHSGLQDADYAALPFIQYASSFVILVIATTFNSVDFAIQVFSPFYRLSATQSRSDQAMLHNFLGKIPFLAFYEAILNGYPGAALSNLATMIGTFLAIVSSGLWVLNPSVPITAPISTMLNTSWDLKWDNSSAPFNDYNASYLFDSIDLNQTASPAGGVGVLVFPDLTSVNDPVSSLPKHVVNDTDRSFVLTVPSLRPRLACDAIPQEDIHVEPYKLGIPEEIWSHISAGLDLPEGCYGGSDGNLSRITFHNNGSELNWAAQLLDVFANDNAIHLGPWDKSRASFVDFGDWSDNRDQPNNPDGCPSILIHLQHFGPERPAKENVTILLCSQLIQEVQVELELATNWTGGRIDQQYLLSSPIVKESTARNLTNGTKGTNSFQYRVETYFHTLTYLDVVPDLTGYDFVDEFFSHIVAGSYPTPLENMVGLDNIETLKAAVNHLYQRYMVQVMNTPVFRKPVNHSQSVRPELLVNGTSIVRVARLTVDYSSKLALQIILATMVVLQAAALSQIRLRGLLPRSPCSIASVMSLLAGSDLSSWDFLPDTREKISQEQLAKAIRHRTFRLGWWHRGGGDASPESSEDGDTEVGRAGITRFGIDMGEPVRLGFGWKEKKTKNQ

SEQ ID NO: 847 - DNA, 1062 bp, Muscodor strobelii
  misc_feature: SGI cDNA ID NO. 559862
  misc_feature: Reduced expression when VOC is produced
  misc_feature: Encodes the peptide sequence at SEQ ID NO 848
atgtatggtcatcaccagtatgcccatccggaccagcagtcctggatgcaccagcagccgaaccaccagcagcatcaggtgcagcaggccgctatcaacgccgcccagcagcacttcggccgcctcaatgccacgcccaacgccaatgtcaatgtcaatgtgaacatggcagcccacatgcaagaccagcctctcgcccttgagcccaacagcgaggacagccgccgcactctcacctacgtcgccgacttgctcaatgagtccacccgcgaggctgccctcctcgagctcagcaagaagcgagagcaagtgcccgagctcgccatgatcctctggcactccttcggcgtcatgacctcgctcatgcaggagatcatctctgtctacaacctgctcaacccctcccagctcaccgctgccgcctccaaccgcgtctgcaatgctctcgccttgctccagtgtgtcgcctcccacaacgagacgaggacactgttcctcaacgcccatatccccctctttctctaccctttcctcaacaccacgtccaagtcacgtccgttcgagtacctccgactcacctccttgggtgtcatcggcgccctggtcaagaatgactcgaccgaggtcatcaacttcctcctcaccaccgagatcatccctctctgcctccgcatcatggagaccggctccgagctgagcaagacagttgctatcttcattgtccagaagattctgctcgacgacaacggtctcaactacatctgtgccacctacgagcgcttctacgccgtcggcaccgtcctcagcaacatggttgcgcagctggtcgagcagcaaacggcccgtctccttaagcatgttgttcgttgctttttgcggctcagcgacaatgcgcgcgcgcgcgaggctctccgccagtgcctgccagagcctctgcgcgacgccaccttcagctccgttctccgcgatgatgccgccactaagcgttgcctggctcagctcttgatcaacctctccgataatgtcgttgagactggtcctgacgcccaccgcatgggttga

SEQ ID NO: 848 - protein, 353 aa, Muscodor strobelii
  misc_feature: SGI Peptide ID NO. 559862
  misc_feature (79)..(341): Pfam Id: PF04078 Pfam Desc: Cell differentiation family, Rcd1-like
  misc_feature (1)..(353): NCBI GI: 85096861 Blast Desc: cell differentiation protein rcd1 [Neurospora crassa OR74A] gi|28921824|gb|EAA31100.1| cell differentiation protein rcd1 [Neurospora crassa OR74A]
  misc_feature (1)..(349): NCBI GI: 256727729 Blast Desc: [Nectria haematococca mpVI 77-13-4]
  misc_feature (1)..(344): NCBI GI: 46134271 Blast Desc: FG09275.1 [Gibberella zeae PH-1]
  misc_feature (1)..(344): NCBI GI: 171682404 Blast Desc: protein product [Podospora anserina] gi|170941161|emb|CAP66811.1| protein product [Podospora anserina]
  misc_feature (38)..(352): NCBI GI: 145611130 Blast Desc: conserved [Magnaporthe grisea 70-15] gi|145018453|gb|EDK02732.1| conserved [Magnaporthe grisea 70-15]
  misc_feature (1)..(346): NCBI GI: 154314253 Blast Desc: BC1G_05220 [Botryotinia fuckeliana B05.10] gi|150848865|gb|EDN24058.1| BC1G_05220 [Botryotinia fuckeliana B05.10]
  misc_feature (71)..(344): NCBI GI: 226285951 Blast Desc: cell differentiation protein rcd1 [Paracoccidioides brasiliensis Pb01]
  misc_feature (71)..(347): NCBI GI: 119184528 Blast Desc: conserved [Coccidioides immitis RS]
  misc_feature (71)..(344): NCBI GI: 225559918 Blast Desc: cell differentiation protein rcd1 [Ajellomyces capsulatus G186AR] gi|225559968|gb|EEH08250.1| cell differentiation protein rcd1 [Ajellomyces capsulatus G186AR]
  misc_feature (71)..(347): NCBI GI: 240109892 Blast Desc: Cell differentiation protein rcd1, [Coccidioides posadasii C735 delta SOWgp]
  misc_feature: Useful for introducing or modulating the production of volatile compounds
MYGHHQYAHPDQQSWMHQQPNHQQHQVQQAAINAAQQHFGRLNATPNANVNVNVNMAAHMQDQPLALEPNSEDSRRTLTYVADLLNESTREAALLELSKKREQVPELAMILWHSFGVMTSLMQEIISVYNLLNPSQLTAAASNRVCNALALLQCVASHNETRTLFLNAHIPLFLYPFLNTTSKSRPFEYLRLTSLGVIGALVKNDSTEVINFLLTTEIIPLCLRIMETGSELSKTVAIFIVQKILLDDNGLNYICATYERFYAVGTVLSNMVAQLVEQQTARLLKHVVRCFLRLSDNARAREALRQCLPEPLRDATFSSVLRDDAATKRCLAQLLINLSDNVVETGPDAHRMG

SEQ ID NO: 849 - DNA, 2850 bp, Muscodor strobelii
  misc_feature: SGI EST ID NO. CUFF.2338.0
  misc_feature: Variant of the nucleotide sequence at SEQ ID NO 847
ctcatggcctcgggagggtacctagcaggaagaagactgccagttgtcggacaggttgcccttgggctccgagtctggcaggggcgcactagccagcgcagggctggtgctccgcgacctgtcgagcctgtaccctgtcgtcaaaagggcaagcaggagcaatgctgccctgggaagccacggagccgcatgtccatgctgggccaacctcaactcactcaccctcggatgttccatctgcgacttcaagtcctcaagccaagccagctgcatttcagtcgcatcccgtcgcgacgccagcattccgccttcgatccgaactattgtgttcgatcagaactctagcttcagcctcgagcatcagattcttggagcgcccctcgtctgcgaacctcaggtttaatatcacagccgtcgcacgctggcggtgtcgcaagcccttgggttaaattccgaatcctcatccacagccagcataaccaccatccgaatatcgacctctggcagcgatcgcccgccatgtatggtcatcaccagtatgcccatccggaccagcagtcctggatgcaccagcagccgaaccaccagcagcatcaggtgcagcaggccgctatcaacgccgcccagcagcacttcggccgcctcaatgccacgcccaacgccaatgtcaatgtcaatgtgaacatggcagcccacatgcaagaccagcctctcgcccttgagcccaacagcgaggacagccgccgcactctcacctacgtcgccgacttgctcaatgagtccacccgcgaggctgccctcctcgagctcagcaagaagcgagagcaagtgcccgagctcgccatgatcctctggcactccttcggcgtcatgacctcgctcatgcaggagatcatctctgtctacaacctgctcaacccctcccagctcaccgctgccgcctccaaccgcgtctgcaatgctctcgccttgctccagtgtgtcgcctcccacaacgagacgaggacactgttcctcaacgcccatatccccctctttctctaccctttcctcaacaccacgtccaagtcacgtccgttcgagtacctccgactcacctccttgggtgtcatcggcgccctggtcaagaatgactcgaccgaggtcatcaacttcctcctcaccaccgagatcatccctctctgcctccgcatcatggagaccggctccgagctgagcaagacagttgctatcttcattgtccagaagattctgctcgacgacaacggtctcaactacatctgtgccacctacgagcgcttctacgccgtcggcaccgtcctcagcaacatggttgcgcagctggtcgagcagcaaacggcccgtctccttaagcatgttgttcgttgctttttgcggctcagcgacaatgcgcgcgcgcgcgaggctctccgccagtgcctgccagagcctctgcgcgacgccaccttcagctccgttctccgcgatgatgccgccactaagcgttgcctggctcagctcttgatcaacctctccgataatgtcgttgagactggtcctgacgcccaccgcatgggttgaagcctatgatgaaatccattctgttgatcagaacggcataaaaagagggcccatcatgaatgcgagcagatccgactttgaagcgtttactaataatcacaaagtcttcgggatgtttctgtaacgaaacatttttggatggaacatgaacatgccctttccataccccttttccacgaccatccacaatcatgtctcgggtagccatgtgagcacccgatgttttcgtcgacgatacatcgttactcaagaagaaaagaatggagccagtcacaacgacatgactaatcactacccgacataagtatttcctagcggtcacgatactcggagttagacgtacgcaatatacccatgacggaaaaaaacaaaaggggaaagcgggcgccagtgcggcaaaaagagcttcttccagtgtttttttcatacccaatccccttgttgcatgaatcggcgttattctttagcggtctgggtgggttctgcatggtgtttgctttgttcggggttcggaagacaggagattcaggacagagagagagcatgcggcctatggagtacctatcatgatcagcacgagatgactgtttactgttttttcctgtcctgtttcggtttacagtgttattttactggtccgccgagccgttgacagtatatgagtaggatgatgcatgtagaataggagggaaaagaaaaagtttcatgtctaccccgagttttctttctcttgtgatagataccttactttttctcttctattgcgagggattccttactcccagtatcttttcgctttcttcactgctactttttcaagaacttgattgctgcattttcaaggaggatggagcgagggattgaacggggcgttcttaaagcatttacggtatattagtttttagtctgtcaaggttctaggagagcttttttctaccatagccgagtttttgattacctacttggttttaggattggggtgggtatgtggtgagtagggggaggagttggtatgggagagatagagggctgaaggagtgaaaactttggcgatgttcgtataggaggttggaaatacggtgttgtgtgttgcagataggttaagtgaaaaagtggttggactggctttgtatgtaggtaggagatagagaagagcagagatatatatttatggaaggttgacgactgtattattgtgacttttggtttagtgtgagctgtatgtctttgtttgagtttgagatgtgtggattccttaatggggatggg

SEQ ID NO: 850 - DNA, 2685 bp, Muscodor strobelii
  misc_feature: SGI cDNA ID NO. 559863
  misc_feature: Encodes the peptide sequence at SEQ ID NO 851
atgcaggctgctgccgacgcccgcgccacgggggccaagcagaagacctcgcgcaccagcatccccacccagtcgggcaaatggatcctgggcaagaccatcggcgccggcagcatgggcaaggtcaagctggcacgcaaggaaggaggcaccgagcaggtcgcctgcaagatcatccctcgagggtctaccgaagatggccaccacagtcgagcagacaaagaacgggcagaccagtccaaggaaatacgcacagcccgtgaggctgccattgtcaccctcctccaccacgaccacatctgcaagctacatgacgtcgtcagaaccaactttcactggtacatgcttttcgagtatgtgaacggagggcagatgctcgactacatcatctcgcacggcaagttgaaggaaaaacaagccaagaagttcagtcgccagattgccagtgcgcttgactactgccaccgcaacagcatcgtgcatcgtgacctcaagatcgagaatatcctcatcagcaaagccggtgacatcaagatcatcgatttcggtctcagcaatctgttctctccccgcggacatctcaagaccttttgcggcagcctctactttgctgcccccgagctgctgcaagctcgtgcctatacgggccccgaagtcgatgtctggagctttggaatcgttctctatgtcctcgtctgcggaaaagtcccctttgatgatcagagcatgccagctcttcatgcaaagatcaagaagggtgtagtcgactatccaggctggctttctaatgactgccggcacctcctttcgcgcatgcttgtcacggaccccaagcagagagcaaccatgttcgaagtcatgaaccacccgtggctgaggggatcttctggcccgccagagaactacttgcccgcgcgagagcctctgaccctaccgttggatcctgaagtcatcaacgccatgactggatttaacttcggatctgccgagaccattcgggcgcaacttactaagctaatcgaatcggatgaatataaacgggcggtgcaactgtcacagaaagagagagaggctccaccggcaccaaaggacatcgagaagaagcgcggattcgggttcgacttcgatatctacaagcgacggaaatccgccaatagcagggacaatcttacagccccaagttccgaggccctgcaaatcggcagcgatccgctcaatgcctttagccctctcatttccatatactacctagtaagagagaaacaggatcgcgaccgcaaggacaaggctccgaagtcatatccgcccaagaacgaagccgatacgcctttgcccgagatcacgcctttgccccctgcttatactaattcttcaaccaaggagatggcaggcgaaaagcccactggtgggaaagggcgaccccgtgcgcctactctcgaggacccagaagaagccaaacaccacgtaccacccccaccagagccacccgctgagtcgcaaccgagaaaagagagtacagctgcaggtattctcaggcggttcagcacgcggcgccgaaaggaacccgagagactcgacaaggaccgatctcaccctcccgtggtgcaagtctactcgccagaacagccatccccctcgatgccacgcaaaagcttctccatccgcaaatcgcgccaagatcgagatgaccaaggcggtcgactccgatcagggagcagtcagccccaccaccgtgacctgctcagtcctccgatgtctgcagggggcaacggaagcaaaaaagggcttgggagatcgaccagcgtcaattcggcagaatataggcgaaggccgtttgggtccgccagcagactcacaaaggaaccaccgccaacgagtggttcagatcagtcagctgtcaccgacaaaccgcctcaagagcagaagggcaccctgaactctcgagcgacctcgatgagggcaaggccgataggagacgctaggcgcgagagcatccaggccaggagagcgcagagggaaggagcccgagcggctgatgtgcttgaggaaacagaccaggaaggcggcgaagtcagcggaaactcgggggagaggttgggcgactcggagctagccaagcccgtgttcctcaagggactcttcagcgtgtcgacgacatctggcaagtcggtaccggccattcgcaccgaggtcaagagggtgttgaagcagctcggggtcgagtacacagagatcaagggaggtttcgcctgtcgacacgcccctagcattaaggcgccagacctgccgagcagcccggctttgacacccggtgttcgtcgccggttcagcttcggcatcagagcggatcgcgaccgagaagagttccgggaatcagagcgagtgccacccacaccccgaacgcctggcaaagcaccagcagaccgagcggactcggcttcggaactctcggagcaggaagactaccatcgcgacccaacagaatcgtcgaggcggatcccggcgggcgagacgacgacacacgtgcagaacgatctcggaggcaacatggttctcgactttgagatcttcatcgtcaaggttccgctcctgtcgctgcacggcatccagttcaagcgcatggccggcaatacatggcagttcaagaacatggcggaccagattctgaaggaggttcgactataa

SEQ ID NO: 851 - protein, 894 aa, Muscodor strobelii
  misc_feature: SGI Peptide ID NO. 559863
  misc_feature (845)..(894): Pfam Id: PF02149 Pfam Desc: Kinase associated domain 1
  misc_feature (28)..(292): Pfam Id: PF00069 Pfam Desc: Protein kinase domain
  misc_feature (28)..(185): Pfam Id: PF07714 Pfam Desc: Protein tyrosine kinase
  misc_feature (205)..(253): Pfam Id: PF07714 Pfam Desc: Protein tyrosine kinase
  misc_feature (18)..(894): NCBI GI: 145613894 Blast Desc: conserved [Magnaporthe grisea 70-15] gi|145020908|gb|EDK05037.1| conserved [Magnaporthe grisea 70-15]
  misc_feature (12)..(894): NCBI GI: 156061595 Blast Desc: conserved [Sclerotinia sclerotiorum 1980] gi|154700344|gb|EDO00083.1| conserved [Sclerotinia sclerotiorum 1980]
  misc_feature (11)..(894): NCBI GI: 154319546 Blast Desc: conserved [Botryotinia fuckeliana B05.10] gi|150855912|gb|EDN31104.1| conserved [Botryotinia fuckeliana B05.10]
  misc_feature (53)..(894): NCBI GI: 261359677 Blast Desc: protein kinase kin1 [Verticillium albo-atrum VaMs.102]
  misc_feature (3)..(894): NCBI GI: 189189490 Blast Desc: protein kinase kin1 [Pyrenophora tritici-repentis Pt-1C-BFP] gi|187972690|gb|EDU40189.1| protein kinase kin1 [Pyrenophora tritici-repentis Pt-1C-BFP]
  misc_feature (14)..(894): NCBI GI: 121701787 Blast Desc: serine/threonine protein kinase Kin1, [Aspergillus clavatus NRRL 1] gi|119397301|gb|EAW07732.1| serine/threonine protein kinase Kin1, [Aspergillus clavatus NRRL 1]
  misc_feature (2)..(894): NCBI GI: 145239611 Blast Desc: An08g03360 [Aspergillus niger] gi|134076963|emb|CAK45372.1| protein product [Aspergillus niger]
  misc_feature (2)..(894): NCBI GI: 225560041 Blast Desc: protein kinase [Ajellomyces capsulatus G186AR]
  misc_feature (14)..(894): NCBI GI: 119495767 Blast Desc: serine/threonine protein kinase Kin1, [Neosartorya fischeri NRRL 181] gi|119412823|gb|EAW22764.1| serine/threonine protein kinase Kin1, [Neosartorya fischeri NRRL 181]
  misc_feature (1)..(894): NCBI GI: 169607771 Blast Desc: SNOG_06945 [Phaeosphaeria nodorum SN15] gi|160701487|gb|EAT85596.2| SNOG_06945 [Phaeosphaeria nodorum SN15]
  misc_feature (26)..(894): SWISSPROT Homolog: EC 2.7.11.1 Non-specific serine/threonine protein kinase
MQAAADARATGAKQKTSRTSIPTQSGKWILGKTIGAGSMGKVKLARKEGGTEQVACKIIPRGSTEDGHHSRADKERADQSKEIRTAREAAIVTLLHHDHICKLHDVVRTNFHWYMLFEYVNGGQMLDYIISHGKLKEKQAKKFSRQIASALDYCHRNSIVHRDLKIENILISKAGDIKIIDFGLSNLFSPRGHLKTFCGSLYFAAPELLQARAYTGPEVDVWSFGIVLYVLVCGKVPFDDQSMPALHAKIKKGVVDYPGWLSNDCRHLLSRMLVTDPKQRATMFEVMNHPWLRGSSGPPENYLPAREPLTLPLDPEVINAMTGFNFGSAETIRAQLTKLIESDEYKRAVQLSQKEREAPPAPKDIEKKRGFGFDFDIYKRRKSANSRDNLTAPSSEALQIGSDPLNAFSPLISIYYLVREKQDRDRKDKAPKSYPPKNEADTPLPEITPLPPAYTNSSTKEMAGEKPTGGKGRPRAPTLEDPEEAKHHVPPPPEPPAESQPRKESTAAGILRRFSTRRRKEPERLDKDRSHPPVVQVYSPEQPSPSMPRKSFSIRKSRQDRDDQGGRLRSGSSQPHHRDLLSPPMSAGGNGSKKGLGRSTSVNSAEYRRRPFGSASRLTKEPPPTSGSDQSAVTDKPPQEQKGTLNSRATSMRARPIGDARRESIQARRAQREGARAADVLEETDQEGGEVSGNSGERLGDSELAKPVFLKGLFSVSTTSGKSVPAIRTEVKRVLKQLGVEYTEIKGGFACRHAPSIKAPDLPSSPALTPGVRRRFSFGIRADRDREEFRESERVPPTPRTPGKAPADRADSASELSEQEDYHRDPTESSRRIPAGETTTHVQNDLGGNMVLDFEIFIVKVPLLSLHGIQFKRMAGNTWQFKNMADQILKEVRL

SEQ ID NO: 852 - DNA, 3461 bp, Muscodor strobelii
  misc_feature: SGI EST ID NO. CUFF.2353.0
  misc_feature: Variant of the nucleotide sequence at SEQ ID NO 850
ccgccgccgtgccgcccgtcatgcaggctgctgccgacgcccgcgccacgggggccaagcagaagacctcgcgcaccagcatccccacccagtcgggcaaatggatcctgggcaagaccatcggcgccggcagcatgggcaaggtcaagctggcacgcaaggaaggaggcaccgagcaggtcgcctgcaagatcatccctcgagggtctaccgaagatggccaccacagtcgagcagacaaagaacgggcagaccagtccaaggaaatacgcacagcccgtgaggctgccattgtcaccctcctccaccacgaccacatctgcaagctacatgacgtcgtcagaaccaactttcactggtacatgcttttcgagtatgtgaacggagggcagatgctcgactacatcatctcgcacggcaagttgaaggaaaaacaagccaagaagttcagtcgccagattgccagtgcgcttgactactgccaccgcaacagcatcgtgcatcgtgacctcaagatcgagaatatcctcatcagcaaagccggtgacatcaagatcatcgatttcggtctcagcaatctgttctctccccgcggacatctcaagaccttttgcggcagcctctactttgctgcccccgagctgctgcaagctcgtgcctatacgggccccgaagtcgatgtctggagctttggaatcgttctctatgtcctcgtctgcggaaaagtcccctttgatgatcagagcatgccagctcttcatgcaaagatcaagaagggtgtagtcgactatccaggctggctttctaatgactgccggcacctcctttcgcgcatgcttgtcacggaccccaagcagagagcaaccatgttcgaagtcatgaaccacccgtggctgaggggatcttctggcccgccagagaactacttgcccgcgcgagagcctctgaccctaccgttggatcctgaagtcatcaacgccatgactggatttaacttcggatctgccgagaccattcgggcgcaacttactaagctaatcgaatcggatgaatataaacgggcggtgcaactgtcacagaaagagagagaggctccaccggcaccaaaggacatcgagaagaagcgcggattcgggttcgacttcgatatctacaagcgacggaaatccgccaatagcagggacaatcttacagccccaagttccgaggccctgcaaatcggcagcgatccgctcaatgcctttagccctctcatttccatatactacctagtaagagagaaacaggatcgcgaccgcaaggacaaggctccgaagtcatatccgcccaagaacgaagccgatacgcctttgcccgagatcacgcctttgccccctgcttatactaattcttcaaccaaggagatggcaggcgaaaagcccactggtgggaaagggcgaccccgtgcgcctactctcgaggacccagaagaagccaaacaccacgtaccacccccaccagagccacccgctgagtcgcaaccgagaaaagagagtacagctgcaggtattctcaggcggttcagcacgcggcgccgaaaggaacccgagagactcgacaaggaccgatctcaccctcccgtggtgcaagtctactcgccagaacagccatccccctcgatgccacgcaaaagcttctccatccgcaaatcgcgccaagatcgagatgaccaaggcggtcgactccgatcagggagcagtcagccccaccaccgtgacctgctcagtcctccgatgtctgcagggggcaacggaagcaaaaaagggcttgggagatcgaccagcgtcaattcggcagaatataggcgaaggccgtttgggtccgccagcagactcacaaaggaaccaccgccaacgagtggttcagatcagtcagctgtcaccgacaaaccgcctcaagagcagaagggcaccctgaactctcgagcgacctcgatgagggcaaggccgataggagacgctaggcgcgagagcatccaggccaggagagcgcagagggaaggagcccgagcggctgatgtgcttgaggaaacagaccaggaaggcggcgaagtcagcggaaactcgggggagaggttgggcgactcggagctagccaagcccgtgttcctcaagggactcttcagcgtgtcgacgacatctggcaagtcggtaccggccattcgcaccgaggtcaagagggtgttgaagcagctcggggtcgagtacacagagatcaagggaggtttcgcctgtcgacacgcccctagcattaaggcgccagacctgccgagcagcccggctttgacacccggtgttcgtcgccggttcagcttcggcatcagagcggatcgcgaccgagaagagttccgggaatcagagcgagtgccacccacaccccgaacgcctggcaaagcaccagcagaccgagcggactcggcttcggaactctcggagcaggaagactaccatcgcgacccaacagaatcgtcgaggcggatcccggcgggcgagacgacgacacacgtgcagaacgatctcggaggcaacatggttctcgactttgagatcttcatcgtcaaggttccgctcctgtcgctgcacggcatccagttcaagcgcatggccggcaatacatggcagttcaagaacatggcggaccagattctgaaggaggttcgactataagacgaccagtgagactggtgaccgactgtcctcctaagaggccagcgtcgctggctaagaaatattggaaagtcgcaacgaggatttggctgtctccttgcaaattctggacaggtagccacgacgaggcatgcgtcgtggaagatggatccttgtcaagaaagaggtggtaatgcagacggcagacaggagttgattagtagtgaacaacacaggacgaggatgatgctggttctgaagcctcaaactgtgtcgttgtggctgcggcgtgcgcatcagagtcaggatgcagctacactccagggagctcacattgatcttaattctatacaacggcgctcagtttctgccgatgaggatacgtgggtgagtgcgttcgtggaactggtggaaggcagatggaagcagacagagagttatagacaagtgggtgggcttactccggactcccctcactcaccgggctggctgaattttgctatattgcatggcgtatgttgcgtgtctttctcattaataagaagccccggccaaagagatggtcgggcagaagggttgataaaaagggggttgttgtataagagggcagaagaacactactatggaattggcaggcaggactactagcgagccgggctttacgaccatcatgtttccctaccttaatagcaagcagatacataacaatattaatgcacagacgaaatacagacgtctcgttagctacggacagacacataatattctgaagttgcc

SEQ ID NO: 853 - DNA, 2121 bp, Muscodor strobelii
  misc_feature: SGI cDNA ID NO. 559864
  misc_feature: Elevated expression when VOC is produced
  misc_feature: Encodes the peptide sequence at SEQ ID NO 854
atgagtggcctactgaattaccttacctcatctacgaccaagaaagcacgccgttctaccgaagacatggaagatgctggatggtcaggcccggcgatcccggtgattgccagggccggcaagaagaaaagcaagagaagatcatatgcgtcaggttctgactccgaggatgaagagcctaagaaacaaatcgtgggcatgatttgcgagcgcaaggatctgtatcagaagttcgacaagcatggcaaaacaacttggaccgaagaatttcccgacgatctcgacgaggccgtcgagaatgagaagacggagaaatatgcacttctcgtccgcaattgcaagagctacgactccagaaagaagctggagattgacagcatcatgatccagagtcccctcctcaagaaggtacttcgcgaggtcctaaaggactatccaggtgttacgacctcacttgcacgcctcatcttcaaggcaccattcaagcccttcgttcaccgctgggagcaactgaatgcagcgttcgacaatgacctggacgaagacacgaagacgcatctcactctcttgcgcgatgtcctctacgatgagctgaagaacgtcattgcctcaacagaagactacatcaagaacaaggtcgtcgcatatgaacacatatgggctatgttccagccgggatcgcttatctacggaacgcgcctcggcaaacccgtcatcacgcggcttaaggatgtcgacttcaccactcacgccgcgctcggtgcttgtttccaggtgcgcggcgacagggtggatttcgatggtggcaaattcggttatgccagtgaatcacactacataaccccgttcgaaggaacgatggcgatcacggacctcgattgctatcctctgatctaccacgcagaccaagaagggatcaaggagaagctcattgcccgaggcaggaaattcgaggctctcgctgggtttcattataaggcgtatcgtggccgcgccatcgagatgacaatgatgggtccttcactcacgacaatcgagagccgcattatcattgacgcgggtgcacataaaaaagcaaatccgaaccaaggtctctacatcaagggactggataaagtcaaggcgaaaactagcgtccaggtcgagtattcagatgacgagagctacgatagtgtcggctcctggagcgacgattaccgcggtggttaccgtggtggacgcggcggaagggatgacgacttcgatcttgatggtaccggctccaagccgaagaaacgacgtgcgttgacggaagaggagttacttctctgtaccccggttgtgagaggttatgccctccgagccaaatcgtggttggagttctacctcgactcaatcaccgagatcgtattcgacgatcgcgctttcgattcccttgtcctgcccgagggccacaaacagctcatcctcgccatctcggaaagtcaggttaagaataaagacacattcgacgatgtcattgcgggaaaaggccgaggcgtaatcatgttgctctcaggcggtccggggatcgggaagactctcaccgctgagtcggtagcggagcacatgcgtcgaccgctgtacatgatgagcgcttcggatctcggtactaacgctagcgagatcgagagcggactcggccgagtgctggacatggtcgcgaagtggaatgcggtgcttcttctcgatgaatgtgacgtcttcctcgagagacgcagtacgcatgatcttgatcgaaatcgcatcgtctccatcttcctacgaacgctcgaatactacgagggaatcctattcttaacaacgaacagagtcaaagagatggatgaggcgtttgagagtaggattcatttccgactcgcgtatccgggccttgataaggctgctagacgtaaggtctggaagggatttctggatcgacagaagggtcatgaggtcggggagaaggagttggagagacttagcgagctggacatgaatgggcgcgttatcaagaatgtgctcaagtcttcgagtttgcttgctagtcataagggggagagcctgggactgaagcatttgaagactgtgttggagattgatgggtatcgggttgaggagtaa

SEQ ID NO: 854 - protein, 706 aa, Muscodor strobelii
  misc_feature: SGI Peptide ID NO. 559864
  misc_feature (508)..(683): Pfam Id: PF00004 Pfam Desc: ATPase family associated with various cellular activities (AAA)
  misc_feature (39)..(705): NCBI GI: 145607209 Blast Desc: MGG_04085 [Magnaporthe grisea 70-15] gi|145014809|gb|EDJ99377.1| MGG_04085 [Magnaporthe grisea 70-15]
  misc_feature (64)..(704): NCBI GI: 46123125 Blast Desc: FG05940.1 [Gibberella zeae PH-1]
  misc_feature (64)..(704): NCBI GI: 256731079 Blast Desc: NECHADRAFT_48916 [Nectria haematococca mpVI 77-13-4]
  misc_feature (44)..(699): NCBI GI: 119483180 Blast Desc: AAA family ATPase, [Neosartorya fischeri NRRL 181] gi|119409773|gb|EAW19721.1| AAA family ATPase, [Neosartorya fischeri NRRL 181]
  misc_feature (50)..(699): NCBI GI: 159123389 Blast Desc: AAA family ATPase, [Aspergillus fumigatus A1163]
  misc_feature (40)..(699): NCBI GI: 189209339 Blast Desc: conserved [Pyrenophora tritici-repentis Pt-1C-BFP] gi|187977095|gb|EDU43721.1| conserved [Pyrenophora tritici-repentis Pt-1C-BFP]
  misc_feature (47)..(699): NCBI GI: 238483793 Blast Desc: AAA family ATPase, [Aspergillus flavus NRRL3357] gi|220701185|gb|EED57523.1| AAA family ATPase, [Aspergillus flavus NRRL3357]
  misc_feature (51)..(703): NCBI GI: 169617988 Blast Desc: SNOG_12178 [Phaeosphaeria nodorum SN15] gi|111059470|gb|EAT80590.1| SNOG_12178 [Phaeosphaeria nodorum SN15]
  misc_feature (66)..(699): NCBI GI: 169766984 Blast Desc: [Aspergillus oryzae RIB40] gi|83765818|dbj|BAE55961.1| protein product [Aspergillus oryzae]
  misc_feature (50)..(699): NCBI GI: 146324886 Blast Desc: AAA family ATPase [Aspergillus fumigatus Af293] gi|129556610|gb|EAL86805.2| AAA family ATPase, [Aspergillus fumigatus Af293]
  misc_feature: Useful for introducing or modulating the production of volatile compounds
MSGLLNYLTSSTTKKARRSTEDMEDAGWSGPAIPVIARAGKKKSKRRSYASGSDSEDEEPKKQIVGMICERKDLYQKFDKHGKTTWTEEFPDDLDEAVENEKTEKYALLVRNCKSYDSRKKLEIDSIMIQSPLLKKVLREVLKDYPGVTTSLARLIFKAPFKPFVHRWEQLNAAFDNDLDEDTKTHLTLLRDVLYDELKNVIASTEDYIKNKVVAYEHIWAMFQPGSLIYGTRLGKPVITRLKDVDFTTHAALGACFQVRGDRVDFDGGKFGYASESHYITPFEGTMAITDLDCYPLIYHADQEGIKEKLIARGRKFEALAGFHYKAYRGRAIEMTMMGPSLTTIESRIIIDAGAHKKANPNQGLYIKGLDKVKAKTSVQVEYSDDESYDSVGSWSDDYRGGYRGGRGGRDDDFDLDGTGSKPKKRRALTEEELLLCTPVVRGYALRAKSWLEFYLDSITEIVFDDRAFDSLVLPEGHKQLILAISESQVKNKDTFDDVIAGKGRGVIMLLSGGPGIGKTLTAESVAEHMRRPLYMMSASDLGTNASEIESGLGRVLDMVAKWNAVLLLDECDVFLERRSTHDLDRNRIVSIFLRTLEYYEGILFLTTNRVKEMDEAFESRIHFRLAYPGLDKAARRKVWKGFLDRQKGHEVGEKELERLSELDMNGRVIKNVLKSSSLLASHKGESLGLKHLKTVLEIDGYRVEE

SEQ ID NO: 855 - DNA, 2748 bp, Muscodor strobelii
  misc_feature: SGI EST ID NO. CUFF.2347.0
  misc_feature: Variant of the nucleotide sequence at SEQ ID NO 853
gcaattgcctcgaaggagtataaggaggcaggcaccaccaagcacatacgtttcgacagcccactcgatgttcccctcgtaaacaaacaaagggacaactgacgcaagtgtcgcaaatttctcccgtctacacagtcggtgttctataggagtcgaatttccactttcaattccatctctcaatctttgctcaaacaaaatatcctgtatttctttcgcaagaatcctccaaaggccaattgcccagccgttggtgcagatgagtggcctactgaattaccttacctcatctacgaccaagaaagcacgccgttctaccgaagacatggaagatgctggatggtcaggcccggcgatcccggtgattgccagggccggcaagaagaaaagcaagagaagatcatatgcgtcaggttctgactccgaggatgaagagcctaagaaacaaatcgtgggcatgatttgcgagcgcaaggatctgtatcagaagttcgacaagcatggcaaaacaacttggaccgaagaatttcccgacgatctcgacgaggccgtcgagaatgagaagacggagaaatatgcacttctcgtccgcaattgcaagagctacgactccagaaagaagctggagattgacagcatcatgatccagagtcccctcctcaagaaggtacttcgcgaggtcctaaaggactatccaggtgttacgacctcacttgcacgcctcatcttcaaggcaccattcaagcccttcgttcaccgctgggagcaactgaatgcagcgttcgacaatgacctggacgaagacacgaagacgcatctcactctcttgcgcgatgtcctctacgatgagctgaagaacgtcattgcctcaacagaagactacatcaagaacaaggtcgtcgcatatgaacacatatgggctatgttccagccgggatcgcttatctacggaacgcgcctcggcaaacccgtcatcacgcggcttaaggatgtcgacttcaccactcacgccgcgctcggtgcttgtttccaggtgcgcggcgacagggtggatttcgatggtggcaaattcggttatgccagtgaatcacactacataaccccgttcgaaggaacgatggcgatcacggacctcgattgctatcctctgatctaccacgcagaccaagaagggatcaaggagaagctcattgcccgaggcaggaaattcgaggctctcgctgggtttcattataaggcgtatcgtggccgcgccatcgagatgacaatgatgggtccttcactcacgacaatcgagagccgcattatcattgacgcgggtgcacataaaaaagcaaatccgaaccaaggtctctacatcaagggactggataaagtcaaggcgaaaactagcgtccaggtcgagtattcagatgacgagagctacgatagtgtcggctcctggagcgacgattaccgcggtggttaccgtggtggacgcggcggaagggatgacgacttcgatcttgatggtaccggctccaagccgaagaaacgacgtgcgttgacggaagaggagttacttctctgtaccccggttgtgagaggttatgccctccgagccaaatcgtggttggagttctacctcgactcaatcaccgagatcgtattcgacgatcgcgctttcgattcccttgtcctgcccgagggccacaaacagctcatcctcgccatctcggaaagtcaggttaagaataaagacacattcgacgatgtcattgcgggaaaaggccgaggcgtaatcatgttgctctcaggcggtccggggatcgggaagactctcaccgctgagtcggtagcggagcacatgcgtcgaccgctgtacatgatgagcgcttcggatctcggtactaacgctagcgagatcgagagcggactcggccgagtgctggacatggtcgcgaagtggaatgcggtgcttcttctcgatgaatgtgacgtcttcctcgagagacgcagtacgcatgatcttgatcgaaatcgcatcgtctccatcttcctacgaacgctcgaatactacgagggaatcctattcttaacaacgaacagagtcaaagagatggatgaggcgtttgagagtaggattcatttccgactcgcgtatccgggccttgataaggctgctagacgtaaggtctggaagggatttctggatcgacagaagggtcatgaggtcggggagaaggagttggagagacttagcgagctggacatgaatgggcgcgttatcaagaatgtgctcaagtcttcgagtttgcttgctagtcataagggggagagcctgggactgaagcatttgaagactgtgttggagattgatgggtatcgggttgaggagtaagagatggtttgcaatgtgctgttgacggctagacgaagagtcataaatacatggggaggaaaaggagttgattcacaaaatgaagagccaggaatgcatcgaatgaatcacacaagatgctcacgcgttccagttctggactggcatattgcccccatagataggtagatagctacagaataaacattacgcgagacacaagattccggcagacacttgtacgagagcctgtgcctagtcaggacgattatctggtccgagctcacgcccgagacgatcatatatttcattcattaagtcatctaggccttgttgatgttaggccgagcgctcgtttacatataggtagttgtcaataagactttggc

SEQ ID NO: 856 - DNA, 1461 bp, Muscodor strobelii
  misc_feature: SGI cDNA ID NO. 559865
  misc_feature: Encodes the peptide sequence at SEQ ID NO 857
atgactcccggcaagcgtagatcacgccggctaatcgccgcgggggctgaagccgcagcttcggctggaccgcaacagctcgactattcagaagatgccaccaccagcttagcccagagcacgccagcaacgaaagaggctgctgctggcgctgattcgaatgctgatgctcctgaagctgacactgatcacgatagtctcttgttcacgcctcaggtcgccacgccctccgtgtcagccactaccgactcttcaacccgccgcatcacacgatctaccagcaaagatttcttcgatggcgtcctgctagcgaccccgtctgcgttgctccaggatagactccgaagttcctcgtcccggagcaacctcactaccaatgccaacaccgcatcatcgcgccttgaggatgctcgggacgttcccgtccagcctacgttgcaggctctggatcatccaacagatcaggacaacatagatgtcgaggaagaggatgcagacgaagacgaagacggagacacgccagaactaccacagagaactcgtcctactcttggaggattgcgtcctagacgctcaagccgtattcgtgagaagatcccggaggagcatagagcgccgtccccgtccactatcttatcggctgtccgtggcaagacctgtcgcgtccagaagcgccggaaggaaagcaccaaagctgcgcccggtacactccgtcgctctgcaagactcgctaagccgctggacaagttccacaagtatgctgatctgcctaacgagcttaagatcatgatctgggaagcggcagttgagccgcgtgtggtatacatcaacaatcgctcgagcagccagctccgaggccaggctttcggggttcagaacaagcgtcccatgtggttcatgacatgccgcctgtccttctgggcagccaaaaagtcctacaccaagatgttcggtatttctaacacaccctatgcaaacggtgtcttcgtgcccgcccaggacgttagtcccttggatgactatgtcatttttgagccttgccatggcggctgccgtggctacttctgtgcccagacgtatagcctaggagaccgtgccctcgtccagaaccttgttgtccaaatcgactccttccatctggcacctggctccgagccaggttgggccagtatctcgcgaacctggaccagcgtccgaacactctacatgatgaagcagcccatcatcagcggactggatcagcgtgacaaagccctcatccgggtcaaagaaaccgagcgtgacgtcagccttcggaaggcctttgatgcatggaagaagggcccgggacagtccagccgaattgccaagcttgaattcattcaagtggtggaagccgagcctgataagccgcccaatgagcgctatcttggggtgacgagtcgccaaacaggcttgcctgaagacattatccacggttag

SEQ ID NO: 857 - protein, 486 aa, Muscodor strobelii
  misc_feature: SGI Peptide ID NO. 559865
MTPGKRRSRRLIAAGAEAAASAGPQQLDYSEDATTSLAQSTPATKEAAAGADSNADAPEADTDHDSLLFTPQVATPSVSATTDSSTRRITRSTSKDFFDGVLLATPSALLQDRLRSSSSRSNLTTNANTASSRLEDARDVPVQPTLQALDHPTDQDNIDVEEEDADEDEDGDTPELPQRTRPTLGGLRPRRSSRIREKIPEEHRAPSPSTILSAVRGKTCRVQKRRKESTKAAPGTLRRSARLAKPLDKFHKYADLPNELKIMIWEAAVEPRVVYINNRSSSQLRGQAFGVQNKRPMWFMTCRLSFWAAKKSYTKMFGISNTPYANGVFVPAQDVSPLDDYVIFEPCHGGCRGYFCAQTYSLGDRALVQNLVVQIDSFHLAPGSEPGWASISRTWTSVRTLYMMKQPIISGLDQRDKALIRVKETERDVSLRKAFDAWKKGPGQSSRIAKLEFIQVVEAEPDKPPNERYLGVTSRQTGLPEDIIHG

SEQ ID NO: 858 - DNA, 2619 bp, Muscodor strobelii
  misc_feature: SGI EST ID NO. CUFF.2406.0
  misc_feature: Variant of the nucleotide sequence at SEQ ID NO 856
gccaaatggacttgtgactttgtgcctatcattcagcctcatgcaccgatggactttgcttctttgctcttgtcctatctgactaattcgcttcaaaagggaacacagctgaactcgaagcaacgatcgcccaactcactcaatgactcccggcaagcgtagatcacgccggctaatcgccgcgggggctgaagccgcagcttcggctggaccgcaacagctcgactattcagaagatgccaccaccagcttagcccagagcacgccagcaacgaaagaggctgctgctggcgctgattcgaatgctgatgctcctgaagctgacactgatcacgatagtctcttgttcacgcctcaggtcgccacgccctccgtgtcagccactaccgactcttcaacccgccgcatcacacgatctaccagcaaagatttcttcgatggcgtcctgctagcgaccccgtctgcgttgctccaggatagactccgaagttcctcgtcccggagcaacctcactaccaatgccaacaccgcatcatcgcgccttgaggatgctcgggacgttcccgtccagcctacgttgcaggctctggatcatccaacagatcaggacaacatagatgtcgaggaagaggatgcagacgaagacgaagacggagacacgccagaactaccacagagaactcgtcctactcttggaggattgcgtcctagacgctcaagccgtattcgtgagaagatcccggaggagcatagagcgccgtccccgtccactatcttatcggctgtccgtggcaagacctgtcgcgtccagaagcgccggaaggaaagcaccaaagctgcgcccggtacactccgtcgctctgcaagactcgctaagccgctggacaagttccacaagtatgctgatctgcctaacgagcttaagatcatgatctgggaagcggcagttgagccgcgtgtggtatacatcaacaatcgctcgagcagccagctccgaggccaggctttcggggttcagaacaagcgtcccatgtggttcatgacatgccgcctgtccttctgggcagccaaaaagtcctacaccaagatgttcggtatttctaacacaccctatgcaaacggtgtcttcgtgcccgcccaggacgttagtcccttggatgactatgtcatttttgagccttgccatggcggctgccgtggctacttctgtgcccagacgtatagcctaggagaccgtgccctcgtccagaaccttgttgtccaaatcgactccttccatctggcacctggctccgagccaggttgggccagtatctcgcgaacctggaccagcgtccgaacactctacatgatgaagcagcccatcatcagcggactggatcagcgtgacaaagccctcatccgggtcaaagaaaccgagcgtgacgtcagccttcggaaggcctttgatgcatggaagaagggcccgggacagtccagccgaattgccaagcttgaattcattcaagtggtggaagccgagcctgataagccgcccaatgagcgctatcttggggtgacgagtcgccaaacaggcttgcctgaagacattatccacggttagcccaatttcctatcgccaagacgctgaaatagcctccttctggtggccaaaatcatggcaaacgacaaggcaatcgcaagacatacgatatgctatgtctagcagggtgtcagcaatagtgccactgtctggaaagaaaggagtctgcgaggctaatgactttatcacaagataccaacactggcgtactgacggggactttatttgatttgatgataccctaggaaaggtggcggaacaggaatgtccgccttgtcgacacgattgacaggcgtaatgactatacctagagcccacacgcatttcatgatcagggaggagtaaagggtgcaccaggcgttagacggcgtattcaagcaagaggcgcatattaggcttccattgcttccattttcaagattccagtggatctttcattgtgtgttcatggcctgaagccatgtcaaggcgcgtggtacaagaagacttatgcgctatagcttaactgggctataaggatcatctaaaggggctttcgcatggacaatgaaacagggaggaccgcgcatagcatagcataccactcgatgttatccgaaatgcaaatcgcagttagtaaagtttgtgttgcgaatgatgtccaggtgaatattccgacgaaagtgatgaaagttgagaagtaagggacctgaattccagagacttgaggaatgttgtggcacgctgttcaagaaagcttatcgtgtttgtttttggccaatcttatcgatagagcaattgttctctgttgtgatggccgcctttcaaggagcttggaggcagcactcagaatttcaggttgatgccagacaagcagtaaaaaagtcggagcattgacgcgggacgctactatctgcttcgaagtcggagcttgtggttgatgtctaatcactgtaacaagtctgtgctcgatctgtattcactctctcctcataacgatagactttttgggggttgactccacatgaggcatagcgtggttccgacagagagcgctg

SEQ ID NO: 859 - DNA, 1104 bp, Muscodor strobelii
  misc_feature: SGI cDNA ID NO. 559866
  misc_feature: Elevated expression when VOC is produced
  misc_feature: Encodes the peptide sequence at SEQ ID NO 860
atgaagatcgaaggggcggagattttgctcccatcaaagggcattgctgaagatgtcgagttctggacatcgtctaccccagaccttggcttccgaatggatcagatctacccggccgatgatccgcaggttgccacgctctcagggcatggtctacggatccggctcgacaagggagctgccaactcaagccccagtaccgttcgcctgttatgcagcgaagccgatggatttcaggcgagtgagcttacatcgccgtctgggacacgggttgagctcgtatctgcgaaaacactcatgacacaacctcctacgaaacattcgttcattgcacgacgattgaaagacaatgcgccttgggttgtgggccgagctggcatgcagtatcgtgatcttattcctgggcgactcggcggtgctattatagcttcgcatatatgcataccggacgcgggcccagttcctgataatgtacattatcatgatgtgggttttcagcttattcactgtcacgccggctgggtacgccttgtttatgaagatcaaggggagccattcattctgaaagcaggtgactcagttattcaaccgcccaggataagacacaaggtgcttgagtcttcggctggtctgcaggttgttgaagtcggtgtcccagcagagcatatgactaccctagaccacgagatggagctaccaacgccgcatcaccgccccgatcgcgagtgggatggtcaacgctttgtgctcggtcgacaagacgattctacatggggtccatggcgcatgccaggcttcgaagctcgcgataccggtgttgaagttggtactaaaggtgttgctgctgtgcgtgtagtccgccctattgctgcggatacatatatagaggctatgacgagccacgactcggatatcttgtttacctttgtcctgtctggctcctgtacacttcatggcgagggacaaaacgccctagaattgaccgagggagacgcatacactttacctccaagcctcaaaacttccctcactaattgctcagcggacatgaatctcttagaggtttcgctacctggtcacttcaatacgacagtgcatacctag

SEQ ID NO: 860 - protein, 367 aa, Muscodor strobelii
  misc_feature: SGI Peptide ID NO. 559866
  misc_feature (159)..(217): Pfam Id: PF07883 Pfam Desc: Cupin domain
  misc_feature (6)..(365): NCBI GI: 86137398 Blast Desc: MED193_06049 [Roseobacter sp. MED193] gi|85825733|gb|EAQ45931.1| MED193_06049 [Roseobacter sp. MED193]
  misc_feature (6)..(365): NCBI GI: 126740715 Blast Desc: RSK20926_17157 [Roseobacter sp. SK209-2-6] gi|126718230|gb|EBA14946.1| RSK20926_17157 [Roseobacter sp. SK209-2-6]
  misc_feature (6)..(365): NCBI GI: 254511766 Blast Desc: cupin domain protein [Rhodobacteraceae bacterium KLH11] gi|221535477|gb|EEE38465.1| cupin domain protein [Rhodobacteraceae bacterium KLH11]
  misc_feature (6)..(365): NCBI GI: 254464421 Blast Desc: cupin domain protein [Rhodobacterales bacterium Y4I] gi|206685329|gb|EDZ45811.1| cupin domain protein [Rhodobacterales bacterium Y4I]
  misc_feature (6)..(365): NCBI GI: 56697769 Blast Desc: SPO2931 [Ruegeria pomeroyi DSS-3] gi|56679506|gb|AAV96172.1| conserved domain protein [Ruegeria pomeroyi DSS-3]
  misc_feature (6)..(365): NCBI GI: 260433028 Blast Desc: cupin domain protein [Silicibacter lacuscaerulensis ITI-1157] gi|260416856|gb|EEX10115.1| cupin domain protein [Silicibacter lacuscaerulensis ITI-1157]
  misc_feature (6)..(365): NCBI GI: 163739683 Blast Desc: RGBS107_13077 [Phaeobacter gallaeciensis BS107] gi|161387142|gb|EDQ11502.1| RGBS107_13077 [Phaeobacter gallaeciensis BS107]
  misc_feature (6)..(365): NCBI GI: 163734502 Blast Desc: cupin domain protein [Roseobacter litoralis Och 149] gi|161391995|gb|EDQ16325.1| cupin domain protein [Roseobacter litoralis Och 149]
  misc_feature (6)..(365): NCBI GI: 163743833 Blast Desc: RG210_18140 [Phaeobacter gallaeciensis 2.10] gi|161382871|gb|EDQ07268.1| RG210_18140 [Phaeobacter gallaeciensis 2.10]
  misc_feature (1)..(365): NCBI GI: 110681113 Blast Desc: cupin domain-containing protein [Roseobacter denitrificans OCh 114] gi|109457229|gb|ABG33434.1| cupin domain protein [Roseobacter denitrificans OCh 114]
  misc_feature: Useful for introducing or modulating the production of volatile compounds
MKIEGAEILLPSKGIAEDVEFWTSSTPDLGFRMDQIYPADDPQVATLSGHGLRIRLDKGAANSSPSTVRLLCSEADGFQASELTSPSGTRVELVSAKTLMTQPPTKHSFIARRLKDNAPWVVGRAGMQYRDLIPGRLGGAIIASHICIPDAGPVPDNVHYHDVGFQLIHCHAGWVRLVYEDQGEPFILKAGDSVIQPPRIRHKVLESSAGLQVVEVGVPAEHMTTLDHEMELPTPHHRPDREWDGQRFVLGRQDDSTWGPWRMPGFEARDTGVEVGTKGVAAVRVVRPIAADTYIEAMTSHDSDILFTFVLSGSCTLHGEGQNALELTEGDAYTLPPSLKTSLTNCSADMNLLEVSLPGHFNTTVHT

SEQ ID NO: 861 - DNA, 3074 bp, Muscodor strobelii
  misc_feature: SGI EST ID NO. CUFF.2383.0
  misc_feature: Variant of the nucleotide sequence at SEQ ID NO 859
caaacgagagatattcgcgatgaagatcgaaggggcggagattttgctcccatcaaagggcattgctgaagatgtcgagttctggacatcgtctaccccagaccttggcttccgaatggatcagatctacccggccgatgatccgcaggttgccacgctctcagggcatggtctacggatccggctcgacaagggagctgccaactcaagccccagtaccgttcgcctgttatgcagcgaagccgatggatttcaggcgagtgagcttacatcgccgtctgggacacgggttgagctcgtatctgcgaaaacactcatgacacaacctcctacgaaacattcgttcattgcacgacgattgaaagacaatgcgccttgggttgtgggccgagctggcatgcagtatcgtgatcttattcctgggcgactcggcggtgctattatagcttcgcatatatgcataccggacgcgggcccagttcctgataatgtacattatcatgatgtgggttttcagcttattcactgtcacgccggctgggtacgccttgtttatgaagatcaaggggagccattcattctgaaagcaggtgactcagttattcaaccgcccaggataagacacaaggtgcttgagtcttcggctggtctgcaggttgttgaagtcggtgtcccagcagagcatatgactaccctagaccacgagatggagctaccaacgccgcatcaccgccccgatcgcgagtgggatggtcaacgctttgtgctcggtcgacaagacgattctacatggggtccatggcgcatgccaggcttcgaagctcgcgataccggtgttgaagttggtactaaaggtgttgctgctgtgcgtgtagtccgccctattgctgcggatacatatatagaggctatgacgagccacgactcggatatcttgtttacctttgtcctgtctggctcctgtacacttcatggcgagggacaaaacgccctagaattgaccgagggagacgcatacactttacctccaagcctcaaaacttccctcactaattgctcagcggacatgaatctcttagaggtttcgctacctggtcacttcaatacgacagtgcatacctagaaaacgctaccgatgtagactgtcacaatggcaaaatcgatatacagttcttcgattgacacgccttctgtattcatagataggacgaggtatagcgacagcgagcttcatatggacaaatggatacaatgagatgtattagcgtttaatctacgaagctcgttcctatagagcaaaaaagctagcagccatgtttatgaaatgacgagttatgagcagccgatatcttacctcaatttacttagagacgtaatacagctctggaaaaatcaaaacgaagtaaatagcgtcgtggtaacgcgcgcttacacaattgcaacggcattcggtggactcgccacaccaccggggatatccaaaggtacactgacaaacatgaagctccagcatttcctctccttacacttctcagccaacatctcgagatcaaacgactcgcctataggcataccccacccagacagaaatacctcatgcatcgatattccacgccagtccctagggctcggccaggcttcgtaggctactgtatcaccagctactgctgcaaacccgttatcccagtgccaacgaatgctctcttcgcttgcctcgagaccaatggaggcgcggatgggacggctggctagggatgcttgttgacgcggcgtgagcttgcggtatgctgatagccagccggaacgcacgagcaggatatcaccctcgttgaaggaaacaccttgtgatttcgctactgctagtatttgggtgtggggaattgcgaatgttgaaaatgcatcatatgtgataccctgaccgtctgcccatgacgcccagtctagtaggacacccctgcctgtgatagtcttcctggccatgtctagcatggaggttagtactatggtaaataggttgtgagtgaagataatgtcttactatgaacaccaagtctattgttctttgtcgggcctgatatgtcatcttgaatcgtgccgttataatacttcattgagccttgatagggataatgccgtggtccatcccagtgacttgcaccttgggtattgatgctcaactgtagtcaatcagacttcgtactcaatcgcattccgcataactatagtgtcatactgattaaacatactgtatcatcatttgcattgcccttggctaggatagtatgctcgcatggttttcgagctgggttcataggttgaatgaaagcgtctaatgagaggcttggcgctattaggtcaagcgcaatgcgttcacgactggccgatacttacttcaaagggattgtctctcccgtgcgaacttctgatattgcctctttcacttttgcgggtgtaatgatgtttaagctgccgagctcatcgtcggatccccagaggccccatgctgagactggcggatcatcaggattaagtggcagttcgtcaaatgttggtcgcttgatacgactgctcgcgttgcccattgagatttctgtgttgattcgcaatatgaaaatacttgacttggtgtactgtacacgcacttgcattgtagatgttttgttgtacatattattacgaacgcaatggtaggcaagctaaagatagtgtgtcgcataacgtggggtgctgacggaaagataccgagattcttaggtctaccaactcggtcttgttcccgatcccctatcgcgaggtctcaggcattgttagctattccactcttttggtaagactattaagaatatcttttactcgcaaaacattttccattgctccccactgcacacatgccaagattgaactgttgcttgatgggtgtgtagtggtgcatatagtcggaattgaagttagacaatgcgcgtagggtaatgagccgactagatgacgctacctcctcgcaatgcacgcaataattcatcgctgaggcaggaatgattttcaataatcaaaccagaatcaaaatctgatgattt

SEQ ID NO: 862 - DNA, 978 bp, Muscodor strobelii
  misc_feature: SGI cDNA ID NO. 559867
  misc_feature: Encodes the peptide sequence at SEQ ID NO 863
atgggcaacgcgagcagtcgtatcaagcgaccaacatttgacgaactgccacttaatcctgatgatccgccagtctcagcatggggcctctggggatccgacgatgagctcggcagcttaaacatcattacacccgcaaaagtgaaagaggcaatatcagaagttcgcacgggagagacaatccctttgaacctctcattagacgctttcattcaacctatgaacccagctcgaaaaccatgcgagcatactatcctagccaagggcaatgcaaatgatgatacattgagcatcaatacccaaggtgcaagtcactgggatggaccacggcattatccctatcaaggctcaatgaagtattataacggcacgattcaagatgacatatcaggcccgacaaagaacaatagacttggtgttcataacatggccaggaagactatcacaggcaggggtgtcctactagactgggcgtcatgggcagacggtcagggtatcacatatgatgcattttcaacattcgcaattccccacacccaaatactagcagtagcgaaatcacaaggtgtttccttcaacgagggtgatatcctgctcgtgcgttccggctggctatcagcataccgcaagctcacgccgcgtcaacaagcatccctagccagccgtcccatccgcgcctccattggtctcgaggcaagcgaagagagcattcgttggcactgggataacgggtttgcagcagtagctggtgatacagtagcctacgaagcctggccgagccctagggactggcgtggaatatcgatgcatgaggtatttctgtctgggtggggtatgcctataggcgagtcgtttgatctcgagatgttggctgagaagtgtaaggagaggaaatgctggagcttcatgtttgtcagtgtacctttggatatccccggtggtgtggcgagtccaccgaatgccgttgcaattgtgtaa

SEQ ID NO: 863 - protein, 325 aa, Muscodor strobelii
  misc_feature: SGI Peptide ID NO. 559867
  misc_feature (4)..(324): NCBI GI: 256722061 Blast Desc: NECHADRAFT_51213 [Nectria haematococca mpVI 77-13-4]
  misc_feature (8)..(324): NCBI GI: 242780632 Blast Desc: conserved [Talaromyces stipitatus ATCC 10500] gi|218719784|gb|EED19203.1| conserved [Talaromyces stipitatus ATCC 10500]
  misc_feature (4)..(324): NCBI GI: 169777971 Blast Desc: [Aspergillus oryzae RIB40] gi|83772188|dbj|BAE62318.1| protein product [Aspergillus oryzae]
  misc_feature (10)..(325): NCBI GI: 256728252 Blast Desc: [Nectria haematococca mpVI 77-13-4]
  misc_feature (10)..(325): NCBI GI: 46120344 Blast Desc: FG04819.1 [Gibberella zeae PH-1]
  misc_feature (11)..(316): NCBI GI: 240110147 Blast Desc: CPC735_061790 [Coccidioides posadasii C735 delta SOWgp]
  misc_feature (9)..(325): NCBI GI: 145231226 Blast Desc: An01g14890 [Aspergillus niger] gi|134056008|emb|CAK37443.1| protein product [Aspergillus niger]
  misc_feature (11)..(316): NCBI GI: 258577769 Blast Desc: conserved [Uncinocarpus reesii 1704] gi|237903332|gb|EEP77733.1| conserved [Uncinocarpus reesii 1704]
  misc_feature (5)..(325): NCBI GI: 169624276 Blast Desc: SNOG_15394 [Phaeosphaeria nodorum SN15] gi|111056207|gb|EAT77327.1| SNOG_15394 [Phaeosphaeria nodorum SN15]
  misc_feature (11)..(325): NCBI GI: 134105967 Blast Desc: CNBA0010 [Cryptococcus neoformans var. neoformans B-3501A] gi|50260697|gb|EAL23347.1| CNBA0010 [Cryptococcus neoformans var. neoformans B-3501A]
MGNASSRIKRPTFDELPLNPDDPPVSAWGLWGSDDELGSLNIITPAKVKEAISEVRTGETIPLNLSLDAFIQPMNPARKPCEHTILAKGNANDDTLSINTQGASHWDGPRHYPYQGSMKYYNGTIQDDISGPTKNNRLGVHNMARKTITGRGVLLDWASWADGQGITYDAFSTFAIPHTQILAVAKSQGVSFNEGDILLVRSGWLSAYRKLTPRQQASLASRPIRASIGLEASEESIRWHWDNGFAAVAGDTVAYEAWPSPRDWRGISMHEVFLSGWGMPIGESFDLEMLAEKCKERKCWSFMFVSVPLDIPGGVASPPNAVAIV

SEQ ID NO: 864 - DNA, 2976 bp, Muscodor strobelii
  misc_feature: SGI EST ID NO. CUFF.2384.1
  misc_feature: Variant of the nucleotide sequence at SEQ ID NO 862
aaatcatcagattttgattctggtttgattattgaaaatcattcctgcctcagcgatgaattattgcgtgcattgcgaggaggtagcgtcatctagtcggctcattaccctacgcgcattgtctaacttcaattccgactatatgcaccactacacacccatcaagcaacagttcaatcttggcatgtgtgcagtggggagcaatggaaaatgttttgcgagtaaaagatattcttaatagtcttaccaaaagagtggaatagctaacaatgcctgagacctcgcgataggggatcgggaacaagaccgagttggtagacctaagaatctcggtatctttccgtcagcaccccacgttatgcgacacactatctttagcttgcctaccattgcgttcgtaataatatgtacaacaaaacatctacaatgcaagtgcgtgtacagtacaccaagtcaagtattttcatattgcgaatcaacacagaaatctcaatgggcaacgcgagcagtcgtatcaagcgaccaacatttgacgaactgccacttaatcctgatgatccgccagtctcagcatggggcctctggggatccgacgatgagctcggcagcttaaacatcattacacccgcaaaagtgaaagaggcaatatcagaagttcgcacgggagagacaatccctttgaacctctcattagacgctttcattcaacctatgaacccagctcgaaaaccatgcgagcatactatcctagccaagggcaatgcaaatgatgatacattgagcatcaatacccaaggtgcaagtcactgggatggaccacggcattatccctatcaaggctcaatgaagtattataacggcacgattcaagatgacatatcaggcccgacaaagaacaatagacttggtgttcataacatggccaggaagactatcacaggcaggggtgtcctactagactgggcgtcatgggcagacggtcagggtatcacatatgatgcattttcaacattcgcaattccccacacccaaatactagcagtagcgaaatcacaaggtgtttccttcaacgagggtgatatcctgctcgtgcgttccggctggctatcagcataccgcaagctcacgccgcgtcaacaagcatccctagccagccgtcccatccgcgcctccattggtctcgaggcaagcgaagagagcattcgttggcactgggataacgggtttgcagcagtagctggtgatacagtagcctacgaagcctggccgagccctagggactggcgtggaatatcgatgcatgaggtatttctgtctgggtggggtatgcctataggcgagtcgtttgatctcgagatgttggctgagaagtgtaaggagaggaaatgctggagcttcatgtttgtcagtgtacctttggatatccccggtggtgtggcgagtccaccgaatgccgttgcaattgtgtaagcgcgcgttaccacgacgctatttacttcgttttgatttttccagagctgtattacgtctctaagtaaattgaggtaagatatcggctgctcataactcgtcatttcataaacatggctgctagcttttttgctctataggaacgagcttcgtagattaaacgctaatacatctcattgtatccatttgtccatatgaagctcgctgtcgctatacctcgtcctatctatgaatacagaaggcgtgtcaatcgaagaactgtatatcgattttgccattgtgacagtctacatcggtagcgttttctaggtatgcactgtcgtattgaagtgaccaggtagcgaaacctctaagagattcatgtccgctgagcaattagtgagggaagttttgaggcttggaggtaaagtgtatgcgtctccctcggtcaattctagggcgttttgtccctcgccatgaagtgtacaggagccagacaggacaactatcaaaatcagtagtatgctcatgacatagcaaagtgagtaagaaatccagcaacacattttgtaagagagcttacaggtaaacaagatatccgagtcgtggctcgtcatagcctctatatatgtatccgcagcaatagggcggactacacgcacagcagcaacacctttagtaccaacttcaacaccggtatcgcgagcttcgaagcctggcatgcgccatggaccccatgtagaatcgtcttgtcgaccgagcacaaagcgttgaccatcccactcgcgatcggggcggtgatgcggcgttggtagctccatctcgtggtctagggtagtcatatgctctgctgggacaccgacttcaacaacctgcagaccagccgaagactcaagcaccttgtgtcttatcctgggcggttgaataactgagtcacctgctttcagaatgaatggctccccttgatcttcataaacaaggcgtacccagccggcgtgacagtgaataagctgaaaacccacatcatgataatgtacattatcaggaactgggcccgcgtccggtatgcatatatgcgaagctataatagcaccgccgagtcgcccaggaataagatcacgatactgcatgccagctcggcccacaacccaaggcgcattgtctttcaatcgtcgtgcaatgaacgaatgtttcgtaggaggttgtgtcatgagtgttttcgcagatacgagctcaacccgtgtcccagacggcgatgtaagctcactcgcctgaaatccatcggcttcgctgcataacaggcgaacggtactggggcttgagttggcagctcccttgtcgagccggatccgtagaccatgccctgagagcgtggcaacctgcggatcatcggccgggtagatctgatccattcggaagccaaggtctggggtagacgatgtccagaactcgacatcttcagcaatgccctttgatgggagcaaaatctccgccccttcgatcttcatcgcgaatatctctcgtttg

SEQ ID NO: 865 - DNA, 1494 bp, Muscodor strobelii
  misc_feature: SGI cDNA ID NO. 559868
  misc_feature: Encodes the peptide sequence at SEQ ID NO 866
atgacgcccgaagccgccgcggagaagagtgactccttccacatggaaggcaaagtcaacgatcaggatgatggagctgttgatgaattgggtaaggaagaggctggcccggctaccacctggacatcagaggaagaaaagttagcgctgcgacatctggattggagtctaatccctctggtcgccgccatgaacttgtgctcgtttcttgaccgcggaaatatcggcaacgcgtatgcggctggcatgggaaaagaatggagaatcacgtctgcagactactcctgggctatcacgatcctttacattgcctacatctcatttcaatggttcacgatcatctggactttaatcccaccgcacatatggactacactcatgctcttcggttggggctcagcaagtatcttacagtctgtagcgactaatcaggcaacactacttgctttgcgattcctgattggatttttcgaggccggattcataccgccggttgcattgtacttatcattcttttatcatcggaatgagatggggcttcgatacggtctttttatatctgctgcgcccctagctagtaccttcgcatctgctctggcatatggtatcgttcacgcaaagacctccgttgcaaactggaagttacttttcatcatagagggaattcccacaattattgttgcatctgttgcattcttttacttacctccatcgccctcccaatgtcgattcctcacaccaagggaaaacgagattattagtcaacgggcaatcaagggacgcggagaaaagcctcagactggcatcaatttcaagcaggttttagctgccttcaaagacccgacgaactacttgcaagccgccatcattttttccattaatacagcatacggctcattcccggcataccttccgactattcttagcgaaatagggtttagcgctctgaactctcagggtctgtcagcaggtccctatcttcttgcattttttctttgtgtttcatttagtattatctcagatcgcatgaagagtagagggatcttcctcattgtctgcttgattgtaggttccgttggctacgtgctgcttgcaacggttcacacaacggcagtgcgctactttgcgtgtttcgtggtcgcaggtggacttttcccagccgtcgctctcacgttcgcctgggtgacagataatcaaggctctgcttccaagcgtggcgctgggctcactatcttcggctcattaggccaaactgggcccattttgggggcgcggctcttccctgaatctgagtccccgtactacattagagggatggccgtctgtgcgggcattttgttcggtgcagcacttatagcggcggtgcttaccgttacgtatcgtgtaaagaacaagcgtcgggatgagaagtttgggaaaagcgatcttgacttcattcctgtagatgtagcagacctcggagatgctcatcctatgtaccgctacgtcgtttga

SEQ ID NO: 866 - protein, 497 aa, Muscodor strobelii
  misc_feature: SGI Peptide ID NO. 559868
  misc_feature (61)..(424): Pfam Id: PF07690 Pfam Desc: Major Facilitator Superfamily
  misc_feature (20)..(497): NCBI GI: 256722060 Blast Desc: NECHADRAFT_51188 [Nectria haematococca mpVI 77-13-4]
  misc_feature (16)..(497): NCBI GI: 169777969 Blast Desc: [Aspergillus oryzae RIB40] gi|83772187|dbj|BAE62317.1| protein product [Aspergillus oryzae]
  misc_feature (64)..(497): NCBI GI: 242780618 Blast Desc: allantoate permease, [Talaromyces stipitatus ATCC 10500] gi|218719781|gb|EED19200.1| allantoate permease, [Talaromyces stipitatus ATCC 10500]
  misc_feature (66)..(497): NCBI GI: 238495212 Blast Desc: pantothenate transporter, [Aspergillus flavus NRRL3357] gi|220695492|gb|EED51835.1| pantothenate transporter, [Aspergillus flavus NRRL3357]
  misc_feature (127)..(497): NCBI GI: 242780613 Blast Desc: allantoate permease, [Talaromyces stipitatus ATCC 10500] gi|242780627|ref|XP_002479636.1| allantoate permease, [Talaromyces stipitatus ATCC 10500] gi|218719780|gb|EED19199.1|
  misc_feature (46)..(472): NCBI GI: 189211381 Blast Desc: pantothenate transporter liz1 [Pyrenophora tritici-repentis Pt-1C-BFP] gi|187978114|gb|EDU44740.1| pantothenate transporter liz1 [Pyrenophora tritici-repentis
  misc_feature (32)..(472): NCBI GI: 169599515 Blast Desc: SNOG_02577 [Phaeosphaeria nodorum SN15] gi|111068188|gb|EAT89308.1| SNOG_02577 [Phaeosphaeria nodorum SN15]
  misc_feature (41)..(468): NCBI GI: 71003165 Blast Desc: UM00116.1 [Ustilago maydis 521] gi|46096268|gb|EAK81501.1| UM00116.1 [Ustilago maydis 521]
  misc_feature (75)..(497): NCBI GI: 156045229 Blast Desc: SS1G_09803 [Sclerotinia sclerotiorum 1980] gi|154694198|gb|EDN93936.1| SS1G_09803 [Sclerotinia sclerotiorum 1980]
  misc_feature (44)..(497): NCBI GI: 255948086 Blast Desc: Pc22g07940 [Penicillium chrysogenum Wisconsin 54-1255] gi|211591827|emb|CAP98082.1| Pc22g07940 [Penicillium chrysogenum Wisconsin 54-1255]
MTPEAAAEKSDSFHMEGKVNDQDDGAVDELGKEEAGPATTWTSEEEKLALRHLDWSLIPLVAAMNLCSFLDRGNIGNAYAAGMGKEWRITSADYSWAITILYIAYISFQWFTIIWTLIPPHIWTTLMLFGWGSASILQSVATNQATLLALRFLIGFFEAGFIPPVALYLSFFYHRNEMGLRYGLFISAAPLASTFASALAYGIVHAKTSVANWKLLFIIEGIPTIIVASVAFFYLPPSPSQCRFLTPRENEIISQRAIKGRGEKPQTGINFKQVLAAFKDPTNYLQAAIIFSINTAYGSFPAYLPTILSEIGFSALNSQGLSAGPYLLAFFLCVSFSIISDRMKSRGIFLIVCLIVGSVGYVLLATVHTTAVRYFACFVVAGGLFPAVALTFAWVTDNQGSASKRGAGLTIFGSLGQTGPILGARLFPESESPYYIRGMAVCAGILFGAALIAAVLTVTYRVKNKRRDEKFGKSDLDFIPVDVADLGDAHPMYRYVV

SEQ ID NO: 867 - DNA, 925 bp, Muscodor strobelii
  misc_feature: SGI EST ID NO. CUFF.2359.0
  misc_feature: Variant of the nucleotide sequence at SEQ ID NO 865
gcgacatgcatattccccaggctttctccgcaggtaacatgaatatgggggccatatgagaatcgaattggctgggctggagaatcgtcattataaaatgagatcgccgagttccgtatacacataaacatgtcagattctttcgttgaccttccaaggtctgactctctaccacatacatgcatcttaacattcatcaagacctaaacatgacgcccgaagccgccgcggagaagagtgactccttccacatggaaggcaaagtcaacgatcaggatgatggagctgttgatgaattgggtaaggaagaggctggcccggctaccacctggacatcagaggaagaaaagttagcgctgcgacatctggattggagtctaatccctctgtgagtattcttaataattttatgactctcgtattatatgatttaactttgttaaattggtccatctttcaacgttcaaatcggtcgcacaaggcaacgaatgtaaggtcgccgccatgaacttgtgctcgtttcttgaccgcggaaatatcggcaacgcgtatgcggctggcatgggaaaagaatggagaatcacgtctgcagactactcctgggctatcacgatcctttacattgcctacatctcatttcaatggttcacgatcatctggactttaatcccaccgcacatatggactacactcatgctcttcggttggggctcagcaagtatcttacagtctgtagcgactaatcaggcaacactacttgctttgcgattcctgattggatttttcgaggccggattcataccgccggttgcattgtacttatcattcttttatcatcggaatgagatggggcttcgatacggtctttttatatctgctgcgcccctagctagtaccttcgcatctgctctggcatatggtatcg

SEQ ID NO: 868 - DNA, 3294 bp, Muscodor strobelii
  misc_feature: SGI cDNA ID NO. 559869
  misc_feature: Encodes the peptide sequence at SEQ ID NO 869
atggcatctcccaatgcatcctcttcagaggctgagttcaacattcttacgcccaatgccatgctaggttacggctataagccggagcatttctggtatggcatcaagaagtaccggcccgccgctatcatcgtcgacagtggttcaacagatggcggtccatataagctcggtatgaacaagatgacatgtgggcgtcagtcctacattcgagatttagagccaatgctagcagcatgctttcactaccgtgtaaaggtcttgatcagctcggttggtggcgatggaagcaccaagcatgttgctgagatgcttgacatagtctcgaaaatcgtcaaagaaaaaggatacagctttaaaattgctaccattgatgcagggatgaatcgcgacctgatcaagaggcgcattggtgcaggtaaagtctgcccttgcggtcccgtggagccgcttctgccggaagtagttgatggtgccgtagacgtcgtctcacagatgggagctgagccatatttggaggccttgaaaggagaccccgacattatcctgggaggtcgatcgtatgaccctgctcccttcgcagcattctgtctttcaaagggtgtgcaagatggtgtcgcctggcatatgggaaagataatggaatgcggtggaatatgcgcagttcccaaaggacgctctatgatcgcgacaattcgaaaggactcattcgatctaacaccgctctcacctgaagaacggtgcacgcccttatcagtcgctgctcacacattatacgagaagacaagacccgatagacttccagggcccggcggtgtgctgaatcttgatactgcacattacgagcagaccactgagaagacgtgcagaatttcgggagcgaaatttgagaaaaagccatatcaaattaagctcgagggtgttactttcttgggatatcgtaccatcttcatcggtggtattcgagaccctattctgatcagtcagattgatgacttcttagaaagagtgcgtgtgtacactcaaaagctgttccccgacttagatcaatcggagaagtgccgcctcatctatcatgtctatggcaaaaatggtgttatggggcctcttgagtcaactatcggaagcccccatgaaatcgctgtgttaggagaggtggttgctccgactcaggaaatgtctcatactatcgctaacaatgcccgcgcctcaattctacacttcccttacgaaggccaaatggcgacaacaggcaatttcgctagccctctttcaccgcatgaacaagaggctgggcaagtctttaaatttagcttatatcatcttgtcgatctagaagctggcgaagaggtctcgctgttccccgtcacgtttcacaacatcgaatcaagctcatcgcccacagttgcagagacgatcagcgacgaagcatacacggaacttgataatggaatactcgctaccttgactcaaaagccgataccagatggagcaggcaaattaagccagttcgcgcgcattatccgctctaaaaactctggcccctttgagctcacgttggatgtgatgttcgatagtgaaatcgcttacaatcgggtcaaggaggcaaatgttctcactaatgatgttatcaaaaagctttaccgtgtcgaggagtctgacattctgaccaacatgtactttgatccggcactggcatggaaatgtactatcaagcgaatgtgggcgcaaggaagtgttggcgagcgtgacacccttgggactcagcagcatgcgccactattagatattgatgtaccagcaaacggatctggtaagcaggcgacccaagtagccggcgactccggcccggcccctgatcgacaacggcatcttgccgcagatgttgtaaaagagatctggacagatctgggcctgccaagcgcggctttgtcttctctttcgttgccaggagaaaccgagaagcctgttctaccctcgtcatacaagatgggtgtcttagcgcaaggcactattgctctatctgctctcgccgcagctcaagtctatgcagaacgtaatagctctactgtgtcccgtgtcgaggtagatatcacacattccgtggtagagtataagtcggagagattgtataggctagatgggaaacctcccgtatctccgtggggttctgttggtggactgcacaaaactgcggatggatatgtcaggatgcacgactcattcccgaatcacgcacatggtgctctcgagctactgggactgccactagatgcaacacgtgcagacgtctcgaaacaaacaggcgactggtcaagtatagatcttgagaccgtcggtgttctcgagaagaatctggctatctacgctcttcgatcttatcggcagtgggatagactgcctcaatcaaaagcactcagcaacaaacccatactcattgaaaaagtcgcatctgcggctgctgggttacctccaaccttgaaaggaagcgctgatagatgcctccgcggactacgcgtagttgagatgagtcgcgtgattgcggcgcctcttgctgggaagacattagcagcacatggtgccgatgtgctgtggataaccagcccaagtcttcctgatatcccaagtatcgatcgtgatcttgcgcgaggcaagagaactgtccagcttgacatcaagaaagctggtgatcttgcctgcctcaaagaactcatcaagaccgcagacgtcttcatccaaggcttccggcctagcagtcttgctggccaagggctttcatctgaagagatcagacatctcaacccccgcatcattattgcgaatatgtctgcgttcggtccaactggcgcttggtctggccgtcgtggttttgactcgctagttcaaacctgcagtggcatgaatgtatcagaagctgagcactacggcgctggtgaagctgcaagaccgacgccttgccaagcgctcgatcacgcaggcggatattttcttgcaacaggtgtcatcgctgctctgtacagacaagctgttgagggtggatcttggcaagtgaacgtgtcgctagccggaacaatgaaatatttgcggtctctaggtcagtatcctgggaagattggcttcgagagtcgggattacgagaaggcagaagatgttgaagaatacttagaagcgcgcgacagcgggttcggtcgcatggaagctgtcagacatagcgcgaagattgaaggttgccaaccagggtgggacataatgccgaaacctctaggcagcgatgagccgagatggcttaattaa

SEQ ID NO: 869 - protein, 1097 aa, Muscodor strobelii
  misc_feature: SGI Peptide ID NO. 559869
  misc_feature (888)..(1096): Pfam Id: PF02515 Pfam Desc: CoA-transferase family III
  misc_feature (888)..(1007): Pfam Id: PF02515 Pfam Desc: CoA-transferase family III
  misc_feature (12)..(1096): NCBI GI: 256722026 Blast Desc: NECHADRAFT_97034 [Nectria haematococca mpVI 77-13-4]
  misc_feature (11)..(1038): NCBI GI: 242780637 Blast Desc: beta-N-acetylglucosaminidase, [Talaromyces stipitatus ATCC 10500] gi|218719785|gb|EED19204.1| beta-N-acetylglucosaminidase, [Talaromyces stipitatus ATCC 10500]
  misc_feature (198)..(1096): NCBI GI: 238495220 Blast Desc: CAIB/BAIF family enzyme [Aspergillus flavus NRRL3357] gi|220695496|gb|EED51839.1| CAIB/BAIF family enzyme [Aspergillus flavus NRRL3357]
  misc_feature (198)..(1096): NCBI GI: 169777975 Blast Desc: [Aspergillus oryzae RIB40] gi|83772190|dbj|BAE62320.1| protein product [Aspergillus oryzae]
  misc_feature (620)..(1095): NCBI GI: 46139285 Blast Desc: FG11157.1 [Gibberella zeae PH-1]
  misc_feature (628)..(1096): NCBI GI: 145245439 Blast Desc: An11g10300 [Aspergillus niger] gi|134079687|emb|CAK97113.1| protein product [Aspergillus niger]
  misc_feature (614)..(1096): NCBI GI: 70999958 Blast Desc: CAIB/BAIF family enzyme [Aspergillus fumigatus Af293] gi|66852333|gb|EAL92658.1| CAIB/BAIF family enzyme [Aspergillus fumigatus Af293] gi|159127704|gb|EDP52819.1| CAIB/BAIF family
  misc_feature (620)..(1096): NCBI GI: 169767550 Blast Desc: [Aspergillus oryzae RIB40] gi|83766101|dbj|BAE56244.1| protein product [Aspergillus oryzae]
  misc_feature (614)..(1096): NCBI GI: 119492049 Blast Desc: CAIB/BAIF family enzyme [Neosartorya fischeri NRRL 181] gi|119411679|gb|EAW21622.1| CAIB/BAIF family enzyme [Neosartorya fischeri NRRL 181]
  misc_feature (620)..(1096): NCBI GI: 169621353 Blast Desc: SNOG_13886 [Phaeosphaeria nodorum SN15] gi|111057790|gb|EAT78910.1| SNOG_13886 [Phaeosphaeria nodorum SN15]
MASPNASSSEAEFNILTPNAMLGYGYKPEHFWYGIKKYRPAAIIVDSGSTDGGPYKLGMNKMTCGRQSYIRDLEPMLAACFHYRVKVLISSVGGDGSTKHVAEMLDIVSKIVKEKGYSFKIATIDAGMNRDLIKRRIGAGKVCPCGPVEPLLPEVVDGAVDVVSQMGAEPYLEALKGDPDIILGGRSYDPAPFAAFCLSKGVQDGVAWHMGKIMECGGICAVPKGRSMIATIRKDSFDLTPLSPEERCTPLSVAAHTLYEKTRPDRLPGPGGVLNLDTAHYEQTTEKTCRISGAKFEKKPYQIKLEGVTFLGYRTIFIGGIRDPILISQIDDFLERVRVYTQKLFPDLDQSEKCRLIYHVYGKNGVMGPLESTIGSPHEIAVLGEVVAPTQEMSHTIANNARASILHFPYEGQMATTGNFASPLSPHEQEAGQVFKFSLYHLVDLEAGEEVSLFPVTFHNIESSSSPTVAETISDEAYTELDNGILATLTQKPIPDGAGKLSQFARIIRSKNSGPFELTLDVMFDSEIAYNRVKEANVLTNDVIKKLYRVEESDILTNMYFDPALAWKCTIKRMWAQGSVGERDTLGTQQHAPLLDIDVPANGSGKQATQVAGDSGPAPDRQRHLAADVVKEIWTDLGLPSAALSSLSLPGETEKPVLPSSYKMGVLAQGTIALSALAAAQVYAERNSSTVSRVEVDITHSVVEYKSERLYRLDGKPPVSPWGSVGGLHKTADGYVRMHDSFPNHAHGALELLGLPLDATRADVSKQTGDWSSIDLETVGVLEKNLAIYALRSYRQWDRLPQSKALSNKPILIEKVASAAAGLPPTLKGSADRCLRGLRVVEMSRVIAAPLAGKTLAAHGADVLWITSPSLPDIPSIDRDLARGKRTVQLDIKKAGDLACLKELIKTADVFIQGFRPSSLAGQGLSSEEIRHLNPRIIIANMSAFGPTGAWSGRRGFDSLVQTCSGMNVSEAEHYGAGEAARPTPCQALDHAGGYFLATGVIAALYRQAVEGGSWQVNVSLAGTMKYLRSLGQYPGKIGFESRDYEKAEDVEEYLEARDSGFGRMEAVRHSAKIEGCQPGWDIMPKPLGSDEPRWLN

SEQ ID NO: 870 - DNA, 1845 bp, Muscodor strobelii
  misc_feature: SGI EST ID NO. CUFF.2364.0
  misc_feature: Variant of the nucleotide sequence at SEQ ID NO 868
agaaagagtgcgtgtgtacactcaaaagctgttccccgacttagatcaatcggagaagtgccgcctcatctatcatgtctatggcaaaaatggtgttatggggcctcttgagtcaactatcggaagcccccatgaaatcgctgtgttaggagaggtggttgctccgactcaggaaatgtctcatactatcgctaacaatgcccgcgcctcaattctacacttcccttacgaaggccaaatggcgacaacaggcaatttcgctagccctctttcaccgcatgaacaagaggctgggcaagtctttaaatttagcttatatcatcttgtcgatctagaagctggcgaagaggtctcgctgttccccgtcacgtttcacaacatcgaatcaagctcatcgcccacagttgcagagacgatcagcgacgaagcatacacggaacttgataatggaatactcgctaccttgactcaaaagccgataccagatggagcaggcaaattaagccagttcgcgcgcattatccgctctaaaaactctggcccctttgagctcacgttggatgtgatgttcgatagtgaaatcgcttacaatcgggtcaaggaggcaaatgttctcactaatgatgttatcaaaaagctttaccgtgtcgaggagtctgacattctgaccaacatgtactttgatccggcactggcatggaaatgtactatcaagcgaatgtgggcgcaaggaagtgttggcgagcgtgacacccttgggactcagcagcatgcgccactattagatattgatgtaccagcaaacggatctggtaagcaggcgacccaagtagccggcgactccggcccggcccctgatcgacaacggcatcttgccgcagatgttgtaaaagagatctggacagatctgggcctgccaagcgcggctttgtcttctctttcgttgccaggagaaaccgagaagcctgttctaccctcgtcatacaagatgggtgtcttagcgcaaggcactattgctctatctgctctcgccgcagctcaagtctatgcagaacgtaatagctctactgtgtcccgtgtcgaggtagatatcacacattccgtggtagagtataagtcggagagattgtataggctagatgggaaacctcccgtatctccgtggggttctgttggtggactgcacaaaactgcggatggatatgtcaggatgcacgactcattcccgaatcacgcacatggtgctctcgagctactgggactgccactagatgcaacacgtgcagacgtctcgaaacaaacaggcgactggtcaagtatagatcttgagaccgtcggtgttctcgagaagaatctggctatctacgctcttcgatcttatcggcagtgggatagactgcctcaatcaaaagcactcagcaacaaacccatactcattgaaaaagtcgcatctgcggctgctgggttacctccaaccttgaaaggaagcgctgatagatgcctccgcggactacgcgtagttgagatgagtcgcgtgattgcggcgcctcttgctgggaagacattagcagcacatggtgccgatgtgctgtggataaccagcccaagtcttcctgatatcccaagtatcgatcgtgatcttgcgcgaggcaagagaactgtccagcttgacatcaagaaagctggtgatcttgcctgcctcaaagaactcatcaagaccgcagacgtcttcatccaaggcttccggcctagcagtcttgctggccaagggctttcatctgaagagatcagacatctcaacccccgcatcattattgcgaatatgtctgcgttcggtccaactgg

SEQ ID NO: 871 - DNA, 1539 bp, Muscodor strobelii
  misc_feature: SGI cDNA ID NO. 559870
  misc_feature: Encodes the peptide sequence at SEQ ID NO 872
atggtctccagaccgagcttagaagggattgacaatgccacctgtacagctctacttgatgtgttttggacgtggatccaaccgttgcacaattgggtgtatcgaccttgcttcctaatcgacatggcgcttggcgggccacactattctgacttcttgctcatgtgcatgctcgcacattcggcacgaaaggtgacagaaagagatatggggattgacggcttgctaaagggtgaacactatttggcccgagccaaggagctgctactagaggagatgtctgcaccaaagcctcgcattccaactatacaagggctgctgatcttaggaggccgtcaatgcgccatagggaaaagctcggaaggttggttgtatactggcatggcaattaggatgcttatggacattgggctccatctctatctcgagaacccgaggcttgcggaacttgaaaatctcacacccgtcgaacttgaagtgcgaaagcgattgtacaactctgcttatgtatgggacaagacgatcagtctcgcattgggtcggccacccgtgcttctgtcgcggccctattcaaattcatatatacttgacgatcgcgacaatcttcaaatgtggatgccggtgcatgcacctgaaataacacagcgatacaacccgacccctttctataacaccttagtattctgtgcacacagtcaactgcatgagataacaagcgaaatgatgctactattcgcaaacggctcaaacgtaaacgtctcctctaacgagatccacgcaataggagcgaaattcgcttcttggtttgcaaatctacctgaagaaattaagatatcagatcccttgtctatgatccaaagcccgcctcctcatgtcgtctctatcaacctcatataccacgccctcaacatccttctccaccgcccccaactacactccctaaacacgagcgttcaagaaaaaagctcaaagatctgtacatcccactccaaacacattcacgacatcttctgcctatacagcaagacctttccccatcgcatgatgacttaccaagtcagttattgtatatttactgctgcgacagtcgaagtcgacgagatgacgaggatggacgaggaagccgccacgcaggcagcgcaaagactaggcatagcaatccgtgccctagacgatgaaagcaaaaacactccgtcaataggacggagtctagataccatccgacgacaactagcaaccagggtttcgaactcgaaaccctccacacagccaactccaagaggcgaggggtcaagcaacgaactccagccgaccttgccatctttcacagaaaacaacaacacagccgagcgctcaagtttcgtagacacggtattaagtcgagacgatacggcgccggaaacaccgctattcaatccatcttctactacgctagaggacatgagtggctttagcagaattgatacgaatgctgggttccatccagacgcgtttccttggaggttatgggataatcctgatcagttttggaacctgtaa

SEQ ID NO: 872 - protein, 512 aa, Muscodor strobelii
  misc_feature: SGI Peptide ID NO. 559870
  misc_feature (99)..(199): Pfam Id: PF04082 Pfam Desc: Fungal specific transcription factor domain
  misc_feature (99)..(185): Pfam Id: PF04082 Pfam Desc: Fungal specific transcription factor domain
  misc_feature (9)..(502): NCBI GI: 256722058 Blast Desc: NECHADRAFT_86172 [Nectria haematococca mpVI 77-13-4]
  misc_feature (42)..(497): NCBI GI: 238495208 Blast Desc: nitrogen assimilation transcription factor nirA, [Aspergillus flavus NRRL3357] gi|220695490|gb|EED51833.1| nitrogen assimilation transcription factor nirA, [Aspergillus
  misc_feature (5)..(426): NCBI GI: 169597893 Blast Desc: SNOG_01738 [Phaeosphaeria nodorum SN15] gi|160707613|gb|EAT91387.2| SNOG_01738 [Phaeosphaeria nodorum SN15]
  misc_feature (18)..(411): NCBI GI: 145230413 Blast Desc: An01g10980 [Aspergillus niger] gi|134055632|emb|CAK37278.1| protein product [Aspergillus niger]
  misc_feature (18)..(451): NCBI GI: 259488775 Blast Desc: TPA: Zn(II)2Cys6 transcription factor (Eurofung) [Aspergillus nidulans FGSC A4]
  misc_feature (18)..(451): NCBI GI: 67517328 Blast Desc: AN0937.2 [Aspergillus nidulans FGSC A4] gi|40746810|gb|EAA65966.1| AN0937.2 [Aspergillus nidulans FGSC A4]
  misc_feature (18)..(411): NCBI GI: 238484019 Blast Desc: C6 transcription factor, [Aspergillus flavus NRRL3357] gi|220701298|gb|EED57636.1| C6 transcription factor, [Aspergillus flavus NRRL3357]
  misc_feature (18)..(433): NCBI GI: 115397537 Blast Desc: conserved [Aspergillus terreus NIH2624] gi|114192551|gb|EAU34251.1| conserved [Aspergillus terreus NIH2624]
  misc_feature (5)..(183): NCBI GI: 242780608 Blast Desc: CHA4 activatory protein, [Talaromyces stipitatus ATCC 10500] gi|218719779|gb|EED19198.1| CHA4 activatory protein, [Talaromyces stipitatus ATCC 10500]
  misc_feature (18)..(431): NCBI GI: 119186089 Blast Desc: CIMG_03092 [Coccidioides immitis RS]
MVSRPSLEGIDNATCTALLDVFWTWIQPLHNWVYRPCFLIDMALGGPHYSDFLLMCMLAHSARKVTERDMGIDGLLKGEHYLARAKELLLEEMSAPKPRIPTIQGLLILGGRQCAIGKSSEGWLYTGMAIRMLMDIGLHLYLENPRLAELENLTPVELEVRKRLYNSAYVWDKTISLALGRPPVLLSRPYSNSYILDDRDNLQMWMPVHAPEITQRYNPTPFYNTLVFCAHSQLHEITSEMMLLFANGSNVNVSSNEIHAIGAKFASWFANLPEEIKISDPLSMIQSPPPHVVSINLIYHALNILLHRPQLHSLNTSVQEKSSKICTSHSKHIHDIFCLYSKTFPHRMMTYQVSYCIFTAATVEVDEMTRMDEEAATQAAQRLGIAIRALDDESKNTPSIGRSLDTIRRQLATRVSNSKPSTQPTPRGEGSSNELQPTLPSFTENNNTAERSSFVDTVLSRDDTAPETPLFNPSSTTLEDMSGFSRIDTNAGFHPDAFPWRLWDNPDQFWNL

SEQ ID NO: 873 - DNA, 3828 bp, Muscodor strobelii
  misc_feature: SGI EST ID NO. CUFF.2373.0
  misc_feature: Variant of the nucleotide sequence at SEQ ID NO 871
cccattgatggtctccagaccgagcttagaagggattgacaatgccacctgtacagctctacttgatgtgttttggacgtggatccaaccgttgcacaattgggtgtatcgaccttgcttcctaatcgacatggcgcttggcgggccacactattctgacttcttgctcatgtgcatgctcgcacattcggcacgaaaggtgacagaaagagatatggggattgacggcttgctaaagggtgaacactatttggcccgagccaaggagctgctactagaggagatgtctgcaccaaagcctcgcattccaactatacaagggctgctgatcttaggaggccgtcaatgcgccatagggaaaagctcggaaggttggttgtatactggcatggtatgcctatcttgctctctacgaggtcgaggcatatactgataatctgagtaaggcaattaggatgcttatggacattgggctccatctctatctcgagaacccgaggcttgcggaacttgaaaatctcacacccgtcgaacttgaagtgcgaaagcgattgtacaactctgcttatgtatgggacaagacgatcagtctcgcattgggtcggccacccgtgcttctgtcgcggccctattcaaattcatatatacttgacgatcgcgacaatcttcaaatgtggatgccggtgcatgcacctgaaataacacagcgatacaacccgacccctttctataacaccttagtattctgtgcacacagtcaactgcatgagataacaagcgaaatgatgctactattcgcaaacggctcaaacgtaaacgtctcctctaacgagatccacgcaataggagcgaaattcgcttcttggtttgcaaatctacctgaagaaattaagatatcagatcccttgtctatgatccaaagcccgcctcctcatgtcgtctctatcaacctcatataccacgccctcaacatccttctccaccgcccccaactacactccctaaacacgagcgttcaagaaaaaagctcaaagatctgtacatcccactccaaacacattcacgacatcttctgcctatacagcaagacctttccccatcgcatgatgacttaccaagtcagttattgtatatttactgctgcgacagtcgaagtcgacgagatgacgaggatggacgaggaagccgccacgcaggcagcgcaaagactaggcatagcaatccgtgccctagacgatgaaagcaaaaacactccgtcaataggacggagtctagataccatccgacgacaactagcaaccagggtttcgaactcgaaaccctccacacagccaactccaagaggcgaggggtcaagcaacgaactccagccgaccttgccatctttcacagaaaacaacaacacagccgagcgctcaagtttcgtagacacggtattaagtcgagacgatacggcgccggaaacaccgctattcaatccatcttctactacgctagaggacatgagtggctttagcagaattgatacgaatgctgggttccatccagacgcgtttccttggaggttatgggataatcctgatcagttttggaacctgtaagaccttagtcgtggctttgggatgcaggcacgtagtgcaatgtgcaatgcgatatacaatgtgttatcaacatgctaggtatttgcaatgcaatgcaaaatgcgatgcattgaactacggcagcttgtactcttgctaaccagtacgccgtatgtaatgatttacgccactttgcgctctgatacatgcctgaaccccaagtctctatgtctatatgcatatctagccccttctacaggtaatctcttactgccactcagcatcaacctgctcccatttatccaggaagcctttgaagaacttgacccccagaccgggatccagcgatccgcaagtagcacgaatagagtgcatgctcaattgcggcatacccgcgtctgcagcgcgaacgccgagcatagagctaatagtcggtccaacagtgccaccgcttcttgagtcgttgcgaatcatgaagacttgtggtgtgcaatcgctcaactcgcacactctcgtcaggatggcagtggagactgagtctgtcgtcatgtgtccattgctatcagcgcagatacaaataccaacattgagtctcggcgcgtggtcatccaggtagcgcgacaagaagttggggttcacggcgtgtgtgacatcggcagagacgaggaaggagtttgcataggtttggcctacgacgcccggcccaaaggatttatcgcccccgcacaaggattctactgtgcgctcaattactgatggtaaaaagttgcctttggcaccttgtcgtagtagcgatccgatctcttcgtcatcgaagagcgcaactagcttgattgtcccgtcgtcatctttcatgtctgaggctagcagaccttggaatgcagcccagctgcaaagcttgtcatcgatacggccagcgaagatgaattccttatcaatgcctccaacagtagcaggctgtaggtcgaataactcgagttcccagttcacgatctgagagtgatgcttgaggccgagctccttcgagatcacctggacaagctttggtggttgagtagagacgaacgagccagcggggcccaaggactcagccggtttctctgcggagctgggtcccgagttatcaagaccgatgatgggtacggcttgagtttccttgttctgctgccctaacatccctacaccaaaatggggtgcaagagttggtacgcgcgcaattggccaatccaacttgacgagcttgctggacgtcttgcctgattcgtcccgaacaatgactcggccaccaatactcaggtcgcgatcccaccaagtctcgttgagggcgccggcataaggagcaacgcccaattgtatgtacccaccctttgtcggcttgttgctaactggcttcactttggcagtcagggcgtcaatatggccagcaatgatagcaacaccgttgccaggcttgtaggccttcccgacggtgaaagctatgacggagctgccgttccgagtagcgtagtatttaccaccggcttcgatctttccagaccaatcctcccgcgtaggaagctctttgtaccccagcgctcccatcttgcttttgaagtagtctactgcgtggaatatcgtggggttctcctgcagaaaggagcagaacggcttggtgaaggcctcaggattcgacgatcgaaccatacaggcagagcatgagttctgattgtcggtcaactgcagaggcaacgagtttgttcgactctctggaatgtctcgatagcaagaatcacacaaggtgagcgagggctggcgatcgagctcgccaacaacgaaagccttttctgcctcagacatattcgggctttctggttcgaattcggccggattcgcaaagctcgacagcccagatcgaggagctggggctgaaaagcttgcggccattcgtagggacatgttggatgcgcgctcgcggaggaagtcgggagtatgccgaaccatagctgctttaatcagagctttgggcgctcgtctagcacagcttcaaacagaataccagacagggcttcagatgtggttccagagaaaagatcgattgtacacggatctcagtcccacgaaagtatactcggtatttgaggaggggccggaagaagtggaggaaacagtgaactacacggatgagttgcgaatacgtgtagctaactacctacatgtagtcaagaggcaattgcgatagcgcccggctgagggctgtgccatagcaacc

SEQ ID NO: 874 - DNA, 1713 bp, Muscodor strobelii
  misc_feature: SGI cDNA ID NO. 559871
  misc_feature: Encodes the peptide sequence at SEQ ID NO 875
atggttcggcatactcccgacttcctccgcgagcgcgcatccaacatgtccctacgaatggccgcaagcttttcagccccagctcctcgatctgggctgtcgagctttgcgaatccggccgaattcgaaccagaaagcccgaatatgtctgaggcagaaaaggctttcgttgttggcgagctcgatcgccagccctcgctcaccttgtgtgattcttgctatcgagacattccagagagtcgaacaaactcgttgcctctgcagttgaccgacaatcagaactcatgctctgcctgtatggttcgatcgtcgaatcctgaggccttcaccaagccgttctgctcctttctgcaggagaaccccacgatattccacgcagtagactacttcaaaagcaagatgggagcgctggggtacaaagagcttcctacgcgggaggattggtctggaaagatcgaagccggtggtaaatactacgctactcggaacggcagctccgtcatagctttcaccgtcgggaaggcctacaagcctggcaacggtgttgctatcattgctggccatattgacgccctgactgccaaagtgaagccagttagcaacaagccgacaaagggtgggtacatacaattgggcgttgctccttatgccggcgccctcaacgagacttggtgggatcgcgacctgagtattggtggccgagtcattgttcgggacgaatcaggcaagacgtccagcaagctcgtcaagttggattggccaattgcgcgcgtaccaactcttgcaccccattttggtgtagggatgttagggcagcagaacaaggaaactcaagccgtacccatcatcggtcttgataactcgggacccagctccgcagagaaaccggctgagtccttgggccccgctggctcgttcgtctctactcaaccaccaaagcttgtccaggtgatctcgaaggagctcggcctcaagcatcactctcagatcgtgaactgggaactcgagttattcgacctacagcctgctactgttggaggcattgataaggaattcatcttcgctggccgtatcgatgacaagctttgcagctgggctgcattccaaggtctgctagcctcagacatgaaagatgacgacgggacaatcaagctagttgcgctcttcgatgacgaagagatcggatcgctactacgacaaggtgccaaaggcaactttttaccatcagtaattgagcgcacagtagaatccttgtgcgggggcgataaatcctttgggccgggcgtcgtaggccaaacctatgcaaactccttcctcgtctctgccgatgtcacacacgccgtgaaccccaacttcttgtcgcgctacctggatgaccacgcgccgagactcaatgttggtatttgtatctgcgctgatagcaatggacacatgacgacagactcagtctccactgccatcctgacgagagtgtgcgagttgagcgattgcacaccacaagtcttcatgattcgcaacgactcaagaagcggtggcactgttggaccgactattagctctatgctcggcgttcgcgctgcagacgcgggtatgccgcaattgagcatgcactctattcgtgctacttgcggatcgctggatcccggtctgggggtcaagttcttcaaaggcttcctggataaatgggagcaggttgatgctgagtggcagtaa

SEQ ID NO: 875 - protein, 570 aa, Muscodor strobelii
  misc_feature: SGI Peptide ID NO. 559871
  misc_feature (116)..(559): Pfam Id: PF02127 Pfam Desc: Aminopeptidase I zinc metalloprotease (M18)
  misc_feature (1)..(570): NCBI GI: 145609355 Blast Desc: MGG_07536 [Magnaporthe grisea 70-15] gi|145016733|gb|EDK01163.1| MGG_07536 [Magnaporthe grisea 70-15]
  misc_feature (1)..(569): NCBI GI: 256731051 Blast Desc: [Nectria haematococca mpVI 77-13-4]
  misc_feature (1)..(570): NCBI GI: 46123511 Blast Desc: FG06133.1 [Gibberella zeae PH-1]
  misc_feature (106)..(570): NCBI GI: 85101451 Blast Desc: NCU04192 [Neurospora crassa OR74A] gi|11595730|emb|CAC18208.1| related to aminopeptidase yscI precursor, vacuolar [Neurospora crassa] NCU04192 [Neurospora
  misc_feature (1)..(570): NCBI GI: 171693535 Blast Desc: protein product [Podospora anserina] gi|170946716|emb|CAP73519.1| protein product [Podospora anserina]
  misc_feature (75)..(570): NCBI GI: 116206372 Blast Desc: CHGG_02479 [Chaetomium globosum CBS 148.51] gi|88183076|gb|EAQ90544.1| CHGG_02479 [Chaetomium globosum CBS 148.51]
  misc_feature (103)..(569): NCBI GI: 145242728 Blast Desc: An09g06250 [Aspergillus niger] gi|134078493|emb|CAK40415.1| protein product [Aspergillus niger]
  misc_feature (106)..(569): NCBI GI: 169776565 Blast Desc: [Aspergillus oryzae RIB40] gi|83771484|dbj|BAE61616.1| protein product [Aspergillus oryzae]
  misc_feature (106)..(569): NCBI GI: 238503279 Blast Desc: vacuolar aspartyl aminopeptidase Lap4, [Aspergillus flavus NRRL3357] gi|220691683|gb|EED48031.1| vacuolar aspartyl aminopeptidase Lap4, [Aspergillus flavus NRRL3357]
  misc_feature (105)..(569): NCBI GI: 121718212 Blast Desc: vacuolar aspartyl aminopeptidase Lap4, [Aspergillus clavatus NRRL 1] gi|119404332|gb|EAW14708.1| vacuolar aspartyl aminopeptidase Lap4, [Aspergillus clavatus NRRL 1]
  misc_feature (80)..(569): SWISSPROT Homolog: EC 3.4.11.22 Aminopeptidase I
MVRHTPDFLRERASNMSLRMAASFSAPAPRSGLSSFANPAEFEPESPNMSEAEKAFVVGELDRQPSLTLCDSCYRDIPESRTNSLPLQLTDNQNSCSACMVRSSNPEAFTKPFCSFLQENPTIFHAVDYFKSKMGALGYKELPTREDWSGKIEAGGKYYATRNGSSVIAFTVGKAYKPGNGVAIIAGHIDALTAKVKPVSNKPTKGGYIQLGVAPYAGALNETWWDRDLSIGGRVIVRDESGKTSSKLVKLDWPIARVPTLAPHFGVGMLGQQNKETQAVPIIGLDNSGPSSAEKPAESLGPAGSFVSTQPPKLVQVISKELGLKHHSQIVNWELELFDLQPATVGGIDKEFIFAGRIDDKLCSWAAFQGLLASDMKDDDGTIKLVALFDDEEIGSLLRQGAKGNFLPSVIERTVESLCGGDKSFGPGVVGQTYANSFLVSADVTHAVNPNFLSRYLDDHAPRLNVGICICADSNGHMTTDSVSTAILTRVCELSDCTPQVFMIRNDSRSGGTVGPTISSMLGVRAADAGMPQLSMHSIRATCGSLDPGLGVKFFKGFLDKWEQVDAEWQ

SEQ ID NO: 876 - DNA, 654 bp, Muscodor strobelii
  misc_feature: SGI cDNA ID NO. 559872
  misc_feature: Encodes the peptide sequence at SEQ ID NO 877
atgatcagatgcaacatgcctccatttgaagaaataccttggtgcgccgcactccttcggaagcccggcgttatcacatttacccctgccgctcgccttccagcaaatgcgaacgggcggtacccatcacaggaccaactgttcaagagaacactaaataccaacgacaccgttccggactatatcggattctatcaatctccgttcgaagatgcagaaaagactattttcataccgcaagatcaatctaagccccgaatcatggtaaatagtgcatcgctacttgtcgacctccgtcagggaatcaatggtttcaatgcgaccgtgcacggtggtttcatcgcctgtttattcgatgagatcatggggtcccttatgttcgccagtgccgaagagcatcgtcaagctgaagctaaaggcacgagtctgccagataatttgcttcgtttacacgatgagattattttcacggtcggaatgaatttcaaattgataagagcaattgccactcctcaagttgtcgtcgcgacagctgctttcgacaggatcgaaggaagaaagctatttctcagttacactattcaagatagcaaaggaactgatctcgcgaaaggcgaaggcatttgggtgattgctcgaaaacagaagttgtga

SEQ ID NO: 877 - protein, 217 aa, Muscodor strobelii
  misc_feature: SGI Peptide ID NO. 559872
  misc_feature (106)..(203): Pfam Id: PF03061 Pfam Desc: Thioesterase superfamily
  misc_feature (9)..(215): NCBI GI: 256726796 Blast Desc: NECHADRAFT_76148 [Nectria haematococca mpVI 77-13-4]
  misc_feature (9)..(216): NCBI GI: 156060749 Blast Desc: SS1G_02517 [Sclerotinia sclerotiorum 1980] gi|154699921|gb|EDN99659.1| SS1G_02517 [Sclerotinia sclerotiorum 1980]
  misc_feature (9)..(217): NCBI GI: 171694461 Blast Desc: protein product [Podospora anserina] gi|170947179|emb|CAP73984.1| protein product [Podospora anserina]
  misc_feature (9)..(210): NCBI GI: 46136353 Blast Desc: FG09692.1 [Gibberella zeae PH-1]
  misc_feature (9)..(203): NCBI GI: 261353832 Blast Desc: conserved [Verticillium albo-atrum VaMs.102]
  misc_feature (12)..(210): NCBI GI: 169610399 Blast Desc: SNOG_08299 [Phaeosphaeria nodorum SN15] gi|111063455|gb|EAT84575.1| SNOG_08299 [Phaeosphaeria nodorum SN15]
  misc_feature (46)..(210): NCBI GI: 145615408 Blast Desc: MGG_05567 [Magnaporthe grisea 70-15] gi|145022239|gb|EDK06259.1| MGG_05567 [Magnaporthe grisea 70-15]
  misc_feature (9)..(217): NCBI GI: 261352324 Blast Desc: conserved [Verticillium albo-atrum VaMs.102]
  misc_feature (9)..(216): NCBI GI: 156053293 Blast Desc: SS1G_06814 [Sclerotinia sclerotiorum 1980] gi|154704592|gb|EDO04331.1| SS1G_06814 [Sclerotinia sclerotiorum 1980]
  misc_feature (43)..(213): NCBI GI: 169781032 Blast Desc: [Aspergillus oryzae RIB40] gi|83773720|dbj|BAE63847.1| protein product [Aspergillus oryzae]
MIRCNMPPFEEIPWCAALLRKPGVITFTPAARLPANANGRYPSQDQLFKRTLNTNDTVPDYIGFYQSPFEDAEKTIFIPQDQSKPRIMVNSASLLVDLRQGINGFNATVHGGFIACLFDEIMGSLMFASAEEHRQAEAKGTSLPDNLLRLHDEIIFTVGMNFKLIRAIATPQVVVATAAFDRIEGRKLFLSYTIQDSKGTDLAKGEGIWVIARKQKL

SEQ ID NO: 878 - DNA, 1492 bp, Muscodor strobelii
  misc_feature: SGI EST ID NO. CUFF.2397.1
  misc_feature: Variant of the nucleotide sequence at SEQ ID NO 876
aggtattcatgttatttgcaagcaagacagagatagatcgctacacactgtacgcgtcttgtaactcgcgttcccaagaacaagagctaaaccgaggtctccaattagtgcttacacagttcggaggactctgacagaacgccatcccttgatattgcgaagcccattgtcactgataatgatgaatagaaattcgttgcaaacaatcaatcgatagctgctggatgatcagatgcaacatgcctccatttgaagaaataccttggtgcgccgcactccttcggaagcccggcgttatcacatttacccctgccgctcgccttccagcaaatgcgaacgggcggtacccatcacaggaccaactgttcaagagaacactaaataccaacgacaccgttccggactatatcggattctatcaatctccgttcgaagatgcagaaaagactattttcataccgcaagatcaatctaagccccgaatcatggtaaatagtgcatcgctacttgtcgacctccgtcagggaatcaatggtttcaatgcgaccgtgcacggtggtttcatcgcctgtttattcgatgagatcatggggtcccttatgttcgccagtgccgaagagcatcgtcaagctgaagctaaaggcacgagtctgccagataatttgcttcgtttacacgatgagattattttcacggtcggaatgaatttcaaattgataagagcaattgccactcctcaagttgtcgtcgcgacagctgctttcgacaggatcgaaggaagaaagctatttctcagttacactattcaagatagcaaaggaactgatctcgcgaaaggcgaaggcatttgggtgattgctcgaaaacagaagttgtgatacttcagtccttgcagctcataaaggtttggaatagatcctacatgactaccttcgccatagtatccccatttatcctaatgaatgggtaatgctccattggccataagttacatcataatgttattcagaaactaagtagcgcgttcttccactggcctagcgggtagacaatcagagcgcccgtgaacaacttgatagtaaagccaatggccatgtctatgacatcgaagaggatgttcaatgctgagaaactcgcagcgatgcgcggttgtggtggaatcgtgctggggggcgctccgccattgatatacatcattataggcctcctggtatcagtggaaaggcacaatgctaggacaatccgaatttcattgcgcttgctagttgctgcctgtcataacatctgcagattctacactgagcaagagatgctgatcgaggagtatagggaaacctgtatgaagacggtcggtaacatgatagtagtagcaggacgccatcgagaccacatcctgtattccttgactccggacgcgtctatttctttcgaggcttgatggattttaaagtcaatgtagatgagtcgcctgtctcataactagagaggcttg

SEQ ID NO: 879 - DNA, 963 bp, Muscodor strobelii
  misc_feature: SGI cDNA ID NO. 559873
  misc_feature: Encodes the peptide sequence at SEQ ID NO 880
atgtggtcgctgagctatttcgttggcgtccttgctgcgacagctacccctgcgtttgctgcgcccgccacgaatgcaggtattgctgcacgcgcctcggcaggctgtggcaagactcacatcttgcctggcatcacgaaatattatggattgaccagtagcggacgcgatcggtcatattcggttcatttaccgagtgactatgatacggcaacaccataccccgtcgtggttgggtttcacggttccagcagcatcggattattctttgaggccgacacgaaactcagcgagtctcggttcaccgcgaataaaatcattgtgtatccgaacggcgttgggggtgcctgggctggcgcaaactattccgaagtttctgtgaccgaagaccttcagtttgttaccgacctcttggctgcgcttcgtgacgactactgtgtggacgatgctcgcatttacgcgaccggaatctctaacggcggtgggtttgtgaacacgatcgcctgtagtgcagttggcggcgagtttgcggcatttgcccctgcatccggatcgttctatacggataatgctggcgtgacaggtggttgcagccctgctcgtactcctctaccggttctcgaaattcatggtggcatcgacgccagcgtgaactacacgggaggcgttggcgaaggcggtgttgagcctgatattcagacatggttaggctggtgggccgaaaggaactcgtgcacaggtccgaaagtcgatcagagcttcgacaatgatgtgcagcattatagttggacttgcggggatggtgtcgagggtttgctgcagcattggaaggttgatgatatgggtcattgctgggcttcgacggagattaacttctcgcagatctctgtgcttgaagggccgacacacatccaagcgtcccgaatcattatggatttcttcgatcagttcacgaaaccttga

SEQ ID NO: 880 - protein, 320 aa, Muscodor strobelii
  misc_feature: SGI Peptide ID NO. 559873
  misc_feature (7)..(299): NCBI GI: 169618313 Blast Desc: SNOG_12348 [Phaeosphaeria nodorum SN15] gi|111059041|gb|EAT80161.1| SNOG_12348 [Phaeosphaeria nodorum SN15]
  misc_feature (51)..(318): NCBI GI: 242823154 Blast Desc: conserved [Talaromyces stipitatus ATCC 10500] gi|218712953|gb|EED12378.1| conserved [Talaromyces stipitatus ATCC 10500]
  misc_feature (37)..(235): NCBI GI: 242770523 Blast Desc: ferulic acid esterase (FaeA), [Talaromyces stipitatus ATCC 10500] gi|218725194|gb|EED24611.1| ferulic acid esterase (FaeA), [Talaromyces stipitatus ATCC 10500]
  misc_feature (6)..(320): NCBI GI: 121709098 Blast Desc: ferulic acid esterase (FaeA), [Aspergillus clavatus NRRL 1] gi|119400456|gb|EAW10881.1| ferulic acid esterase (FaeA), [Aspergillus clavatus NRRL 1]
  misc_feature (26)..(320): NCBI GI: 156046192 Blast Desc: SS1G_09363 [Sclerotinia sclerotiorum 1980] gi|154693758|gb|EDN93496.1| SS1G_09363 [Sclerotinia sclerotiorum 1980]
  misc_feature (30)..(320): NCBI GI: 154319772 Blast Desc: BC1G_02367 [Botryotinia fuckeliana B05.10] gi|150856025|gb|EDN31217.1| BC1G_02367 [Botryotinia fuckeliana B05.10]
  misc_feature (53)..(320): NCBI GI: 238483749 Blast Desc: ferulic acid esterase (FaeA), [Aspergillus flavus NRRL3357] gi|220701163|gb|EED57501.1| ferulic acid esterase (FaeA), [Aspergillus flavus NRRL3357]
  misc_feature (53)..(320): NCBI GI: 169766954 Blast Desc: [Aspergillus oryzae RIB40] gi|83765803|dbj|BAE55946.1| protein product [Aspergillus oryzae]
  misc_feature (52)..(318): NCBI GI: 119489245 Blast Desc: ferulic acid esterase (FaeA), [Neosartorya fischeri NRRL 181] gi|119411032|gb|EAW20977.1| ferulic acid esterase (FaeA), [Neosartorya fischeri NRRL 181]
  misc_feature (28)..(285): NCBI GI: 255953989 Blast Desc: Pc21g07050 [Penicillium chrysogenum Wisconsin 54-1255] gi|211589458|emb|CAP95602.1| Pc21g07050 [Penicillium chrysogenum Wisconsin 54-1255]
  misc_feature (58)..(270): SWISSPROT Homolog: EC 3.1.1.73 Feruloyl esterase
MWSLSYFVGVLAATATPAFAAPATNAGIAARASAGCGKTHILPGITKYYGLTSSGRDRSYSVHLPSDYDTATPYPVVVGFHGSSSIGLFFEADTKLSESRFTANKIIVYPNGVGGAWAGANYSEVSVTEDLQFVTDLLAALRDDYCVDDARIYATGISNGGGFVNTIACSAVGGEFAAFAPASGSFYTDNAGVTGGCSPARTPLPVLEIHGGIDASVNYTGGVGEGGVEPDIQTWLGWWAERNSCTGPKVDQSFDNDVQHYSWTCGDGVEGLLQHWKVDDMGHCWASTEINFSQISVLEGPTHIQASRIIMDFFDQFTKP

SEQ ID NO: 881 - DNA, 2402 bp, Muscodor strobelii
  misc_feature: SGI EST ID NO. CUFF.2609.2
  misc_feature: Variant of the nucleotide sequence at SEQ ID NO 879
ttaggaaggcgaaaaacacgggcaagcaggattccttgaataaatcacattatgccagacggcccgaaaagcttgaccatgctattaaagcctctcccgccctggtgttgctctttcgcaacgacatagaagtgtgaactcagtccctaaacctcagtgaagatgtggtcgctgagctatttcgttggcgtccttgctgcgacagctacccctgcgtttgctgcgcccgccacgaatgcaggtattgctgcacgcgcctcggcaggctgtggcaagactcacatcttgcctggcatcacgaaatattatggattgaccagtagcggacgcgatcggtcatattcggttcatttaccgagtgactatgatacggcaacaccataccccgtcgtggttgggtttcacggttccagcagcatcggattattctttgaggccgacacgaaactcagcgagtctcggttcaccgcgaataaaatcattgtgtatccgaacggcgttgggggtgcctgggctggcgcaaactattccgaagtttctgtgaccgaagaccttcagtttgttaccgacctcttggctgcgcttcgtgacgactactgtgtggacgatgctcgcatttacgcgaccggaatctctaacggcggtgggtttgtgaacacgatcgcctgtagtgcagttggcggcgagtttgcggcatttgcccctgcatccggatcgttctatacggataatgctggcgtgacaggtggttgcagccctgctcgtactcctctaccggttctcgaaattcatggtggcatcgacgccagcgtgaactacacgggaggcgttggcgaaggcggtgttgagcctgatattcagacatggttaggctggtgggccgaaaggaactcgtgcacaggtccgaaagtcgatcagagcttcgacaatgatgtgcagcattatagttggacttgcggggatggtgtcgagggtttgctgcagcattggaaggttgatgatatgggtcattgctgggcttcgacggagattaacttctcgcagatctctgtgcttgaagggccgacacacatccaagcgtcccgaatcattatggatttcttcgatcagttcacgaaaccttgaaatgtagataaaatataaggtgcggaatctagccatgctcgaatattgaaagatgcaggatgatagatcagtcgctccacgcttatgcattttggcgcggttgacaaaacgtcggaggttttgcatctttccacgacgcgtgatgacccatgttcagtgcatatgcgtctgcacccggtgttagcttggtcagatttggcgagcctggtacccagctcgtcagtttccagtgtcagggggattggaccaagaatacgagacgtgaagccccgccgaattgacaaacatcacgctcgcaagtctcgagcggcaaagatcagtacagtctctttctgcgcatgtgtctgtgtcatatccataaatgtcttgcaattcagcagcatgcatctacagattacacgagcgtcttaggtaacaaggcatagacaatcaagcattgaacatggccgattgcgacacgtcactctttgcccgccttccgattgaagtccgtgagcgcatctacgagtactaccttgcgccgactgcggcttcatttcgggatgccgctcaaccgcccggcgtacatccgtaccttgaggacgatgcgtgttattcaacgccgctgcccgctctcatgcttgtcagtaagcgtctatatcgtgagcttagagcgcacgtaaatgatcaggccgttctccgtatccacaatgtcgggcaactagatcatcaattttgggacgataatgtcattggcttcgctgcacatgggcccttccgatatgatcgtctacgtacacttgccttcatcatcgccttgaggttctgggatttcggcagttggtgtgagttcttcggaaacgtcataaaggccgccgtcaatttggagaaactcactattgattggcaccctccggatatgataggggttgacgacccgatggatagcacgattgatgcaatgaaaattaaaaagcacaatgatttaattggcattctcacgagctcgcggagcttggaggtaatcaggctgcatggaaaattctccccgagatggattcaaacacttcgggatggcacaaaagctcacgtttcatgctctccagaacgctggtggagggaaagcatgacagatccggcggcatctcctactgccttgtaatagcagatgcgaactacaaaggcgcaccttgttactaacatcatcagggtcaggtcgtaattatagcatggctactcctatatagaatggcttgatatccactgtgtgacgtatcatgaacctccgtgccctttcg

SEQ ID NO: 882 - DNA, 222 bp, Muscodor strobelii
  misc_feature: SGI cDNA ID NO. 559874
  misc_feature: Encodes the peptide sequence at SEQ ID NO 883
atgaaaggagtcttttttatcagtatgctggcaacttccgtcttagctgtgcctatttcccaacttgctcctaagacaatcacgtccctcgttgacagagggcactttggccccgactatttcttggaggcccgtgatgggtcaacagagtctgatcctgacgctcctttcctgaaggaacgtgatggatcaatagaggtcggccccgacctttctatctga

SEQ ID NO: 883 - protein, 73 aa, Muscodor strobelii
  misc_feature: SGI Peptide ID NO. 559874
MKGVFFISMLATSVLAVPISQLAPKTITSLVDRGHFGPDYFLEARDGSTESDPDAPFLKERDGSIEVGPDLSI

SEQ ID NO: 884 - DNA, 1521 bp, Muscodor strobelii
  misc_feature: SGI cDNA ID NO. 559875
  misc_feature: Encodes the peptide sequence at SEQ ID NO 885
atgtccgtcacaaacatactctcgtcatcaatacgacagcctttgtgctattctctcaagcaggcgatggtacatgcagtcgaagatgacagcaaaaggttcttgcctcttgggaagctcgatagcctttgcaatcgcgaagcagtgcttgccgaactcgacaaaacatttgccaatacgcccgagtcgagccacattctggagtttgtcaactatgtgtgcggaggtcgcgaagacgcgccagacgagaacgatacgtgtcgaaaaatattcgccgtcttggtgcttataggacggctagacaagatctcggattttgttgaagagtcgattaaagacagacatcttccatttcgaaagtctcagggccaaaatggtagacaagattttgttcttacaagacgaagtacctttgatctatcggatcctccaattatgacgttcttccaaaaatggaacgacgtcgatcgtgccgagttctatcatgttcaatggcaactacttagcccctttttcagtgaagtctctgaagcagccgcgctgtacaaacttgacccgcaaaccattatgccgtggatttcaatgggcgaggagttacgtggcgccttcgtgccccttccagactacggcggttactcgaaagtcacgaaggttactattcaccaggatcatcactcattcacaaccgacacattcggagtaaaaaaactcttcgaccctaatgaggcggctttccagaaggaattcgagaacctcaagaaagtccgccggagaaaacatttgcttccagttcatgcggcgtatgttcgaggaaacaaatactccttcattacaccttgggcacatggtggctgtttgacaagcctgtggaaaagggagccacagtcacttgtagcagatccctcgaaagacttgggcagacttgttttgtgggttgccgcccaactatctggaatgactggaagtcaaggtcttgaattcttacatggccaggatcgccatgataaaatcaacacgcttgctgttccgatgccaggtgaaaagaatttcgctattcacggggatattaaaccatccaacattctgtacttcaaacgcgatccccagaatcaaattctcgatctccattgtgaccatttcaaaatttccgactttgggttgacggggttccactccgctttgactaggtcgcgactgccagctaccgggccacactcaccaacgtatagaagccccgaacatggaacatctgacgagttcttgtcaagaaaatatgacatctggagcttgggctgtgtcttattggagttctttctttggcttgttcgcgggccggagggtttaaagcttttcacccaggatcgcgtggatgatcaatgtgacacaggtaccaagatgaaagacgataaattcttcgtcatcgggccacaaaatcgcactctgaaacccagcgtcgtgaagtggatcagggatgttcaggcagatgcgggagaaggcacttaccttcatgaatgcttataa

SEQ ID NO: 885 - protein, 506 aa, Muscodor strobelii
  misc_feature: SGI Peptide ID NO. 559875
  misc_feature (323)..(439): Pfam Id: PF00069 Pfam Desc: Protein kinase domain
  misc_feature (18)..(491): NCBI GI: 46133835 Blast Desc: FG09057.1 [Gibberella zeae PH-1]
  misc_feature (31)..(485): NCBI GI: 256722881 Blast Desc: NECHADRAFT_87138 [Nectria haematococca mpVI 77-13-4]
  misc_feature (15)..(457): NCBI GI: 116202875 Blast Desc: CHGG_09322 [Chaetomium globosum CBS 148.51] gi|88177840|gb|EAQ85308.1| CHGG_09322 [Chaetomium globosum CBS 148.51]
  misc_feature (33)..(474): NCBI GI: 171685536 Blast Desc: protein product [Podospora anserina] gi|170942729|emb|CAP68382.1| protein product [Podospora anserina]
  misc_feature (84)..(506): NCBI GI: 67522665 Blast Desc: AN1789.2 [Aspergillus nidulans FGSC A4] gi|40744809|gb|EAA63965.1| AN1789.2 [Aspergillus nidulans FGSC A4] gi|259487135|tpe|CBF85566.1| TPA: conserved [Aspergillus FGSC
  misc_feature (34)..(506): NCBI GI: 261359076 Blast Desc: protein kinase domain-containing protein [Verticillium albo-atrum VaMs.102]
  misc_feature (32)..(487): NCBI GI: 116200846 Blast Desc: CHGG_10968 [Chaetomium globosum CBS 148.51] gi|88175682|gb|EAQ83150.1| CHGG_10968 [Chaetomium globosum CBS 148.51]
  misc_feature (10)..(500): NCBI GI: 46126729 Blast Desc: FG07742.1 [Gibberella zeae PH-1]
  misc_feature (10)..(494): NCBI GI: 169607333 Blast Desc: SNOG_06723 [Phaeosphaeria nodorum SN15] gi|111064254|gb|EAT85374.1| SNOG_06723 [Phaeosphaeria nodorum SN15]
  misc_feature (12)..(456): NCBI GI: 170940330 Blast Desc: protein product [Podospora anserina]
MSVTNILSSSIRQPLCYSLKQAMVHAVEDDSKRFLPLGKLDSLCNREAVLAELDKTFANTPESSHILEFVNYVCGGREDAPDENDTCRKIFAVLVLIGRLDKISDFVEESIKDRHLPFRKSQGQNGRQDFVLTRRSTFDLSDPPIMTFFQKWNDVDRAEFYHVQWQLLSPFFSEVSEAAALYKLDPQTIMPWISMGEELRGAFVPLPDYGGYSKVTKVTIHQDHHSFTTDTFGVKKLFDPNEAAFQKEFENLKKVRRRKHLLPVHAAYVRGNKYSFITPWAHGGCLTSLWKREPQSLVADPSKDLGRLVLWVAAQLSGMTGSQGLEFLHGQDRHDKINTLAVPMPGEKNFAIHGDIKPSNILYFKRDPQNQILDLHCDHFKISDFGLTGFHSALTRSRLPATGPHSPTYRSPEHGTSDEFLSRKYDIWSLGCVLLEFFLWLVRGPEGLKLFTQDRVDDQCDTGTKMKDDKFFVIGPQNRTLKPSVVKWIRDVQADAGEGTYLHECL

SEQ ID NO: 886 - DNA, 392 bp, Muscodor strobelii
  misc_feature: SGI EST ID NO. CUFF.2429.0
  misc_feature: Variant of the nucleotide sequence at SEQ ID NO 884
caccaacgtatagaagccccgaacatggaacatctgacgagttcttgtcaagaaaatatgacatctggagcttgggctgtgtcttattggagttctttctttggcttgttcgcgggccggagggtttaaagcttttcacccaggatcgcgtggatgatcaatgtgacacaggtaccaagatgaaagacgataaattcttcgtcatcgggccacaaaatcgcactctgaaacccagcgtcgtgaagtggatcagggatgttcaggcagatgcgggagaaggcacttaccttcatgaatgcttataattcattgaaactcatatgctagcaatcagctcgaaagagcgtgcagactgcgccaaggtgcataggtttctggaaaactgtcataag

SEQ ID NO: 887 - DNA, 2055 bp, Muscodor strobelii
  misc_feature: SGI cDNA ID NO. 559876
  misc_feature: Encodes the peptide sequence at SEQ ID NO 888
atggctgagatacgcgagaatgccactcgactgatgcgcaagtcattcgcttgcgatgaatgtaagaggcgcaagataagatgttctggtggcgaccggtgcgccaattgctttcgagatgccaaagaatgtcgctattcttctccgtcgcaaagactagcatcactgcaaaggcgtctccgagaaagcgaagctctccgtgcagatatcgaaaaagcttggaaaatacatcttcctagtgttgatttagaaacagcgcttcgaaatctgcgacgggattcggcagatgaacatgtcaagcagggagatgcgctgcccaacgagcaggaagcattgtcaatagacactccatttcaacacgaaaatggggcggtcaatgatagagccgttgagacatccgaaacaccggtggaactagcaaacgcagaagactacgaatttgatgagtctcacgatgtcgagggctcgattgatggtatgggatttctgaccgccgaccctcacaaggctggctataccgggccgcaatctggtattgcagcacttaaatttcttcgatcattgccgccatatttaccaataagctactcttctccattgacaattcccgatgatcaagatgttcctgaggtctcgtcccaaactcaagtagatataaaccgctacattgatgaatacttctcacttttccatactgcatacccaattcttcacgagggaacatttagagctcgagtatccggtgcacttgctaaacctcgagatggttcctggcctcttttatacaattctgttcttgctatcggcgcgtttgtcagtggtcctacaaacatgagaaatgatctacctttttgccaggaagctaggaagcatttgagcatggacatacttgaaaagggctccttgtgctatgtgcaagggctgactctatttgccaattacctgcagaaacggaacaaaccgaatgcaggcttcatcttgattgggattgctttcagtatggcattggcgattggccttcaccgagaattcgacgcagcgagtacatcacctttcacaatggagacgcgccgtcgtgtctggtggaccctgttcgtatttgtctcgggtgcacaattggcgttgggacgcccagttgcatctttgataggggtgaatgtacaattacccgccaatctagacgacagtgacctcgccgtcgacatggaacatatgcctccggaaaagttggaggccacagtctcgtcatgtctcatcgctcaggtcaaactagccaaaattgctaacactgttcatgatgagcttttgacgcatcgtcgcccaagctacgcgaaagcaatgcatcttgaacgggatatccaggcttggtggaatgacttaccgcctttcttcaatgaaaaggcatgtattgacccccgactacgccctcccatgcgaatccttctgtggcggtcattcaatttgcggattgttctaaacagaccgttcctattcgaaaatattgctgccggcgcacagcttgatacttcggtcgagccaattaaatcgtgcctcgtcgcggcggatgaatgcgtcacttccatatgcggattcgtgaattctttggagatcgccaggcgcgggttcgcctggtatgcgaccgcgtggctaatcaccgccagttttgtgcaagcgacatgcttgatatacagcccagctcattgcctcgctgttagctggaagacgtctcttcacaaatctgtcgactgtctacagatactaggatcatcattggatattgcgcttcgggcgcgggacataattgtcaatctacttgaagagggtgatttgccggttccgtcgccagccaggactatgaacccaatctcaaccactttgtcacgtcttggtatgaacgtaccggacaaccagtttagctcccagcaggctccgagtgatttcgcatcagtttgggttgaggaaaacttcacgtggtcttcttcaggcggaaacaatgctgagttcttgggtgcagccggagggttaacatatggcaatgttttcgacttgtcataa

SEQ ID NO: 888 - protein, 684 aa, Muscodor strobelii
  misc_feature: SGI Peptide ID NO. 559876
  misc_feature (16)..(53): Pfam Id: PF00172 Pfam Desc: Fungal Zn(2)-Cys(6) binuclear cluster domain
  misc_feature (301)..(396): Pfam Id: PF04082 Pfam Desc: Fungal specific transcription factor domain
  misc_feature (7)..(681): NCBI GI: 70995418 Blast Desc: C6 transcription factor [Aspergillus fumigatus Af293] gi|66850100|gb|EAL90427.1| C6 transcription factor, [Aspergillus fumigatus Af293] gi|159131220|gb|EDP56333.1| C6 transcription
  misc_feature (10)..(682): NCBI GI: 145251928 Blast Desc: An16g01640 [Aspergillus niger] gi|134083018|emb|CAK42781.1| protein product [Aspergillus niger]
  misc_feature (70)..(684): NCBI GI: 238503644 Blast Desc: C6 transcription factor, [Aspergillus flavus NRRL3357] gi|220690525|gb|EED46874.1| C6 transcription factor, [Aspergillus flavus NRRL3357]
  misc_feature (10)..(681): NCBI GI: 259482859 Blast Desc: TPA: Zn(II)2Cys6 transcription factor (Eurofung) [Aspergillus nidulans FGSC A4]
  misc_feature (10)..(681): NCBI GI: 67528272 Blast Desc: AN4334.2 [Aspergillus nidulans FGSC A4] gi|40741305|gb|EAA60495.1| AN4334.2 [Aspergillus nidulans FGSC A4]
  misc_feature (11)..(675): NCBI GI: 256721016 Blast Desc: NECHADRAFT_52813 [Nectria haematococca mpVI 77-13-4]
  misc_feature (15)..(604): NCBI GI: 259482369 Blast Desc: TPA: Zn(II)2Cys6 transcription factor (Eurofung) [Aspergillus nidulans FGSC A4]
  misc_feature (116)..(585): NCBI GI: 169777591 Blast Desc: [Aspergillus oryzae RIB40] gi|83771998|dbj|BAE62128.1| protein product [Aspergillus oryzae]
  misc_feature (116)..(585): NCBI GI: 238494766 Blast Desc: conserved [Aspergillus flavus NRRL3357] gi|220695269|gb|EED51612.1| conserved [Aspergillus flavus NRRL3357]
  misc_feature (17)..(611): NCBI GI: 67902248 Blast Desc: AN8111.2 [Aspergillus nidulans FGSC A4] gi|40740543|gb|EAA59733.1| AN8111.2 [Aspergillus nidulans FGSC A4] gi|259480875|tpe|CBF73910.1| TPA: Zn(II)2Cys6 transcription
MAEIRENATRLMRKSFACDECKRRKIRCSGGDRCANCFRDAKECRYSSPSQRLASLQRRLRESEALRADIEKAWKIHLPSVDLETALRNLRRDSADEHVKQGDALPNEQEALSIDTPFQHENGAVNDRAVETSETPVELANAEDYEFDESHDVEGSIDGMGFLTADPHKAGYTGPQSGIAALKFLRSLPPYLPISYSSPLTIPDDQDVPEVSSQTQVDINRYIDEYFSLFHTAYPILHEGTFRARVSGALAKPRDGSWPLLYNSVLAIGAFVSGPTNMRNDLPFCQEARKHLSMDILEKGSLCYVQGLTLFANYLQKRNKPNAGFILIGIAFSMALAIGLHREFDAASTSPFTMETRRRVWWTLFVFVSGAQLALGRPVASLIGVNVQLPANLDDSDLAVDMEHMPPEKLEATVSSCLIAQVKLAKIANTVHDELLTHRRPSYAKAMHLERDIQAWWNDLPPFFNEKACIDPRLRPPMRILLWRSFNLRIVLNRPFLFENIAAGAQLDTSVEPIKSCLVAADECVTSICGFVNSLEIARRGFAWYATAWLITASFVQATCLIYSPAHCLAVSWKTSLHKSVDCLQILGSSLDIALRARDIIVNLLEEGDLPVPSPARTMNPISTTLSRLGMNVPDNQFSSQQAPSDFASVWVEENFTWSSSGGNNAEFLGAAGGLTYGNVFDLS

SEQ ID NO: 889 - DNA, 1612 bp, Muscodor strobelii
  misc_feature: SGI EST ID NO. CUFF.2447.0
  misc_feature: Variant of the nucleotide sequence at SEQ ID NO 887
cgtcaatatgctatcagagggtcgcatgcaatgcctgggtcatggctgagatacgcgagaatgccactcgactgatgcgcaagtcattcgcttgcgatgaatgtaagaggcgcaagataagatgttctggtggcgaccggtgcgccaattgctttcgagatgccaaagaatgtcgctattcttctccgtcgcaaagactagcatcactgcaaaggcgtctccgagaaagcgaagctctccgtgcagatatcgaaaaagcttggaaaatacatcttcctagtgttgatttagaaacagcgcttcgaaatctgcgacgggattcggcagatgaacatgtcaagcagggagatgcgctgcccaacgagcaggaagcattgtcaatagacactccatttcaacacgaaaatggggcggtcaatgatagagccgttgagacatccgaaacaccggtggaactagcaaacgcagaagactacgaatttgatgagtctcacgatgtcgagggctcgattgatggtatgggatttctgaccgccgaccctcacaaggctggctataccgggccgcaatctggtattgcagcacttaaatttcttcgatcattgccgccatatttaccaataagctactcttctccattgacaattcccgatgatcaagatgttcctgaggtctcgtcccaaactcaagtagatataaaccgctacattgatgaatacttctcacttttccatactgcatacccaattcttcacgagggaacatttagagctcgagtatccggtgcacttgctaaacctcgagatggttcctggcctcttttatacaattctgttcttgctatcggcgcgtttgtcagtggtcctacaaacatgagaaatgatctacctttttgccaggaagctaggaagcatttgagcatggacatacttgaaaagggctccttgtgctatgtgcaagggctgactctatttgccaattacctgcagaaacggaacaaaccgaatgcaggcttcatcttgattgggattgctttcagtatggcattggcgattggccttcaccgagaattcgacgcagcgagtacatcacctttcacaatggagacgcgccgtcgtgtctggtggaccctgttcgtatttgtctcgggtgcacaattggcgttgggacgcccagttgcatctttgataggggtgaatgtacaattacccgccaatctagacgacagtgacctcgccgtcgacatggaacatatgcctccggaaaagttggaggccacagtctcgtcatgtctcatcgctcaggtcaaactagccaaaattgctaacactgttcatgatgagcttttgacgcatcgtcgcccaagctacgcgaaagcaatgcatcttgaacgggatatccaggcttggtggaatgacttaccgcctttcttcaatgaaaaggcatgtattgacccccgactacgccctcccatgcgaatccttctgtggcggtcattcaatttgcggattgttctaaacagaccgttcctattcgaaaatattgctgccggcgcacagcttgatacttcggtcgagccaattaaatcgtgcctcgtcgcggcggatgaatg

SEQ ID NO: 890 - DNA, 1884 bp, Muscodor strobelii
  misc_feature: SGI cDNA ID NO. 559877
  misc_feature: Elevated expression when VOC is produced
  misc_feature: Encodes the peptide sequence at SEQ ID NO 891
atgtctcctatcgcgatcactaaggcgccacccaggtatgatcatgtcatcgatcttcccagaacagtcccagtcagcaattcttctatcaatgcgtggagaattgcacaagattggctcagcaagcttgaggttgttttcgccagcaatgacttctccaatcttacagatctcttcaatgaagattcatggtggcgtgacattttagcgctgcaatgggacttccgtaccattcatggacgtgaagctatccaaggcttcctacagaaaaacaagaagtcgggtccgttatcatcattccgtctacataagacaggcaaattccagccacagctcgagattatcaatgaaaagactggttttgcctggatctcgtctctttttcatttcgagtccagcgttggaactgggtctggcgtactgcgattgactcaagaacgtcccggagtctggaaagcatttgccgtatatactgcgttgcaagatctgaaaggacatgatgagccactgggagctaaacgtccatatggcacaattgactctatgcccggaggtcttgcgaaagggacatgggtagagcgtcggaagagacaggtagacttcgaggaggaagaaccacaaattctgatcgtaggagctggccaagccggattgaacgttgctgctcgtctgcaatcacttggcctgtcagcacttgtcattgacaaaaatgaccgtgtcggtaataactggcggaaccggtacagaactcttgttacgcatgacccagcggagttcacacatttggcttatcttcccttcccccaaaattggccgcagtttacgccaaaagataaaatgggtgactggcttgaagcatacgcgtcaatcatggagctaaacgtttggacgaagaccacgctcacaaactcttcgtttgatgagagcaagtctctatggaccgtagatctagttcgtgatggccaaaggcgaaccatcaacccgaagcacgttattctcgctactggtcatgccggagaacctcgtgttcccacttttccaggtcaatcagacttcaaaggtgaagtataccacggcagccagcatgaggatgcgtcgaagtatgatgtgaagggaaagaaagtcattgtcgtcggaacaggcaacagtggccatgatattgctgagaactattatgagaatggtgcggatgtgacgatgcttcaaagaagtggaacttacgtcttatcacttgacaggggcgttttcatgcttcacgagggaatgcatgctgataatggaccgccgactgaggaatgcgatattgttggcgaaagtttgcctttccctgttcagtttgcgctgaacgtagaagggaccaagcgcatctccgcagccgacaaagagatcatagagggcctagagcgtgttggcttcaaattggactactcaattgacggtggcggcattgctcgtctgtattttacgcgtggcggtggttactacatcgatgttggctgcagcaagctcatcatcgatggcaagattaaagtccaccagagccccaaaggcatctcaggatttagctctgatgggctcgtactccaggatggcaacgagctaaaagcagatgttgtcatcttggctacaggttatgacaatatgaagaccacggcgcaggagatcatgggcgacaaagtcgcggcgcgactgaaggacgtgtgggatcttgatgaagaaggcgagctgaatgcgatgtggcgacccagcggacatccaaacttctggtatatgggtggtaatcttgccatctgcagaatctactccaagtatgtagcattacagatcaaagcatatgaagagggtttaaacccaacgccgaatggatcgcaaaacggaatttga

SEQ ID NO: 891 - protein, 627 aa, Muscodor strobelii
  misc_feature: SGI Peptide ID NO. 559877
  misc_feature (207)..(564): Pfam Id: PF07992 Pfam Desc: Pyridine nucleotide-disulphide oxidoreductase
  misc_feature (207)..(242): Pfam Id: PF01266 Pfam Desc: FAD dependent oxidoreductase
  misc_feature (522)..(544): Pfam Id: PF00070 Pfam Desc: Pyridine nucleotide-disulphide oxidoreductase
  misc_feature (207)..(241): Pfam Id: PF07992 Pfam Desc: Pyridine nucleotide-disulphide oxidoreductase
  misc_feature (15)..(617): NCBI GI: 115491639 Blast Desc: conserved [Aspergillus terreus NIH2624] gi|114197307|gb|EAU39007.1| conserved [Aspergillus terreus NIH2624]
  misc_feature (15)..(616): NCBI GI: 238498262 Blast Desc: flavin-binding monooxygenase, [Aspergillus flavus NRRL3357] gi|220693640|gb|EED49985.1| flavin-binding monooxygenase, [Aspergillus flavus NRRL3357]
  misc_feature (6)..(618): NCBI GI: 242768556 Blast Desc: flavin-binding monooxygenase, [Talaromyces stipitatus ATCC 10500] gi|218724788|gb|EED24205.1| flavin-binding monooxygenase, [Talaromyces stipitatus ATCC 10500]
  misc_feature (15)..(617): NCBI GI: 255937015 Blast Desc: Pc13g11160 [Penicillium chrysogenum Wisconsin 54-1255] gi|211584154|emb|CAP92185.1| Pc13g11160 [Penicillium chrysogenum Wisconsin 54-1255]
  misc_feature (6)..(618): NCBI GI: 212542629 Blast Desc: flavin-binding monooxygenase, [Penicillium marneffei ATCC 18224] gi|210066376|gb|EEA20469.1| flavin-binding monooxygenase, [Penicillium marneffei ATCC 18224]
  misc_feature (15)..(616): NCBI GI: 169781478 Blast Desc: [Aspergillus oryzae RIB40] gi|83773944|dbj|BAE64069.1| protein product [Aspergillus oryzae]
  misc_feature (15)..(616): NCBI GI: 119495631 Blast Desc: NFIA_013890 [Neosartorya fischeri NRRL 181] gi|119412758|gb|EAW22699.1| NFIA_013890 [Neosartorya fischeri NRRL 181]
  misc_feature (15)..(616): NCBI GI: 70995552 Blast Desc: flavin-binding monooxygenase [Aspergillus fumigatus Af293] gi|66850166|gb|EAL90493.1| flavin-binding monooxygenase, [Aspergillus fumigatus Af293] gi|159131286|gb|EDP56399.1| A1163]
  misc_feature (15)..(616): NCBI GI: 41581241 Blast Desc: flavin-containing monooxygenase, [Aspergillus fumigatus]
  misc_feature (15)..(616): NCBI GI: 67517917 Blast Desc: AN1129.2 [Aspergillus nidulans FGSC A4] gi|40747091|gb|EAA66247.1| AN1129.2 [Aspergillus nidulans FGSC A4] gi|259488556|tpe|CBF88085.1| TPA: conserved [Aspergillus FGSC
  misc_feature: Useful for introducing or modulating the production of volatile compounds
MSPIAITKAPPRYDHVIDLPRTVPVSNSSINAWRIAQDWLSKLEVVFASNDFSNLTDLFNEDSWWRDILALQWDFRTIHGREAIQGFLQKNKKSGPLSSFRLHKTGKFQPQLEIINEKTGFAWISSLFHFESSVGTGSGVLRLTQERPGVWKAFAVYTALQDLKGHDEPLGAKRPYGTIDSMPGGLAKGTWVERRKRQVDFEEEEPQILIVGAGQAGLNVAARLQSLGLSALVIDKNDRVGNNWRNRYRTLVTHDPAEFTHLAYLPFPQNWPQFTPKDKMGDWLEAYASIMELNVWTKTTLTNSSFDESKSLWTVDLVRDGQRRTINPKHVILATGHAGEPRVPTFPGQSDFKGEVYHGSQHEDASKYDVKGKKVIVVGTGNSGHDIAENYYENGADVTMLQRSGTYVLSLDRGVFMLHEGMHADNGPPTEECDIVGESLPFPVQFALNVEGTKRISAADKEIIEGLERVGFKLDYSIDGGGIARLYFTRGGGYYIDVGCSKLIIDGKIKVHQSPKGISGFSSDGLVLQDGNELKADVVILATGYDNMKTTAQEIMGDKVAARLKDVWDLDEEGELNAMWRPSGHPNFWYMGGNLAICRIYSKYVALQIKAYEEGLNPTPNGSQNGI

SEQ ID NO: 892 - DNA, 2421 bp, Muscodor strobelii
  misc_feature: SGI EST ID NO. CUFF.2453.0
  misc_feature: Variant of the nucleotide sequence at SEQ ID NO 890
tgataaacgccaaaatcgattctccgcagaatcagaggtggtggcggacgtttgttagctagtggatggggtaatgtggtactccgacactgcctaataaggtgagatatcacatgggatagatagacgggtgtaatggcgatgcagtcatgatctcgaactatagagatttaaataggcatattgagttttcaatgtcgtgtccaactctaaaagaattatcaatcgacgtggtatcttgatttgtttgtatgttccctcgagaaacagtgagctctacagctacaagggattgaatattcaccggttccgccatgtctcctatcgcgatcactaaggcgccacccaggtatgatcatgtcatcgatcttcccagaacagtcccagtcagcaattcttctatcaatgcgtggagaattgcacaagattggctcagcaagcttgaggttgttttcgccagcaatgacttctccaatcttacagatctcttcaatgaagattcatggtggcgtgacattttagcgctgcaatgggacttccgtaccattcatggacgtgaagctatccaaggcttcctacagaaaaacaagaagtcgggtccgttatcatcattccgtctacataagacaggcaaattccagccacagctcgagattatcaatgaaaagactggttttgcctggatctcgtctctttttcatttcgagtccagcgttggaactgggtctggcgtactgcgattgactcaagaacgtcccggagtctggaaagcatttgccgtatatactgcgttgcaagatctgaaaggacatgatgagccactgggagctaaacgtccatatggcacaattgactctatgcccggaggtcttgcgaaagggacatgggtagagcgtcggaagagacaggtagacttcgaggaggaagaaccacaaattctgatcgtaggagctggccaagccggattgaacgttgctgctcgtctgcaatcacttggcctgtcagcacttgtcattgacaaaaatgaccgtgtcggtaataactggcggaaccggtacagaactcttgttacgcatgacccagcggagttcacacatttggcttatcttcccttcccccaaaattggccgcagtttacgccaaaagataaaatgggtgactggcttgaagcatacgcgtcaatcatggagctaaacgtttggacgaagaccacgctcacaaactcttcgtttgatgagagcaagtctctatggaccgtagatctagttcgtgatggccaaaggcgaaccatcaacccgaagcacgttattctcgctactggtcatgccggagaacctcgtgttcccacttttccaggtcaatcagacttcaaaggtgaagtataccacggcagccagcatgaggatgcgtcgaagtatgatgtgaagggaaagaaagtcattgtcgtcggaacaggcaacagtggccatgatattgctgagaactattatgagaatggtgcggatgtgacgatgcttcaaagaagtggaacttacgtcttatcacttgacaggggcgttttcatgcttcacgagggaatgcatgctgataatggaccgccgactgaggaatgcgatattgttggcgaaagtttgcctttccctgttcagtttgcgctgaacgtagaagggaccaagcgcatctccgcagccgacaaagagatcatagagggcctagagcgtgttggcttcaaattggactactcaattgacggtggcggcattgctcgtctgtattttacgcgtggcggtggttactacatcgatgttggctgcagcaagctcatcatcgatggcaagattaaagtccaccagagccccaaaggcatctcaggatttagctctgatgggctcgtactccaggatggcaacgagctaaaagcagatgttgtcatcttggctacaggttatgacaatatgaagaccacggcgcaggagatcatgggcgacaaagtcgcggcgcgactgaaggacgtgtgggatcttgatgaagaaggcgagctgaatgcgatgtggcgacccagcggacatccaaacttctggtatatgggtggtaatcttgccatctgcagaatctactccaagtatgtagcattacagatcaaagcatatgaagagggtttaaacccaacgccgaatggatcgcaaaacggaatttgaaggcacatgttttcttaggggtgaggtttcgggcttcttaggatgctgcgcataagcgcgggagtgcagtagacaatgaacaagactacctagggacgaaattattttttctgtcgaaggggttatagatttaggtagaatttaataagatgcaaagactcatgggtcagacaattcagttgaatagttcccaatatcgctgtggtatgcgaacatcccgcca

SEQ ID NO: 893 - DNA, 813 bp, Muscodor strobelii
  misc_feature: SGI cDNA ID NO. 559878
  misc_feature: Encodes the peptide sequence at SEQ ID NO 894
atgtctctacggctaaaaagcaaagtcagcattgtgacgggatcttcttcgggtctcggcagagcaattgcccttcgctatgctcaagaaggtgctgttgtcgtatgtgcagacttgaaaccgtctgctcgtattccagatcttgaagacagcccaagcgacactcatgacttgattgagcagaaaggaggcaaggcgacttttgttgagaccgatgttacactggcaagtaattgggagaaactcgtcaatgttaccgtagaaacctacggaagactggatattttggtcaacaacgcaggtgtgggccttgaggctctgcggccccctgcacagattcacaacaccgatgaagatctgtgggacaagactatgttggtcaataccaagtctgtatttctaggatgtcggtatgcgatcgcgcagatgttagctcaagagcatcatccctctggagaccgaggctggattgtgaatatctcctccatcatggccttgattggagggccaagcaatccatcgtattgtgcttcgaaaggagctgttagtagcttgacaagacaagtagcactcgactatgcaccacatcgaattcatgtcaatgcaatttgtccgggttacatccaaacagccatcttcaaggaaacgacagcaagagaaacaactttagaggatttgcgacgaaaacatcccttcaacggacctgggaagccagaagatgtcgctagttttgcggtagtattggctagcgaggacgcgcggtgggttactggcacttcaatggcggttgatgggggttacacagctagatag

SEQ ID NO: 894 - protein, 270 aa, Muscodor strobelii
  misc_feature: SGI Peptide ID NO. 559878
  misc_feature (8)..(194): Pfam Id: PF00106 Pfam Desc: short chain dehydrogenase
  misc_feature (2)..(270): NCBI GI: 259484319 Blast Desc: TPA: conserved [Aspergillus nidulans FGSC A4]
  misc_feature (2)..(270): NCBI GI: 67902798 Blast Desc: AN8386.2 [Aspergillus nidulans FGSC A4] gi|40747852|gb|EAA67008.1| AN8386.2 [Aspergillus nidulans FGSC A4]
  misc_feature (2)..(270): NCBI GI: 255938518 Blast Desc: Pc14g00340 [Penicillium chrysogenum Wisconsin 54-1255] gi|211584650|emb|CAP74175.1| Pc14g00340 [Penicillium chrysogenum Wisconsin 54-1255]
  misc_feature (3)..(270): NCBI GI: 145259194 Blast Desc: An04g09410 [Aspergillus niger] gi|134074917|emb|CAK39026.1| protein product [Aspergillus niger]
  misc_feature (4)..(270): NCBI GI: 242803924 Blast Desc: short-chain dehydrogenase, [Talaromyces stipitatus ATCC 10500] gi|218717616|gb|EED17037.1| short-chain dehydrogenase, [Talaromyces stipitatus ATCC 10500]
  misc_feature (4)..(270): NCBI GI: 238502325 Blast Desc: gluconate 5-dehydrogenase, [Aspergillus flavus NRRL3357] gi|220691206|gb|EED47554.1| gluconate 5-dehydrogenase, [Aspergillus flavus NRRL3357]
  misc_feature (4)..(270): NCBI GI: 169775683 Blast Desc: [Aspergillus oryzae RIB40] gi|83771043|dbj|BAE61175.1| protein product [Aspergillus oryzae]
  misc_feature (4)..(270): NCBI GI: 256727224 Blast Desc: NECHADRAFT_90624 [Nectria haematococca mpVI 77-13-4]
  misc_feature (4)..(270): NCBI GI: 46110769 Blast Desc: FG02266.1 [Gibberella zeae PH-1]
  misc_feature (4)..(269): NCBI GI: 238497219 Blast Desc: short chain type dehydrogenase, [Aspergillus flavus NRRL3357] gi|220694725|gb|EED51069.1| short chain type dehydrogenase, [Aspergillus flavus NRRL3357]
  misc_feature (1)..(268): SWISSPROT Homolog: EC 1.1.1.47 Glucose 1-dehydrogenase
MSLRLKSKVSIVTGSSSGLGRAIALRYAQEGAVVVCADLKPSARIPDLEDSPSDTHDLIEQKGGKATFVETDVTLASNWEKLVNVTVETYGRLDILVNNAGVGLEALRPPAQIHNTDEDLWDKTMLVNTKSVFLGCRYAIAQMLAQEHHPSGDRGWIVNISSIMALIGGPSNPSYCASKGAVSSLTRQVALDYAPHRIHVNAICPGYIQTAIFKETTARETTLEDLRRKHPFNGPGKPEDVASFAVVLASEDARWVTGTSMAVDGGYTAR

SEQ ID NO: 895 - DNA, 749 bp, Muscodor strobelii
  misc_feature: SGI EST ID NO. CUFF.2456.0
  misc_feature: Variant of the nucleotide sequence at SEQ ID NO 893
gagcaattgcccttcgctatgctcaagaaggtgctgttgtcgtatgtgcagacttgaaaccgtctgctcgtattccagatcttgaagacagcccaagcgacactcatgacttgattgagcagaaaggaggcaaggcgacttttgttgagaccgatgttacactggcaagtaattgggagaaactcgtcaatgttaccgtagaaacctacggaagactggatatgtgagcggaaataacatcccttgatctcggcagtgtaatactgatcgagtatccagtttggtcaacaacgcaggtgtgggccttgaggctctgcggccccctgcacagattcacaacaccgatgaagatctgtgggacaagactatgttggtcaataccaagtctgtatttctaggatgtcggtatgcgatcgcgcagatgttagctcaagagcatcatccctctggagaccgaggctggattgtgaatatctcctccatcatggccttgattggagggccaagcaatccatcgtattgtgcttcgaaaggagctgttagtagcttgacaagacaagtagcactcgactatgcaccacatcgaattcatgtcaatgcaatttgtccgggttacatccaaacagccatcttcaaggaaacgacagcaagagaaacaactttagaggatttgcgacgaaaacatcccttcaacggacctgggaagccagaagatgtcgctagttttgcggtagtattggctagcgagg

SEQ ID NO: 896 - DNA, 1563 bp, Muscodor strobelii
  misc_feature: SGI cDNA ID NO. 559879
  misc_feature: Encodes the peptide sequence at SEQ ID NO 897
atgttggaaggttacgctctcgaggtcactctgaccgcagctaactcggctgcccaagcctggtacgggtacgatcagggtgttatcagtggtctactcatcagcccggattttattaagacttttccgcaaaccaagaatgccgacattcagggcatcaccgcaagctccttttctcttggcaatcttgttggatgcctggttgctgcagtattcggtggtcggctaggaaggaagaatacactacgtattggtggagtaatcagtctcatcggcgccatcttacaattcactgcctactcgtttccccaattggtgttggggcgagttattaatggtgtaggaaatggaatgttatcatctacatgtggtatctttcaagctgaatcatgtgctagcgagagacgaggaaaactttccgtcattgtcgttctccacaacgtcgtgttctactgtcttgggacatggatcacacttggcacctcctttgctaccggtgggtggcagtggcgtctcccactcgcactgcaggctattccttgtatcgcaatgatgacattcttgacatttgtgcctgagagcccaagatggctcttgatgaataaccgaaccgaagaaggactcgacgcaattcgtcgatattctggcattgggctctctgaatacgacccgattgttcagacacaataccagtcgattaaaggcgcaatcatgatcgagaaagagacgaaggtttcattccgcaccgttttggctcgcaaggatcgctccaatcatttgaaacgcctgctcctaggttgcggtgggcagttcatgcagcaattcagcggtatcaacgcgctcaactattacttcgcgatcattctgaccacaaaccttggacttagcgagctcctcgccaggatcttgaatggtgttaatgcgacttcctacctgatatcttctgcccttgcattctggattattgatagagccggacgacgtcctctgatgctcactggattggtgttgcagtgcttggcctacatattcgtggcgattgccgtagcattgctgccaactaatccttatgcatggggcgcagtcgccgtatcgtttctattcttctactatgcggcttttggctgtacgtggggaatggttccgtgggtctatcagtccgaggtcaattcgctggcgatgcgaacggttggagctgctgccgctacatctacaaactggctctttggtttcgttgccacccaattcactcccaccggaatcgcgaatattggttacaagttctacatcattttcgccgtcttcaactttgccttcatatttgttgtttacttcctgtatcccgagacggctaaccgaacactcgaagatctcgacgcctactttgaccgtgactcgggccatcccactatcatcccgattggcgacaagatgtctaagtcttcgaagcgtccacaggagcttatcgatgcagaggctagtcgtatcgctatgacagcgaatgtggacaagaaggtttccggcattgaagacactgctgcagagcatgatgaatttgcttaa

SEQ ID NO: 897 - protein, 520 aa, Muscodor strobelii
  misc_feature: SGI Peptide ID NO. 559879
  misc_feature (11)..(414): Pfam Id: PF07690 Pfam Desc: Major Facilitator Superfamily
  misc_feature (9)..(462): Pfam Id: PF00083 Pfam Desc: Sugar (and other) transporter
  misc_feature (47)..(414): Pfam Id: PF07690 Pfam Desc: Major Facilitator Superfamily
  misc_feature (2)..(511): NCBI GI: 254573802 Blast Desc: Glycerol proton symporter of the plasma membrane, subject to glucose-induced inactivation [Pichia pastoris GS115] gi|238033809|emb|CAY71831.1| Glycerol proton symporter of the to
  misc_feature (20)..(516): NCBI GI: 255939340 Blast Desc: Pc16g00140 [Penicillium chrysogenum Wisconsin 54-1255] gi|211585062|emb|CAP92684.1| Pc16g00140 [Penicillium chrysogenum Wisconsin 54-1255]
  misc_feature (2)..(509): NCBI GI: 242792343 Blast Desc: sugar transporter, [Talaromyces stipitatus ATCC 10500] gi|218718521|gb|EED17941.1| sugar transporter, [Talaromyces stipitatus ATCC 10500]
  misc_feature (14)..(520): NCBI GI: 190348609 Blast Desc: PGUG_05190 [Pichia guilliermondii ATCC 6260]
  misc_feature (14)..(520): NCBI GI: 146412398 Blast Desc: PGUG_05190 [Pichia guilliermondii ATCC 6260]
  misc_feature (2)..(465): NCBI GI: 115437472 Blast Desc: [Aspergillus terreus NIH2624] gi|114188634|gb|EAU30334.1| [Aspergillus terreus NIH2624]
  misc_feature (2)..(518): NCBI GI: 116203069 Blast Desc: CHGG_09419 [Chaetomium globosum CBS 148.51] gi|88177937|gb|EAQ85405.1| CHGG_09419 [Chaetomium globosum CBS 148.51]
  misc_feature (2)..(518): NCBI GI: 154305818 Blast Desc: BC1G_08140 [Botryotinia fuckeliana B05.10] gi|150853025|gb|EDN28217.1| BC1G_08140 [Botryotinia fuckeliana B05.10]
  misc_feature (2)..(518): NCBI GI: 156055628 Blast Desc: SS1G_05166 [Sclerotinia sclerotiorum 1980] gi|154702950|gb|EDO02689.1| SS1G_05166 [Sclerotinia sclerotiorum 1980]
  misc_feature (2)..(519): NCBI GI: 255938367 Blast Desc: Pc13g15590 [Penicillium chrysogenum Wisconsin 54-1255] gi|211584574|emb|CAP92628.1| Pc13g15590 [Penicillium chrysogenum Wisconsin 54-1255]
MLEGYALEVTLTAANSAAQAWYGYDQGVISGLLISPDFIKTFPQTKNADIQGITASSFSLGNLVGCLVAAVFGGRLGRKNTLRIGGVISLIGAILQFTAYSFPQLVLGRVINGVGNGMLSSTCGIFQAESCASERRGKLSVIVVLHNVVFYCLGTWITLGTSFATGGWQWRLPLALQAIPCIAMMTFLTFVPESPRWLLMNNRTEEGLDAIRRYSGIGLSEYDPIVQTQYQSIKGAIMIEKETKVSFRTVLARKDRSNHLKRLLLGCGGQFMQQFSGINALNYYFAIILTTNLGLSELLARILNGVNATSYLISSALAFWIIDRAGRRPLMLTGLVLQCLAYIFVAIAVALLPTNPYAWGAVAVSFLFFYYAAFGCTWGMVPWVYQSEVNSLAMRTVGAAAATSTNWLFGFVATQFTPTGIANIGYKFYIIFAVFNFAFIFVVYFLYPETANRTLEDLDAYFDRDSGHPTIIPIGDKMSKSSKRPQELIDAEASRIAMTANVDKKVSGIEDTAAEHDEFA

SEQ ID NO: 898 - DNA, 1863 bp, Muscodor strobelii
  misc_feature: SGI cDNA ID NO. 559880
  misc_feature: Encodes the peptide sequence at SEQ ID NO 899
atggatccggtttctctcactttggcaattgtgccgttggtcggaggcgcgatcaaaacgtatagggctttacacatgaagcttaagagcgtatgtcattactcccgagagattcgtcgggcacggcagccttttgagcgacaacgagacattttcctcaatgagatacacctactagtcaggaaagtcattgaggatgcgtccgtggtggaatctatgatcgacaatgcagagcatgttgcctggcatagcgaagagcttgatgcgggactgaagaagactcttggtcgtagttataaaacatgcttggaaatcattacgcacgttacggaagtaaacacgaagctggcggagcagatccggtgcttcgatgaaatcgagacattgcgagaagaggtaagtcgacctgatgctctcagacactatacaactgacggtcaacagagcaaaccgctcaaagagaccgcgaagcaaatacagaggaaggtaaacctggcatggaattgctctgaattcgataagactatagaaactctccgagactcaaatggcgacttaagacatctccgcgaacagatcgacggtcttcagagacctattgaaagaccaaagcaagtcagcaaacagctaccacttgaatgtagcgactataagaaaattcaaagagctagtaatgctctatatgttgcacttgagacgtcttggacgagtccccatggttcatgcaacatggcaacaaataaacacgcagtccagctatttgctgaagcgagtgtcaggggagcagtgcaaatgaaaatcacggtatcctgcgacggacttggatcagtaaactcatctcagaggcggtcacaaaagttacaggtgcaatcacaaatcctcgattggattgaatccggaatgagttcgcctctccagtcggatggcggacgtgaagaacgtcttcggactaaatctggagaagcccacattaccactccagaattcaactcttgcgcctcagagccaatatctccgccaccttcatcagactgcacagttacagcccagctcaaacctaggaatcttttcggacgtaacatatgctcaactatcgctcagcttacacctatagcaaacaatcaggatcagacactttgcataggatttcttgatgtctactgtggagagagctatcgacacatactctatcgtgagaaacccaatgagaaatgtgaattgaattgtatcatctcgatgagacaagtcatgtcatttcctgttgagtgctcattttcaattattgatcagctaaagctggcacgcaacttggctgttgctgtgttaaaattcaatagtactccgtggttacggcagtactttaaaattgacgacctacatttcgcacaaataggatgtgacttgccagaatctctgcggacgctgtttttcaacgccgaattcgctggtaacgcaggtcatagcaataacagcttaactatgcaagatagcgaatcagtagaaaaggcgtcaatatccgaagccatcaaggatgctcaattacaatacggaatacgtaatttgactctctggagtcttggggtgattttactccaaattgggagctggcgcatcctagacgcaccagacgacgtgcgcattgtccggaaactatcctcgcaaatttcgccgctcggtccccgatatctacaactcacgagacgatgcttggactgtgattttggctttggggacgatctttccaggccacgtctgcagcaagctttgtacgagactgttgtttgcgagctttcggagatgattgaaagtcttgacctgcacgaggagatagactgcacagcgttaaacccaacttcaaagtga

SEQ ID NO: 899 - protein, 620 aa, Muscodor strobelii
  misc_feature: SGI Peptide ID NO. 559880
  misc_feature (2)..(606): NCBI GI: 212544910 Blast Desc: conserved [Penicillium marneffei ATCC 18224] gi|210065578|gb|EEA19672.1| conserved [Penicillium marneffei ATCC 18224]
  misc_feature (73)..(609): NCBI GI: 46123135 Blast Desc: FG05945.1 [Gibberella zeae PH-1]
  misc_feature (82)..(606): NCBI GI: 256725461 Blast Desc: NECHADRAFT_23646 [Nectria haematococca mpVI 77-13-4]
  misc_feature (1)..(606): NCBI GI: 189198668 Blast Desc: [Pyrenophora tritici-repentis Pt-1C-BFP] gi|187982770|gb|EDU48258.1| [Pyrenophora tritici-repentis Pt-1C-BFP]
  misc_feature (79)..(611): NCBI GI: 261357748 Blast Desc: conserved [Verticillium albo-atrum VaMs.102]
  misc_feature (1)..(604): NCBI GI: 169624074 Blast Desc: SNOG_15288 [Phaeosphaeria nodorum SN15] gi|111056101|gb|EAT77221.1| SNOG_15288 [Phaeosphaeria nodorum SN15]
  misc_feature (429)..(604): NCBI GI: 169624730 Blast Desc: SNOG_15626 [Phaeosphaeria nodorum SN15] gi|160705227|gb|EAT77001.2| SNOG_15626 [Phaeosphaeria nodorum SN15]
  misc_feature (6)..(599): NCBI GI: 169599531 Blast Desc: SNOG_02586 [Phaeosphaeria nodorum SN15] gi|111068197|gb|EAT89317.1| SNOG_02586 [Phaeosphaeria nodorum SN15]
  misc_feature (377)..(600): NCBI GI: 189203199 Blast Desc: conserved [Pyrenophora tritici-repentis Pt-1C-BFP] gi|187985034|gb|EDU50522.1| conserved [Pyrenophora tritici-repentis Pt-1C-BFP]
  misc_feature (382)..(594): NCBI GI: 145604108 Blast Desc: MGG_10728 [Magnaporthe grisea 70-15] gi|145012179|gb|EDJ96835.1| MGG_10728 [Magnaporthe grisea 70-15]
MDPVSLTLAIVPLVGGAIKTYRALHMKLKSVCHYSREIRRARQPFERQRDIFLNEIHLLVRKVIEDASVVESMIDNAEHVAWHSEELDAGLKKTLGRSYKTCLEIITHVTEVNTKLAEQIRCFDEIETLREEVSRPDALRHYTTDGQQSKPLKETAKQIQRKVNLAWNCSEFDKTIETLRDSNGDLRHLREQIDGLQRPIERPKQVSKQLPLECSDYKKIQRASNALYVALETSWTSPHGSCNMATNKHAVQLFAEASVRGAVQMKITVSCDGLGSVNSSQRRSQKLQVQSQILDWIESGMSSPLQSDGGREERLRTKSGEAHITTPEFNSCASEPISPPPSSDCTVTAQLKPRNLFGRNICSTIAQLTPIANNQDQTLCIGFLDVYCGESYRHILYREKPNEKCELNCIISMRQVMSFPVECSFSIIDQLKLARNLAVAVLKFNSTPWLRQYFKIDDLHFAQIGCDLPESLRTLFFNAEFAGNAGHSNNSLTMQDSESVEKASISEAIKDAQLQYGIRNLTLWSLGVILLQIGSWRILDAPDDVRIVRKLSSQISPLGPRYLQLTRRCLDCDFGFGDDLSRPRLQQALYETVVCELSEMIESLDLHEEIDCTALNPTSK

SEQ ID NO: 900 - DNA, 1581 bp, Muscodor strobelii
  misc_feature: SGI cDNA ID NO. 559881
  misc_feature: Encodes the peptide sequence at SEQ ID NO 901
atgcgcacatcagaggcttttcttatagctagcctccaccgagccacggctttgcttacaacgaagacacagaactgttcatcttttgtgtccgatgtggacttcagtcactacaatgcgacatttctgaatacaacttaccatgatccgggaacagtcaatatcagcggcttggctaataacattccattttgcgagctttatggcgccgttcaatacacctctcaagcacggcttgtcttcacgctatggctgccaccagttgagcaatatcagaatcggtttcttgctgtcggagatggcggtttcgccggccttatcgacacgcaatccatgatgatacagctaaatagtggtatgggtttcgccgtcgcagcaggggatggtggacatgatgcctacgcagaaacgaacggaacagcaggtggttatgacggcttgtacatcccgttctttcacaaccaggatactacagaggcatggattcataacgccgtcagtcttttcaccccattagcgaaggacttgactgctgcatactataaccggctgccgcggtatatgtactacgcaggatgttctacaggcggtgctcagggcttcgctttggctgaataccatcctgaattattcgatggcctatacaccggggcgccaggcaactattatgatcagctcatgttgagtttcctatggaactcacaggctctgaagggcgatgcatatctgcctcaagaaaccctcgagttcatcacagccgcggccctggccgagtgtgatgagttagacggcgtcaaggacggtgtgattgagaatccattcaattgccccttccaaattgaaactctagcttgcgacgacaacgacgacccgacgaaggagatatacctttccgctcgtgataatgtcacgtgcttgacaggcgcgcaagttaccgctgcgaagaagatctatgcaggaccgcgcactgtcgatactaatgaattgatctaccccggatttgcacctggaagcgaggctcagtggtatgaaatggcgaccaatctcgtcagttcatacacaatccccctattccagaatctcgtataccaaaacctatcatgggatgcatcgtccttcggctggaccagtcgagaggttaatttcatcaacgaaaaggcggatcaatacattgatggcctaggaaccaatctaacagcctttcgagcgcgcgaagggaagatgttgtcggtccagggttgggcggaccaattcaactccccatactggcccatgatacacatggaagagcttgagaatgcacttccggctggacagcgcattagcgacttctatcatttgttcatggcgccaggtgctggtcattgtggcccggcaatgtatgttccacaagcaccggagtattggaatgttatggggccattaatcaactgggtcgagcgcgatgtaaagcctcagagcattttggcatctcagccactagatggcagtaatcggactcggaagctttgtccttggccagcgtcagcacggtacgttagtggggacccggacaattgggcctcctttgtgtgcgagtga

SEQ ID NO: 901 - protein, 526 aa, Muscodor strobelii
  misc_feature: SGI Peptide ID NO. 559881
  misc_feature (65)..(526): Pfam Id: PF07519 Pfam Desc: Tannase and feruloyl esterase
  misc_feature (16)..(525): NCBI GI: 46114750 Blast Desc: FG03217.1 [Gibberella zeae PH-1]
  misc_feature (54)..(525): NCBI GI: 238508052 Blast Desc: feruloyl esterase B precursor, [Aspergillus flavus NRRL3357] gi|220688746|gb|EED45098.1| feruloyl esterase B precursor, [Aspergillus flavus NRRL3357]
  misc_feature (54)..(525): NCBI GI: 169784738 Blast Desc: [Aspergillus oryzae RIB40] gi|83775577|dbj|BAE65697.1| protein product [Aspergillus oryzae]
  misc_feature (24)..(521): NCBI GI: 145608024 Blast Desc: MGG_09732 [Magnaporthe grisea 70-15] gi|145015488|gb|EDK00025.1| MGG_09732 [Magnaporthe grisea 70-15]
  misc_feature (51)..(525): NCBI GI: 167584401 Blast Desc: tannase precursor [Burkholderia ubonensis Bu]
  misc_feature (64)..(525): NCBI GI: 221209507 Blast Desc: tannase [Burkholderia multivorans CGD1] gi|221170195|gb|EEE02661.1| tannase [Burkholderia multivorans CGD1]
  misc_feature (58)..(525): NCBI GI: 167644561 Blast Desc: feruloyl esterase [Caulobacter sp. K31] gi|167346991|gb|ABZ69726.1| Feruloyl esterase [Caulobacter sp. K31]
  misc_feature (25)..(520): NCBI GI: 169769242 Blast Desc: [Aspergillus oryzae RIB40] gi|83766949|dbj|BAE57089.1| protein product [Aspergillus oryzae]
  misc_feature (25)..(520): NCBI GI: 238501692 Blast Desc: feruloyl esterase, [Aspergillus flavus NRRL3357] gi|220692317|gb|EED48664.1| feruloyl esterase, [Aspergillus flavus NRRL3357]
  misc_feature (64)..(525): NCBI GI: 77747869 Blast Desc: tannase precursor [Xanthomonas campestris pv. campestris str. ATCC 33913] gi|77761191|ref|YP_243163.2| tannase precursor [Xanthomonas campestris pv. campestris str. 8004]
  misc_feature (26)..(520): SWISSPROT Homolog: EC 3.1.1.73 Feruloyl esterase
MRTSEAFLIASLHRATALLTTKTQNCSSFVSDVDFSHYNATFLNTTYHDPGTVNISGLANNIPFCELYGAVQYTSQARLVFTLWLPPVEQYQNRFLAVGDGGFAGLIDTQSMMIQLNSGMGFAVAAGDGGHDAYAETNGTAGGYDGLYIPFFHNQDTTEAWIHNAVSLFTPLAKDLTAAYYNRLPRYMYYAGCSTGGAQGFALAEYHPELFDGLYTGAPGNYYDQLMLSFLWNSQALKGDAYLPQETLEFITAAALAECDELDGVKDGVIENPFNCPFQIETLACDDNDDPTKEIYLSARDNVTCLTGAQVTAAKKIYAGPRTVDTNELIYPGFAPGSEAQWYEMATNLVSSYTIPLFQNLVYQNLSWDASSFGWTSREVNFINEKADQYIDGLGTNLTAFRAREGKMLSVQGWADQFNSPYWPMIHMEELENALPAGQRISDFYHLFMAPGAGHCGPAMYVPQAPEYWNVMGPLINWVERDVKPQSILASQPLDGSNRTRKLCPWPASARYVSGDPDNWASFVCE

SEQ ID NO: 902 - DNA, 1467 bp, Muscodor strobelii
  misc_feature: SGI cDNA ID NO. 559882
  misc_feature: Encodes the peptide sequence at SEQ ID NO 903
atgtcagccgacgaccagcagttctgggatctgctctcctccctacccacgcacattcaccagtattccggcaatgtcgcggagtacgtcgacaaggctgtcgatcaagctgccaaccacgtacgagatgctctagccgcttcgccatggttacccgagatagcccggccgagggccaccccgagaccgccacccgtccaggtcgtgtccctttccacgtgggagaggatgcaagactgggtggcacggcataagatcttgacgggagtcattgtttgcgcctttggatacaccacgtaccgagtcgtccaccagagcaagctgctccgcaagtcgagaagagcgaagcgggcgaagaacggagggcgactggaagttgtcgtcatcgccggatcaccatcgctcccgctcactagattactgtccttggacctggagaggaagggcttcatcgtctacattgtgtgcaacactatcgatgatgagctgttggtgcagaacctgtcacggccggacattaaagggttgagtatcgacatcaccgatcctccaagcgccggcgcctccatcgaacgctttgcccaatacctccagatcccccacgccgccgtaccacgcgcaaagccaacctacctcaccctaacctccgtgatcctcatcccatctctgcactatgagacatcacccatcgccaccatcccgccctccaacttcgccaacctgttcaacacccacctactccacccaatcctaacaatacaatccttcctccccctcctaacctcccgcctcacaccggccccggtaccatactccaccacaaccgagacgacccccacaaaagcgcccaaagtcctagtcttcaccccctcaataatatcctccataaacccacccttccacgcacccgaagcaacagtgtgctccgcactcagcgcattcacagaagttctcacagccgaactacgccccctcggaatccccgtaacgcacgtccaactcggaaccttcgacttctcaggattccaacgaccgttccccattccctctgccgaaacctctcaatggcccgaacccgcccgtctagcctacgcgcgaaactacgagtcccagtccatatccgccatagcagcaggtcgcatccggggtctcaaggggtcttctctcagagacttgcataatgccgttttcgacgtaatcgacggatctcaaaactcatctctcatccgcgttggtttgggagccggattatacggattcgtgggacgttgggctccgcgaggagtcgtggcttggatgatggggatacggaaagttgatgagcttagtatgtactcctgggagggttcctaccaggggagctcgagtgagaagagcgggagtgagagtggtgagattgttgacgtggacgaagagggaagcgaagaagtgggtaatgactctggtcttaatgtttggaaggactag

SEQ ID NO: 903 - protein, 488 aa, Muscodor strobelii
  misc_feature: SGI Peptide ID NO. 559882
  misc_feature (122)..(431): Pfam Id: PF08643 Pfam Desc: Fungal family of function (DUF1776)
  misc_feature (1)..(487): NCBI GI: 116182322 Blast Desc: CHGG_01789 [Chaetomium globosum CBS 148.51] gi|88186086|gb|EAQ93554.1| CHGG_01789 [Chaetomium globosum CBS 148.51]
  misc_feature (1)..(487): NCBI GI: 39974349 Blast Desc: MGG_00679 [Magnaporthe grisea 70-15] gi|145018402|gb|EDK02681.1| MGG_00679 [Magnaporthe grisea 70-15]
  misc_feature (1)..(465): NCBI GI: 256735397 Blast Desc: NECHADRAFT_57560 [Nectria haematococca mpVI 77-13-4]
  misc_feature (12)..(487): NCBI GI: 171695378 Blast Desc: protein product [Podospora anserina] gi|170947931|emb|CAP60095.1| protein product [Podospora anserina]
  misc_feature (1)..(478): NCBI GI: 85117436 Blast Desc: NCU08354 [Neurospora crassa OR74A] gi|28927063|gb|EAA36021.1| conserved [Neurospora crassa OR74A]
  misc_feature (1)..(337): NCBI GI: 261358647 Blast Desc: conserved [Verticillium albo-atrum VaMs.102]
  misc_feature (119)..(445): NCBI GI: 46108146 Blast Desc: FG00955.1 [Gibberella zeae PH-1]
  misc_feature (1)..(457): NCBI GI: 154321445 Blast Desc: BC1G_01597 [Botryotinia fuckeliana B05.10] gi|150852135|gb|EDN27327.1| BC1G_01597 [Botryotinia fuckeliana B05.10]
  misc_feature (1)..(438): NCBI GI: 156054092 Blast Desc: SS1G_05894 [Sclerotinia sclerotiorum 1980] gi|154703674|gb|EDO03413.1| SS1G_05894 [Sclerotinia sclerotiorum 1980]
  misc_feature (1)..(458): NCBI GI: 189203633 Blast Desc: conserved [Pyrenophora tritici-repentis Pt-1C-BFP] gi|187985251|gb|EDU50739.1| conserved [Pyrenophora tritici-repentis Pt-1C-BFP]
MSADDQQFWDLLSSLPTHIHQYSGNVAEYVDKAVDQAANHVRDALAASPWLPEIARPRATPRPPPVQVVSLSTWERMQDWVARHKILTGVIVCAFGYTTYRVVHQSKLLRKSRRAKRAKNGGRLEVVVIAGSPSLPLTRLLSLDLERKGFIVYIVCNTIDDELLVQNLSRPDIKGLSIDITDPPSAGASIERFAQYLQIPHAAVPRAKPTYLTLTSVILIPSLHYETSPIATIPPSNFANLFNTHLLHPILTIQSFLPLLTSRLTPAPVPYSTTTETTPTKAPKVLVFTPSIISSINPPFHAPEATVCSALSAFTEVLTAELRPLGIPVTHVQLGTFDFSGFQRPFPIPSAETSQWPEPARLAYARNYESQSISAIAAGRIRGLKGSSLRDLHNAVFDVIDGSQNSSLIRVGLGAGLYGFVGRWAPRGVVAWMMGIRKVDELSMYSWEGSYQGSSSEKSGSESGEIVDVDEEGSEEVGNDSGLNVWKD

SEQ ID NO: 904 - DNA, 3791 bp, Muscodor strobelii
  misc_feature: SGI EST ID NO. CUFF.2977.0
  misc_feature: Variant of the nucleotide sequence at SEQ ID NO 902
tatggtggtaactcgggcgctggaccgcaggtggcgtcaagggtgccggggtgcttgacggagagtttacatcacggtgcagattatttgttgacgcccgtgcggagactgtaatctacccagtcaatgccgatagtcatcatcaacccccatcacttttccattccgtccatatttccttcatctttaatagtattaatcgtctcgttttcttactggatagagggatacacacatcatgtcagccgacgaccagcagttctgggatctggtgagtacctgtttctatccgattgggctgcaaactgacttggcatgtgactgatagctctcctccctacccacgcacattcaccagtattccggcaatgtcgcggagtacgtcgacaaggctgtcgatcaagctgccaaccacgtacgagatgctctagccgcttcgccatggttacccgagatagcccggccgagggccaccccgagaccgccacccgtccaggtcgtgtccctttccacgtgggagaggatgcaagactgggtggcacggcataagatcttgacgggagtcattgtttgcgcctttggatacaccacgtaccgagtcgtccaccagagcaagctgctccgcaagtcgagaagagcgaagcgggcgaagaacggagggcgactggaagttgtcgtcatcgccggatcaccatcgctcccgctcactagattactgtccttggacctggagaggaagggcttcatcgtctacattgtgtgcaacactatcgatgatgagctgttggtgcagaacctgtcacggccggacattaaagggttgagtatcgacatcaccgatcctccaagcgccggcgcctccatcgaacgctttgcccaatacctccagatcccccacgccgccgtaccacgcgcaaagccaacctacctcaccctaacctccgtgatcctcatcccatctctgcactatgagacatcacccatcgccaccatcccgccctccaacttcgccaacctgttcaacacccacctactccacccaatcctaacaatacaatccttcctccccctcctaacctcccgcctcacaccggccccggtaccatactccaccacaaccgagacgacccccacaaaagcgcccaaagtcctagtcttcaccccctcaataatatcctccataaacccacccttccacgcacccgaagcaacagtgtgctccgcactcagcgcattcacagaagttctcacagccgaactacgccccctcggaatccccgtaacgcacgtccaactcggaaccttcgacttctcaggattccaacgaccgttccccattccctctgccgaaacctctcaatggcccgaacccgcccgtctagcctacgcgcgaaactacgagtcccagtccatatccgccatagcagcaggtcgcatccggggtctcaaggggtcttctctcagagacttgcataatgccgttttcgacgtaatcgacggatctcaaaactcatctctcatccgcgttggtttgggagccggattatacggattcgtgggacgttgggctccgcgaggagtcgtggcttggatgatggggatacggaaagttgatgagcttagtatgtactcctgggagggttcctaccaggggagctcgagtgagaagagcgggagtgagagtggtgagattgttgacgtggacgaagagggaagcgaagaagtgggtaatgactctggtcttaatgtttggaaggactaggagcttctcagacatttagctccgggttggagatgattgatgtaactaaggaaaattcggagtcctgtatatatggcgtgttttatggactacctcacgcatctcatggtgtttttgcgctcgcttgtatagggctttggcggatcaatcgctacttatgacactataatagagaaattgaaacaattgcaataagacgtaagagcaacgaagaatttgagttcatgtttattagtgagtatctacgtctattttactccatgaagtccacgcgaccttaggatctcatctgttcattatagaaatgtaatatcttgagatgagacatagaacgagaaattcacaacatagagtagcatgattcatcgtcttaatgtgtcccgttgcggaaggcgtgggcatgagatatgctgctcctgttgtaactattctctttaccgttactttggaaactttgacataaagtaggctgtttgtgatgcgttcccgccatcctgctagactgcagagacccgctgagtgtcagttacacctagtcggcaaggacgcattttatatcgaccgacggtctcgagtatggggtgaattcgcgtcgtctcttctacactctcgctaatgcaactcgcgaatgatcgaggcagttctgtcatcacctcgtaaaccagtacgcgctcccgagttctcgatcagtgtacatctaagcagtgctcattgctccgaggccaaaagcttcgttagctatagtgagcgatgatgcaggtatatcgccgatctttgcgggcagtgtcgacggaatatgggcgcttctactcgaccatctggctatgaatgtagcgaccgatcgatctgtcttcctccttggctagagagacacgataagagacgaagagacttggttggtaagcttgtaaatccaccaagtcatcggattcttggtgtagtagtcgataaattgtgctggccaaattgtggcctttcctcgggtggttatggctgccaccaggggtgcaactggagtctcaaagatgacttgagctcaatctctcatctcataacttaagagagcagatctcaatgatgacctcgtcccctaaacttccgatcacctctgccacgccatctgcctcctcttccaccaaacccacgatcaccgcgcccaccaccaggcttgtcgtctctgtctcgccttccgaaatccctctcgtcatcatcatctcgtctcggctcctcaataacgacgtcgctcttcttgatcggcggctccagattcttctcccaccgcggatgagcaccttccgtgcacgccttcccatcaggacagaatccagcaagataatatgcgcacagcttcctgcgcacatgtctcttactgcactccggacccaggggacagaagcccttctcataatgcggacaaggcggtaacttgctcatcggatcaatatgcaagtacaggcactcatcaccgttggagcagtatccattgcgaacgaagaagttgcactccggcatcttacgcaggttgtactcgtgcagaaattcgcacccttcgcctttcttgcatagtgcgcggagccagtgcttgcagactagggagttgtaggagctgttgttagcttgagcggctgggggctgagatgccgcttgaggagatgtaagactgtggttgtaattttgccgcaggaagggcgtgaatgtgaatgtgtaggagggcgcggtgtggtcgaggatttgttgcgcgagggcgctggacgacggtgcggtcgccgccattttgcgtcactgcgaggtcgtcgtcggggctaatatgagatattccgtttgtgtgattgctgatggagaagtctgaaaaaaagtggtgttgtcgtggccgccttgacttcgtaagatggagacggttggcgttgtaatgtggtgagcaggaatgttgaaggttgcagatgtgtcgtcccgaatcagcacaaggcttcaagcccccagctagatgattgctgcttgccactggccaggtgcctgcctagcaaatcgg

SEQ ID NO: 905 - DNA, 702 bp, Muscodor strobelii
  misc_feature: SGI cDNA ID NO. 559883
  misc_feature: Encodes the peptide sequence at SEQ ID NO 906
atggcggcgaccgcaccgtcgtccagcgccctcgcgcaacaaatcctcgaccacaccgcgccctcctacacattcacattcacgcccttcctgcggcaaaattacaaccacagtcttacatctcctcaagcggcatctcagcccccagccgctcaagctaacaacagctcctacaactccctagtctgcaagcactggctccgcgcactatgcaagaaaggcgaagggtgcgaatttctgcacgagtacaacctgcgtaagatgccggagtgcaacttcttcgttcgcaatggatactgctccaacggtgatgagtgcctgtacttgcatattgatccgatgagcaagttaccgccttgtccgcattatgagaagggcttctgtcccctgggtccggagtgcagtaagagacatgtgcgcaggaagctgtgcgcatattatcttgctggattctgtcctgatgggaaggcgtgcacggaaggtgctcatccgcggtgggagaagaatctggagccgccgatcaagaagagcgacgtcgttattgaggagccgagacgagatgatgatgacgagagggatttcggaaggcgagacagagacgacaagcctggtggtgggcgcggtgatcgtgggtttggtggaagaggaggcagatggcgtggcagaggtgatcggaagtttaggggacgaggtcatcattga

SEQ ID NO: 906 - protein, 233 aa, Muscodor strobelii
  misc_feature: SGI Peptide ID NO. 559883
  misc_feature (86)..(112): Pfam Id: PF00642 Pfam Desc: Zinc finger C-x8-C-x5-C-x3-H type (and similar)
  misc_feature (1)..(178): NCBI GI: 85117432 Blast Desc: NCU08353 [Neurospora crassa OR74A] gi|74618745|sp|Q7SGR2.1|YTH1_NEUCR RecName: Full=mRNA 3'-end-processing protein yth-1 gi|28927062|gb|EAA36020.1| crassa
  misc_feature (4)..(221): NCBI GI: 39974347 Blast Desc: MGG_00680 [Magnaporthe grisea 70-15] gi|145018401|gb|EDK02680.1| MGG_00680 [Magnaporthe grisea 70-15]
  misc_feature (7)..(203): NCBI GI: 256734683 Blast Desc: NECHADRAFT_75190 [Nectria haematococca mpVI 77-13-4]
  misc_feature (12)..(194): NCBI GI: 46108144 Blast Desc: FG00954.1 [Gibberella zeae PH-1] gi|110283027|sp|Q4IPA4.1|YTH1_GIBZE RecName: Full=mRNA 3'-end-processing protein YTH1
  misc_feature (15)..(208): NCBI GI: 154321443 Blast Desc: BC1G_01596 [Botryotinia fuckeliana B05.10] gi|150852134|gb|EDN27326.1| BC1G_01596 [Botryotinia fuckeliana B05.10]
  misc_feature (12)..(178): NCBI GI: 171695376 Blast Desc: protein product [Podospora anserina] gi|170947930|emb|CAP60094.1| protein product [Podospora anserina]
  misc_feature (18)..(208): NCBI GI: 156054094 Blast Desc: SS1G_05895 [Sclerotinia sclerotiorum 1980] gi|154703675|gb|EDO03414.1| SS1G_05895 [Sclerotinia sclerotiorum 1980]
  misc_feature (18)..(192): NCBI GI: 242804168 Blast Desc: high-affinity glucose transporter, [Talaromyces stipitatus ATCC 10500] gi|218717665|gb|EED17086.1| high-affinity glucose transporter, [Talaromyces stipitatus ATCC 10500]
  misc_feature (21)..(187): NCBI GI: 119189407 Blast Desc: CIMG_04751 [Coccidioides immitis RS]
  misc_feature (21)..(187): NCBI GI: 240111247 Blast Desc: Zinc finger CCCH type domain containing protein [Coccidioides posadasii C735 delta SOWgp]
MAATAPSSSALAQQILDHTAPSYTFTFTPFLRQNYNHSLTSPQAASQPPAAQANNSSYNSLVCKHWLRALCKKGEGCEFLHEYNLRKMPECNFFVRNGYCSNGDECLYLHIDPMSKLPPCPHYEKGFCPLGPECSKRHVRRKLCAYYLAGFCPDGKACTEGAHPRWEKNLEPPIKKSDVVIEEPRRDDDDERDFGRRDRDDKPGGGRGDRGFGGRGGRWRGRGDRKFRGRGHH

SEQ ID NO: 907 - DNA, 2946 bp, Muscodor strobelii
  misc_feature: SGI cDNA ID NO. 559884
  misc_feature: Elevated expression when VOC is produced
  misc_feature: Encodes the peptide sequence at SEQ ID NO 908
atggggcccctccaagttgtcctggagtacagcgtgcctctcaatgtgtttcacttcttcggaatattctgttttctctacctgattctccgcgaacggacgccggagtctgaaaataataatagatttccggacttcgcaatgttatattcctttgcctactcattctgggtcgtgctggccattactgcacgtatcgtgcacagcttcacaccccatcctcgcgccggctcagacaatggcgggtacaccttagtctcgaatatcaatgatcaaagtgctattgatccccaatcagtatgtcctggctacacggcctctaatatcgtcgaaaatgatgcgggcggcttcacagcagacctcctcctggccggagacgcttgtaatgcttacgggacggatattgcggagttgagtcttctcgtcgagtaccaggccgcggatagacttcacatcgagatccagcccaagtttatcggccagaataaccagagctggttcgtccttcctgaggctctggtcccgaaaccacaaaatacactggagaatgcgccggagagcgatcttagtttttcttacaccaacgaccctaccttccagttcaatgtgaccaggaaaagcacaggagatgtactattcacgacagctggctctcagctcgtgtacgaggaccagttcatcgagttccgctcttcgttgccggaaaactacaatctctatggcttgggtgaaacgatccgtaacgttcgtcttggtaacaatttgacaagaacaatgcacaacgtcgatgtaggcgatcttctagaccagaatctgtacggaactcatcctatctacctcgatactcgctactttgaagtcgatgaaagcggtaaattaacatatgcaccggatgcaaccaatacgtctgcagcttacaagtcctatacgcacggggtcttccagcggaacgcccatgcacaggaagtcgtattgcaagacacgagcatcacttggagagccataggcggcagcattgatctctacttcttcgagggtcccactcaagacaaagtgacaaaggcgtaccagacaagcgctatcggactccctgcaatgcagcagtattggactttcggataccatcaatgccgatggggttatcaaaattggtccgatgtccaaagtgtcattgacaactttgccagtaatgaaattcctcttgaaaccatgtggaatgacattgactacatgaagtcatttcgaaactttgaaaatgatcctgatcgctatccttatgacaagggtgcagagatactcggacagcttcatgagaacaaccagcattacattccaatcattgatgcaggcgtttacgttcctatcccagacaacgagactgactcttatccaccattcgatcgaggcttagaacaaagagcattcgtcctcaacccagatgactcggtgtatattggtcaagtttggcctggttattgcacatgggccgactggatcggcgctctcttcgctggcacgggcgcgaatagttggtggatatctgaggttgtccacttccataagaatctagcattcgatgggatctggattgatatgaatgaggtatcgtcattctgcactggtagttgcggaagtagcgacagagattatggcacacaactaacacgagacgtggaacttcgtgctcttcatgaagtagaagacgacccccgagacgtaaactaccctccttatgctattaacaacaacaaaggtccgctcgcaggcaacacgatgagtcctaatgcgacccatcatgatggcagcctagaatacgactatcacaatctgtggggttatcaaatgatcaatgctacataccatgctctcctcgagattttccctggcaagcgaccctttatcattacacggtctactttcgcaggcgcgggaagacaagcgggccactggggcggtgacaactactcaaactggccatatctctacttctcaatcccacaagctctctccttctctctttatggcattcctatgtttggcgtcgacacttgcggctttgcaggcaacgcgaccgcggagttatgcagcaggtggatgcagttatctgccttctttcccttttaccgcaatcacaatactcaagatggtgccagtcaagagccatacgtatggccttctgttgcggaagcagcaaaagctgcgatgaaaatcagatacgcgctgctgccgtatatatacacgacactgtatctcagccattccacgggatcgacaactatgcgcgcgatggcatgggagttcgacgatgagccatggctcaaggatgcggataggcagttcttgctcggcaacgcgttgctggtcacacctgtactacaagaaggcgcggtaactgtagatggcgtattccctggtgcgggatctggtacggtttggtatgattggtacacacaaaaggctatcgagggtgttgagagaggacaaaatgtcacgattgaagcaccacttggcaccataccattatttgtgagaggaggatacgtcgtgccgatgcacgaacctgctcttaccacaacagctgtgagaaatactccctggtcgctgcttgttgctctagacgggagtggtaaggcaagcggtggactttacgttgatgatggggagagtcttgtgccagatgccactatttgggttgatttctccgtggaggagtctaagcttagtgctacgccagatggcacgtatgacgattcgaacgcccttggaaatgtgacagtgcttggtattcaagaagatgtgcaaaaggtcgtctttggtgaaactgagattgatgctgggaattggcacttggatgctacagccaaggtattgaggttgagtggtcttgatacctacacggagggcggagcatggaagaatgcttggagcctgagttggtctacctga

SEQ ID NO: 908 - protein, 981 aa, Muscodor strobelii
  misc_feature: SGI Peptide ID NO. 559884
  misc_feature (342)..(849): Pfam Id: PF01055 Pfam Desc: Glycosyl hydrolases family 31
  misc_feature (85)..(980): NCBI GI: 154295712 Blast Desc: BC1G_12859 [Botryotinia fuckeliana B05.10] gi|150843892|gb|EDN19085.1| BC1G_12859 [Botryotinia fuckeliana B05.10]
  misc_feature (82)..(981): NCBI GI: 85119778 Blast Desc: alpha-glucosidase precursor [Neurospora crassa OR74A] gi|28927526|gb|EAA36478.1| alpha-glucosidase precursor [Neurospora crassa OR74A] gi|38567124|emb|CAE76419.1| precursor
  misc_feature (85)..(980): NCBI GI: 156061938 Blast Desc: SS1G_01083 [Sclerotinia sclerotiorum 1980] gi|154696421|gb|EDN96159.1| SS1G_01083 [Sclerotinia sclerotiorum 1980]
  misc_feature (76)..(979): NCBI GI: 154286520 Blast Desc: alpha-glucosidase precursor [Ajellomyces capsulatus NAm1] gi|150407696|gb|EDN03237.1| alpha-glucosidase precursor [Ajellomyces capsulatus NAm1]
  misc_feature (82)..(979): NCBI GI: 240275071 Blast Desc: alpha-glucosidase [Ajellomyces capsulatus H143]
  misc_feature (76)..(979): NCBI GI: 225558627 Blast Desc: alpha-glucosidase [Ajellomyces capsulatus G186AR]
  misc_feature (82)..(979): NCBI GI: 255932117 Blast Desc: Pc12g07810 [Penicillium chrysogenum Wisconsin 54-1255] gi|211582234|emb|CAP80408.1| Pc12g07810 [Penicillium chrysogenum Wisconsin 54-1255]
  misc_feature (77)..(980): NCBI GI: 169616370 Blast Desc: SNOG_11356 [Phaeosphaeria nodorum SN15] gi|160703166|gb|EAT81064.2| SNOG_11356 [Phaeosphaeria nodorum SN15]
  misc_feature (77)..(979): NCBI GI: 255948824 Blast Desc: Pc22g12350 [Penicillium chrysogenum Wisconsin 54-1255] gi|211592196|emb|CAP98523.1| Pc22g12350 [Penicillium chrysogenum Wisconsin 54-1255]
  misc_feature (78)..(979): NCBI GI: 115433913 Blast Desc: alpha-glucosidase precursor [Aspergillus terreus NIH2624] gi|114189945|gb|EAU31645.1| alpha-glucosidase precursor [Aspergillus terreus NIH2624]
  misc_feature (82)..(979): SWISSPROT Homolog: EC 3.2.1.3 Glucan 1,4-alpha-glucosidase
  misc_feature: Useful for introducing or modulating the production of volatile compounds
MGPLQVVLEYSVPLNVFHFFGIFCFLYLILRERTPESENNNRFPDFAMLYSFAYSFWVVLAITARIVHSFTPHPRAGSDNGGYTLVSNINDQSAIDPQSVCPGYTASNIVENDAGGFTADLLLAGDACNAYGTDIAELSLLVEYQAADRLHIEIQPKFIGQNNQSWFVLPEALVPKPQNTLENAPESDLSFSYTNDPTFQFNVTRKSTGDVLFTTAGSQLVYEDQFIEFRSSLPENYNLYGLGETIRNVRLGNNLTRTMHNVDVGDLLDQNLYGTHPIYLDTRYFEVDESGKLTYAPDATNTSAAYKSYTHGVFQRNAHAQEVVLQDTSITWRAIGGSIDLYFFEGPTQDKVTKAYQTSAIGLPAMQQYWTFGYHQCRWGYQNWSDVQSVIDNFASNEIPLETMWNDIDYMKSFRNFENDPDRYPYDKGAEILGQLHENNQHYIPIIDAGVYVPIPDNETDSYPPFDRGLEQRAFVLNPDDSVYIGQVWPGYCTWADWIGALFAGTGANSWWISEVVHFHKNLAFDGIWIDMNEVSSFCTGSCGSSDRDYGTQLTRDVELRALHEVEDDPRDVNYPPYAINNNKGPLAGNTMSPNATHHDGSLEYDYHNLWGYQMINATYHALLEIFPGKRPFIITRSTFAGAGRQAGHWGGDNYSNWPYLYFSIPQALSFSLYGIPMFGVDTCGFAGNATAELCSRWMQLSAFFPFYRNHNTQDGASQEPYVWPSVAEAAKAAMKIRYALLPYIYTTLYLSHSTGSTTMRAMAWEFDDEPWLKDADRQFLLGNALLVTPVLQEGAVTVDGVFPGAGSGTVWYDWYTQKAIEGVERGQNVTIEAPLGTIPLFVRGGYVVPMHEPALTTTAVRNTPWSLLVALDGSGKASGGLYVDDGESLVPDATIWVDFSVEESKLSATPDGTYDDSNALGNVTVLGIQEDVQKVVFGETEIDAGNWHLDATAKVLRLSGLDTYTEGGAWKNAWSLSWST

SEQ ID NO: 909 - DNA, 4597 bp, Muscodor strobelii
  misc_feature: SGI EST ID NO. CUFF.2524.0
  misc_feature: Variant of the nucleotide sequence at SEQ ID NO 907
cacacatgcagcacgtccatcatcttcatatctcaaggcttaattcatcttataagtatcgtcatgatggggcccctccaagttgtcctggagtacagcgtgcctctcaatgtgtttcacttcttcggaatattctgttttctctacctgattctccgcgaacggacgccggagtctgaaaataataatagatttccggacttcgcaatgttatattcctttgcctactcattctgggtcgtgctggccattactgcacgtatcgtgcacagcttcacaccccatcctcgcgccggctcagacaatggcgggtacaccttagtctcgaatatcaatgatcaaagtgctattgatccccaatcagtatgtcctggctacacggcctctaatatcgtcgaaaatgatgcgggcggcttcacagcagacctcctcctggccggagacgcttgtaatgcttacgggacggatattgcggagttgagtcttctcgtcgagtaccaggccgcggatagacttcacatcgagatccagcccaagtttatcggccagaataaccagagctggttcgtccttcctgaggctctggtcccgaaaccacaaaatacactggagaatgcgccggagagcgatcttagtttttcttacaccaacgaccctaccttccagttcaatgtgaccaggaaaagcacaggagatgtactattcacgacagctggctctcagctcgtgtacgaggaccagttcatcgagttccgctcttcgttgccggaaaactacaatctctatggcttgggtgaaacgatccgtaacgttcgtcttggtaacaatttgacaagaacaatgcacaacgtcgatgtaggcgatcttctagaccagaatctgtacggaactcatcctatctacctcgatactcgctactttgaagtcgatgaaagcggtaaattaacatatgcaccggatgcaaccaatacgtctgcagcttacaagtcctatacgcacggggtcttccagcggaacgcccatgcacaggaagtcgtattgcaagacacgagcatcacttggagagccataggcggcagcattgatctctacttcttcgagggtcccactcaagacaaagtgacaaaggcgtaccagacaagcgctatcggactccctgcaatgcagcagtattggactttcggataccatcaatgccgatggggttatcaaaattggtccgatgtccaaagtgtcattgacaactttgccagtaatgaaattcctcttgaaaccatgtggaatgacattgactacatgaagtcatttcgaaactttgaaaatgatcctgatcgctatccttatgacaagggtgcagagatactcggacagcttcatgagaacaaccagcattacattccaatcattgatgcaggcgtttacgttcctatcccagacaacgagactgactcttatccaccattcgatcgaggcttagaacaaagagcattcgtcctcaacccagatgactcggtgtatattggtcaagtttggcctggttattgcacatgggccgactggatcggcgctctcttcgctggcacgggcgcgaatagttggtggatatctgaggttgtccacttccataagaatctagcattcgatgggatctggattgatatgaatgaggtatcgtcattctgcactggtagttgcggaagtagcgacagagattatggcacacaactaacacgagacgtggaacttcgtgctcttcatgaagtagaagacgacccccgagacgtaaactaccctccttatgctattaacaacaacaaaggtccgctcgcaggcaacacgatgagtcctaatgcgacccatcatgatggcagcctagaatacgactatcacaatctgtggggttatcaaatgatcaatgctacataccatgctctcctcgagattttccctggcaagcgaccctttatcattacacggtctactttcgcaggcgcgggaagacaagcgggccactggggcggtgacaactactcaaactggccatatctctacttctcaatcccacaagctctctccttctctctttatggcattcctatgtttggcgtcgacacttgcggctttgcaggcaacgcgaccgcggagttatgcagcaggtggatgcagttatctgccttctttcccttttaccgcaatcacaatactcaagatggtgccagtcaagagccatacgtatggccttctgttgcggaagcagcaaaagctgcgatgaaaatcagatacgcgctgctgccgtatatatacacgacactgtatctcagccattccacgggatcgacaactatgcgcgcgatggcatgggagttcgacgatgagccatggctcaaggatgcggataggcagttcttgctcggcaacgcgttgctggtcacacctgtactacaagaaggcgcggtaactgtagatggcgtattccctggtgcgggatctggtacggtttggtatgattggtacacacaaaaggctatcgagggtgttgagagaggacaaaatgtcacgattgaagcaccacttggcaccataccattatttgtgagaggaggatacgtcgtgccgatgcacgaacctgctcttaccacaacagctgtgagaaatactccctggtcgctgcttgttgctctagacgggagtggtaaggcaagcggtggactttacgttgatgatggggagagtcttgtgccagatgccactatttgggttgatttctccgtggaggagtctaagcttagtgctacgccagatggcacgtatgacgattcgaacgcccttggaaatgtgacagtgcttggtattcaagaagatgtgcaaaaggtcgtctttggtgaaactgagattgatgctgggaattggcacttggatgctacagccaaggtattgaggttgagtggtcttgatacctacacggagggcggagcatggaagaatgcttggagcctgagttggtctacctgagcaccgtcgagattggacatcgtaagacctacacgtacctacctacaagattacacgataggtatacaaagcattgttgctagtaatggatataattaatatctatcctggtcatcagcccatgttgaaactgtagacgattttgtgggtttgagcggcatggatctcagcctcgacaagatatacagtcagtttatacccaacaaagacttgaatgcgtattgcttgtattaagagtgctttcaaaggccccgcagaagtcaggcgaaacattccgctctaagtatcattttaggtgtacatctttccacgtcatgacctcattactgcgtcaatccacttcgtctcatttcgcataaacaagttccataagactatctctcaacctcacaaactcttcagtctgatgcttactcctctcttccaatatctcacactgcaacatcatcattcgtgcttcctttccgttctcgtcaccacttgtcgcatcctggactaccttcctgagacccttcacggcgttctccaataaacccgcgatatgtactacgagcgctgcttgcatcgaagcagcgctcatagcactcgccacgaaactacccagtttgagctcggggatgtggagtcttggttgggtcatgttgtttgcttttgtgatctttgcgcagagcttggtgcttttcacgaagaaggagtagacgtctgagacttttgtgtgggctgctgttaggaggttgaataggaatatgtctattctttttgggggctcggattcttctctcagtataccggggcgggattgagatacgtccatggcgtggagacaggttgggtctgcgcagatgtcccatcctaggggtgtgtttagcattagttggatggttgtggggtagatgtctaggaggcgttgggagatggagaacagtgattctaggcatttgctgtgctcgttgtctatgagttttgaggcgaagaaggactctatgtcgtggtctggcgtgagatggatgtttgctaggggttggatggtgagggatatggcgtctatttctatggctagggttgtgagttcgcggacgcatgttgagcgcggatcttgtggtggtgtttgaggctggccttcttccaatgatggtgcttgattttctgaagatgatgttgcggatgttgtgaaatctcctgcgtttagactagtccatgggaattgtatgtcgagagtgtcatttatatcgatcccgatcgacgggtcgaggaagtgagtgtcattgtgatatggtggcgcattggtgctcgccggtggacgtcgccaggctggaccagcgggactgaagacacatattgcgtcggctttgagacaccggaggcaggttggattaccgttttctttggcacatttgagtttctgtgaatggcagcgatcacatgatgagcggaggggtcttggcatgatgaataagtcatgtaattgaaagtgagttgatgcgtggtgagatgagaatgagggtgaggcaagcggctgttctgtactgtagtacagggatcttcagctagagttaggcggttgatttatcagctgaaaggtggg

SEQ ID NO: 910 - DNA, 1101 bp, Muscodor strobelii
  misc_feature: SGI cDNA ID NO. 559885
  misc_feature: Encodes the peptide sequence at SEQ ID NO 911
atgccaagacccctccgctcatcatgtgatcgctgccattcacagaaactcaaatgtgccaaagaaaacggtaatccaacctgcctccggtgtctcaaagccgacgcaatatgtgtcttcagtcccgctggtccagcctggcgacgtccaccggcgagcaccaatgcgccaccatatcacaatgacactcacttcctcgacccgtcgatcgggatcgatataaatgacactctcgacatacaattcccatggactagtctaaacgcaggagatttcacaacatccgcaacatcatcttcagaaaatcaagcaccatcattggaagaaggccagcctcaaacaccaccacaagatccgcgctcaacatgcgtccgcgaactcacaaccctagccatagaaatagacgccatatccctcaccatccaacccctagcaaacatccatctcacgccagaccacgacatagagtccttcttcgcctcaaaactcatagacaacgagcacagcaaatgcctagaatcactgttctccatctcccaacgcctcctagacatctaccccacaaccatccaactaatgctaaacacacccctaggatgggacatctgcgcagacccaacctgtctccacgccatggacgtatctcaatcccgccccggtatactgagagaagaatccgagcccccaaaaagaatagacatattcctattcaacctcctaacagcagcccacacaaaagtctcagacgtctactccttcttcgtgaaaagcaccaagctctgcgcaaagatcacaaaagcaaacaacatgacccaaccaagactccacatccccgagctcaaactgggtagtttcgtggcgagtgctatgagcgctgcttcgatgcaagcagcgctcgtagtacatatcgcgggtttattggagaacgccgtgaagggtctcaggaaggtagtccaggatgcgacaagtggtgacgagaacggaaaggaagcacgaatgatgatgttgcagtgtgagatattggaagagaggagtaagcatcagactgaagagtttgtgaggttgagagatagtcttatggaacttgtttatgcgaaatga

SEQ ID NO: 911 - protein, 366 aa, Muscodor strobelii
  misc_feature: SGI Peptide ID NO. 559885
  misc_feature (7)..(48): Pfam Id: PF00172 Pfam Desc: Fungal Zn(2)-Cys(6) binuclear cluster domain
  misc_feature (7)..(42): Pfam Id: PF00172 Pfam Desc: Fungal Zn(2)-Cys(6) binuclear cluster domain
  misc_feature (1)..(364): NCBI GI: 39945876 Blast Desc: MGG_08058 [Magnaporthe grisea 70-15] gi|145019295|gb|EDK03523.1| MGG_08058 [Magnaporthe grisea 70-15]
  misc_feature (5)..(360): NCBI GI: 50400614 Blast Desc: ACE2_TRIRE RecName: Full=Transcription factor ACEII gi|14581734|gb|AAK69383.1|AF220671_1 transcription factor ACEII [Hypocrea jecorina]
  misc_feature (5)..(210): NCBI GI: 256724816 Blast Desc: NECHADRAFT_84500 [Nectria haematococca mpVI 77-13-4]
  misc_feature (232)..(362): NCBI GI: 46126287 Blast Desc: FG07521.1 [Gibberella zeae PH-1]
  misc_feature (3)..(45): NCBI GI: 261189793 Blast Desc: conserved [Ajellomyces dermatitidis SLH14081] gi|239591543|gb|EEQ74124.1| conserved [Ajellomyces dermatitidis SLH14081] gi|239612928|gb|EEQ89915.1| conserved [Ajellomyces
  misc_feature (6)..(366): NCBI GI: 242787510 Blast Desc: TSTA_038010 [Talaromyces stipitatus ATCC 10500] gi|218721170|gb|EED20589.1| TSTA_038010 [Talaromyces stipitatus ATCC 10500]
  misc_feature (1)..(362): NCBI GI: 242760253 Blast Desc: conserved [Talaromyces stipitatus ATCC 10500] gi|218723149|gb|EED22566.1| conserved [Talaromyces stipitatus ATCC 10500]
  misc_feature (5)..(48): NCBI GI: 269856261 Blast Desc: Zn(II)2-Cys6 binuclear cluster domain-like protein [Fusarium sp. NRRL 13405]
  misc_feature (2)..(58): NCBI GI: 119180596 Blast Desc: [Coccidioides immitis RS]
  misc_feature (5)..(42): NCBI GI: 145236902 Blast Desc: An07g00050 [Aspergillus niger] gi|134075563|emb|CAK39229.1| protein product [Aspergillus niger]
MPRPLRSSCDRCHSQKLKCAKENGNPTCLRCLKADAICVFSPAGPAWRRPPASTNAPPYHNDTHFLDPSIGIDINDTLDIQFPWTSLNAGDFTTSATSSSENQAPSLEEGQPQTPPQDPRSTCVRELTTLAIEIDAISLTIQPLANIHLTPDHDIESFFASKLIDNEHSKCLESLFSISQRLLDIYPTTIQLMLNTPLGWDICADPTCLHAMDVSQSRPGILREESEPPKRIDIFLFNLLTAAHTKVSDVYSFFVKSTKLCAKITKANNMTQPRLHIPELKLGSFVASAMSAASMQAALVVHIAGLLENAVKGLRKVVQDATSGDENGKEARMMMLQCEILEERSKHQTEEFVRLRDSLMELVYAK

SEQ ID NO: 912 - DNA, 969 bp, Muscodor strobelii
  misc_feature: SGI cDNA ID NO. 559886
  misc_feature: Encodes the peptide sequence at SEQ ID NO 913
atggctcgccttacttctttggctgccgcttcacttctcggcctgtctctcttgacaggctcggctctctccaatcctctaccgagtaacgtagagcccctagtcactcaagtcgctagcaacatcaatgaaacacttgcaaccccaccgcaacacgatctcgaagtgcgacaatggcaagggatcgtcgacggtatcagacggatcgtcgaagaggtcgtatcgcacttactgagcgattgcctcaacgaccaggaagagatgggtgcattcaccaggtctgtagtctcgtcgttgcgacaggagtatcctgacaagaatgtcatcgtggtccatggagagcaccgctggacgaacacagttagactcgtccacttccatagagagctcgacctcaattgcttctacacaactcagggctacgaggtctatattctggattcgggaatttttgagcgtgtcggcgatggcggtgcacaaaactggctgttcaatgggaactacgattggaatggggaccgtatcgtgcatttctatccacttgttagggattcgccggcccctcctgcagaggaacctatcaagatccctagcacgcctgtgcgccgctcacctgatggtaactatctagtaaactgccacagaggtggcgagatatctagcggcgtcgcctactacaagaacattcagcccacgactagcaccaatgtcaatcaccgccccgatgactatgttgatgtgtcgcacgggtggtacaatcaatgggagaaatatggaagaattcaattcccttcttccggcgttaaggtgacctggtctatctttggcaccgcgaattcgctcccgcccaattcatatgcagggcttgctgataacacctatgtttactggaaggtgtacaaggacagcggtaggttcctctatgaggtcgacgggtggcagtgcaatgccatttactacatgttctaa

SEQ ID NO: 913 - protein, 322 aa, Muscodor strobelii
  misc_feature: SGI Peptide ID NO. 559886
  misc_feature (209)..(320): NCBI GI: 256730121 Blast Desc: NECHADRAFT_95025 [Nectria haematococca mpVI 77-13-4]
  misc_feature (199)..(321): NCBI GI: 46127415 Blast Desc: FG08085.1 [Gibberella zeae PH-1]
  misc_feature (202)..(302): NCBI GI: 46127395 Blast Desc: FG08075.1 [Gibberella zeae PH-1]
  misc_feature (209)..(320): NCBI GI: 46114240 Blast Desc: FG02962.1 [Gibberella zeae PH-1]
  misc_feature (4)..(178): NCBI GI: 170086015 Blast Desc: [Laccaria bicolor S238N-H82] gi|164651783|gb|EDR16023.1| [Laccaria bicolor S238N-H82]
  misc_feature (9)..(170): NCBI GI: 170114044 Blast Desc: ectomycorrhiza-regulated small secreted protein [Laccaria bicolor S238N-H82] gi|164636887|gb|EDR01178.1| ectomycorrhiza-regulated small secreted protein [Laccaria bicolor
  misc_feature (1)..(180): NCBI GI: 206973249 Blast Desc: YvgO [Bacillus cereus AH1134] gi|228924564|ref|ZP_04087761.1| Stress response protein yvgO [Bacillus thuringiensis serovar huazhongensis BGSC 4BD1] Stress
  misc_feature (1)..(180): NCBI GI: 229074008 Blast Desc: Stress response protein yvgO [Bacillus cereus F65185] gi|228709116|gb|EEL61229.1| Stress response protein yvgO [Bacillus cereus F65185]
  misc_feature (1)..(180): NCBI GI: 228911988 Blast Desc: Stress response protein yvgO [Bacillus thuringiensis IBL 200] gi|229182098|ref|ZP_04309390.1| Stress response protein yvgO [Bacillus cereus 172560W] gi|228601349|gb|EEK58878.1| Stress
  misc_feature (210)..(321): NCBI GI: 116179076 Blast Desc: CHGG_00166 [Chaetomium globosum CBS 148.51] gi|88184463|gb|EAQ91931.1| CHGG_00166 [Chaetomium globosum CBS 148.51]
MARLTSLAAASLLGLSLLTGSALSNPLPSNVEPLVTQVASNINETLATPPQHDLEVRQWQGIVDGIRRIVEEVVSHLLSDCLNDQEEMGAFTRSVVSSLRQEYPDKNVIVVHGEHRWTNTVRLVHFHRELDLNCFYTTQGYEVYILDSGIFERVGDGGAQNWLFNGNYDWNGDRIVHFYPLVRDSPAPPAEEPIKIPSTPVRRSPDGNYLVNCHRGGEISSGVAYYKNIQPTTSTNVNHRPDDYVDVSHGWYNQWEKYGRIQFPSSGVKVTWSIFGTANSLPPNSYAGLADNTYVYWKVYKDSGRFLYEVDGWQCNAIYYMF

SEQ ID NO: 914 - DNA, 1464 bp, Muscodor strobelii
  misc_feature: SGI cDNA ID NO. 559887
  misc_feature: Encodes the peptide sequence at SEQ ID NO 915
atgggacctggcttgtacaacgtgggcattgccctttctgcctctctcggcacatacctatacgggtttgacacggggattatcacgacgacaatcgcccaccaaagctgggttgattacatgaatcatccttctacgggcataacaggggctgttgtagctgtttacatcgcaggggaagccgtgggtgctctgctacagatacttatcgcagacaaactcggaagaacccggttcatgcaatttgcgtgtatacttgttacaattggcgtcatcatccagacagcgtcgatcaatattggcatgcttcttgccggtcgtgtgattgcaggtattgcggttggagcattgagtgcaacagttcccatatatctcgctgaaatcggcgcgcccaagactcgaggcttgatcggaggtttgtctggtgtcggcctatcagctggcacattgacagcgaactgggtcggattcgcgggaagttttgcaccatatggacccgtgcaatggcgattacctctcggcctgcaagctccatggggtatcatcctgttcatctgtttggcaacatacatgcccaagagtccacgcgagcttatacaaaagggcgatatagagggagcacggaaagaattcgcaaagatccgaagtgacatgccagctcacgaggtgcatgaggagtttgttctcatgagagcgcagatcgagtacgagaaagatcgcgctctttccggatatcacaagatcttcaaaatctaccgacatcgtgttctagtgtgtgtcgctgttcaggtcttgaccagtgtcacgggtgtgaacgttatccagtactaccaaaccaatttgtacaagtcgcttggcatagatgcgaagaccatcttagctttagctgcaatctggggcacaactgctttcgttgccaatgtgatcgcagtcctcattctcccagacagatggggaagacggaagatgctcttggtcggtgggtcttgcgtcatcgttacggagatatactctgctgttctacagagagagttccaacatacagacaatcgagtaggcaagggttttgcgattctcgggatttacatctttgcagtgtgctattacgcgctgataaactcaacaacgtggctgtacggctctgagatcataccttatttcattagaagcaaaatggttggcctatcagccgtagctcactatactgtcaacgtcggatttactgaggcagggccgacagcttttgcgaatattggcgagaactattactatgtctttgttggaatttgtactatttatctcggacttatctatctatactttcctgagacgaaacagaagagcctagaagaaattgctgctgcttttggcgatcgtgtggtcgagttgaatgaacatgatattgcagtagaaggagaagtattcgatgccaaagccgctgtgtcacatgtcgaggagcattag

SEQ ID NO: 915 - protein, 487 aa, Muscodor strobelii
  misc_feature: SGI Peptide ID NO. 559887
  misc_feature (10)..(408): Pfam Id: PF07690 Pfam Desc: Major Facilitator Superfamily
  misc_feature (10)..(456): Pfam Id: PF00083 Pfam Desc: Sugar (and other) transporter
  misc_feature (2)..(485): NCBI GI: 212536350 Blast Desc: MFS monosaccharide transporter (Hxt8), [Penicillium marneffei ATCC 18224] gi|210070730|gb|EEA24820.1| MFS monosaccharide transporter (Hxt8), [Penicillium marneffei ATCC
  misc_feature (2)..(485): NCBI GI: 242795440 Blast Desc: MFS monosaccharide transporter (Hxt8), [Talaromyces stipitatus ATCC 10500] gi|218719178|gb|EED18598.1| MFS monosaccharide transporter (Hxt8), [Talaromyces stipitatus ATCC
  misc_feature (1)..(487): NCBI GI: 238841791 Blast Desc: solute carrier family 2 [Microsporum canis CBS 113480]
  misc_feature (6)..(473): NCBI GI: 255935745 Blast Desc: Pc13g04640 [Penicillium chrysogenum Wisconsin 54-1255] gi|211583519|emb|CAP91533.1| Pc13g04640 [Penicillium chrysogenum Wisconsin 54-1255]
  misc_feature (4)..(461): NCBI GI: 121698183 Blast Desc: MFS monosaccharide transporter (Hxt8), [Aspergillus clavatus NRRL 1] gi|119395883|gb|EAW06315.1| MFS monosaccharide transporter (Hxt8), [Aspergillus clavatus NRRL 1]
  misc_feature (4)..(486): NCBI GI: 67539388 Blast Desc: AN5864.2 [Aspergillus nidulans FGSC A4] gi|40739183|gb|EAA58373.1| AN5864.2 [Aspergillus nidulans FGSC A4] gi|259479974|tpe|CBF70683.1| TPA: MFS monosaccharide (Hxt8),
  misc_feature (6)..(485): NCBI GI: 145236004 Blast Desc: protein product [Aspergillus niger] gi|134075099|emb|CAK39110.1| protein product [Aspergillus niger]
  misc_feature (6)..(461): NCBI GI: 119480595 Blast Desc: MFS monosaccharide transporter (Hxt8), [Neosartorya fischeri NRRL 181] gi|119408480|gb|EAW18429.1| MFS monosaccharide transporter (Hxt8), [Neosartorya fischeri NRRL 181]
  misc_feature (6)..(461): NCBI GI: 238493823 Blast Desc: MFS monosaccharide transporter (Hxt8), [Aspergillus flavus NRRL3357] gi|220696642|gb|EED52984.1| MFS monosaccharide transporter (Hxt8), [Aspergillus flavus NRRL3357]
  misc_feature (1)..(467): NCBI GI: 115442938 Blast Desc: conserved [Aspergillus terreus NIH2624] gi|114188145|gb|EAU29845.1| conserved [Aspergillus terreus NIH2624]
MGPGLYNVGIALSASLGTYLYGFDTGIITTTIAHQSWVDYMNHPSTGITGAVVAVYIAGEAVGALLQILIADKLGRTRFMQFACILVTIGVIIQTASINIGMLLAGRVIAGIAVGALSATVPIYLAEIGAPKTRGLIGGLSGVGLSAGTLTANWVGFAGSFAPYGPVQWRLPLGLQAPWGIILFICLATYMPKSPRELIQKGDIEGARKEFAKIRSDMPAHEVHEEFVLMRAQIEYEKDRALSGYHKIFKIYRHRVLVCVAVQVLTSVTGVNVIQYYQTNLYKSLGIDAKTILALAAIWGTTAFVANVIAVLILPDRWGRRKMLLVGGSCVIVTEIYSAVLQREFQHTDNRVGKGFAILGIYIFAVCYYALINSTTWLYGSEIIPYFIRSKMVGLSAVAHYTVNVGFTEAGPTAFANIGENYYYVFVGICTIYLGLIYLYFPETKQKSLEEIAAAFGDRVVELNEHDIAVEGEVFDAKAAVSHVEEH

SEQ ID NO: 916 - DNA, 264 bp, Muscodor strobelii
  misc_feature: SGI EST ID NO. CUFF.2537.0
  misc_feature: Variant of the nucleotide sequence at SEQ ID NO 914
cgagcttatacaaaagggcgatatagagggagcacggaaagaattcgcaaagatccgaagtgacatgccagctcacgaggtgcatgaggagtttgttctcatgagagcgcagatcgagtacgagaaagatcgcgctctttccggatatcacaagatcttcaaaatctaccgacatcgtgttctagtgtaagttatttcagaaatatcgacgcgggtgtgtcgctgttcaggtcttgaccagtgtcacgggtgtgaacgttatcc

SEQ ID NO: 917 - DNA, 888 bp, Muscodor strobelii
  misc_feature: SGI cDNA ID NO. 559888
  misc_feature: Encodes the peptide sequence at SEQ ID NO 918
atgtcatcaaacgggattgccgagaagttgaagaacaacagagcgaaagcaattgttgacgcggcatatgctggaaaatacatgatccctgggatctgctgttacaatctagaaggcatcatcgcgactgttcgcgccgcggaagctaagaaatctcctgctctgatccagctgttcccttggtcgatagaatatgcagatggtctattgctacacgctgccgctgaagctgcagacaaggcgaaggttcccataggtgttcatatggaccacgcacagagccccgatataatcagaagatcagttgagcttgatgggtacgatggcataatggtagacatgagccactatgacaaggaagagaatatgagactgagcaaggaacttgtgcaactatgcaactccaaaggcatcattacagaatgcgagccgggtcgaataaatggtgtcgaagatggaattgcggacacagagggtatggaagaaatcctgacgacgcccgagcaagccgaagagttcgtagctttgggcattgactggctggcccctgccttcgggaatgttcacggtgtatacggatccaagggtccccaattggatttccctcgacttgaacgcatccatactgcagtgggcgacagagtacggcttgtattgcatggcgctcatgaggattacttccaagaggagctgttgcgaaaatgcatcgctgctggtatgtcgaaggtcaacattaatggcccagtcaatgcagcgtatactagagttggggcggagttgaccggtaaagttccgttgactactgtgactgaagagcagacaaaggctatgcagcaggttatagagcagaatatggactggatcatgtcgacgggcaaagcagcatag

SEQ ID NO: 918 - protein, 295 aa, Muscodor strobelii
  misc_feature: SGI Peptide ID NO. 559888
  misc_feature (14)..(294): Pfam Id: PF01116 Pfam Desc: Fructose-bisphosphate aldolase class-II
  misc_feature (20)..(246): Pfam Id: PF01116 Pfam Desc: Fructose-bisphosphate aldolase class-II
  misc_feature (10)..(295): NCBI GI: 212536592 Blast Desc: fructose-bisphosphate aldolase, [Penicillium marneffei ATCC 18224] gi|212536594|ref|XP_002148453.1| fructose-bisphosphate aldolase, [Penicillium marneffei ATCC ATCC
  misc_feature (9)..(294): NCBI GI: 242796199 Blast Desc: fructose-bisphosphate aldolase, [Talaromyces stipitatus ATCC 10500] gi|218719337|gb|EED18757.1| fructose-bisphosphate aldolase, [Talaromyces stipitatus ATCC
  misc_feature (9)..(293): NCBI GI: 169786067 Blast Desc: [Aspergillus oryzae RIB40] gi|238507001|ref|XP_002384702.1| fructose-bisphosphate aldolase, [Aspergillus flavus NRRL3357] gi|83776242|dbj|BAE66361.1| protein
  misc_feature (10)..(294): NCBI GI: 169596158 Blast Desc: SNOG_00832 [Phaeosphaeria nodorum SN15] gi|111071207|gb|EAT92327.1| SNOG_00832 [Phaeosphaeria nodorum SN15]
  misc_feature (10)..(295): NCBI GI: 70997754 Blast Desc: fructose-bisphosphate aldolase [Aspergillus fumigatus Af293] gi|66851248|gb|EAL91574.1| fructose-bisphosphate aldolase, [Aspergillus fumigatus Af293] gi|159126653|gb|EDP51769.1| A1163]
  misc_feature (10)..(295): NCBI GI: 119479265 Blast Desc: fructose-bisphosphate aldolase, [Neosartorya fischeri NRRL 181] gi|119407815|gb|EAW17764.1| fructose-bisphosphate aldolase, [Neosartorya fischeri NRRL 181]
  misc_feature (10)..(294): NCBI GI: 226279491 Blast Desc: fructose-bisphosphate aldolase [Paracoccidioides brasiliensis Pb01]
  misc_feature (9)..(295): NCBI GI: 121713432 Blast Desc: fructose-bisphosphate aldolase, [Aspergillus clavatus NRRL 1] gi|119402480|gb|EAW12901.1| fructose-bisphosphate aldolase, [Aspergillus clavatus NRRL 1]
  misc_feature (10)..(293): NCBI GI: 255954553 Blast Desc: Pc21g09930 [Penicillium chrysogenum Wisconsin 54-1255] gi|211589740|emb|CAP95890.1| Pc21g09930 [Penicillium chrysogenum Wisconsin 54-1255]
  misc_feature (10)..(294): NCBI GI: 226287679 Blast Desc: fructose-bisphosphate aldolase [Paracoccidioides brasiliensis Pb18]
  misc_feature (16)..(253): SWISSPROT Homolog: EC 4.1.2.40 Tagatose-bisphosphate aldolase
MSSNGIAEKLKNNRAKAIVDAAYAGKYMIPGICCYNLEGIIATVRAAEAKKSPALIQLFPWSIEYADGLLLHAAAEAADKAKVPIGVHMDHAQSPDIIRRSVELDGYDGIMVDMSHYDKEENMRLSKELVQLCNSKGIITECEPGRINGVEDGIADTEGMEEILTTPEQAEEFVALGIDWLAPAFGNVHGVYGSKGPQLDFPRLERIHTAVGDRVRLVLHGAHEDYFQEELLRKCIAAGMSKVNINGPVNAAYTRVGAELTGKVPLTTVTEEQTKAMQQVIEQNMDWIMSTGKAA

SEQ ID NO: 919 - DNA, 957 bp, Muscodor strobelii
  misc_feature: SGI cDNA ID NO. 559889
  misc_feature: Encodes the peptide sequence at SEQ ID NO 920
atgcgcatcctcatcaccggcgcggctggtttcattggccagatagtcgcgaaagaactccttacagatgagtcgaatgagcttatattggtggatgtcattgagccatctgtgcctccaggcagtaaatatccgcaaaatgccaaaagcataaaagcagatctggtcgaatctgcagcaagcgtggttgagcaaggactagactctgtgatcatcttacatggtatcatgtcgtcaggggcggaagccaacttcgaattaggctaccgcgtcaacgttgacgcaacgcgatctctcttgaacgctcttgtaacaacgtgcgctggaattcgcgtactatacgcgtccagcgaggccgtgtacggtagtcctgtacctaagcaggctgtcacggaattggacattccatcacctgaactttcctacggatgtcaaaagatcatctgcgagacgttcattaacgactatactcgtcgaaacttaattaatggggtttcactccgatttccgactatttctgtccgtcccggaaaaccgacggcggccgttacctcattcctctctggcattattagggaaccactcaacgggcaagtttgcacgttacccctaaaagatcgcaattggcgtcattggatgtcttctcctaagacactggtgcacaacatcctgatagctctgaagctaccgcgcgattctctcccaccacatcggaggatgatcaacatgcctgggtttgcagtgacggtgcaagatatgttggatgcattagaagaggttggtggcaaggacgcgctcgctctcgtgcaagaagaggatattctagagctgcggcctgtgctatattcttgggcagatgacttcgataattcgctcgctttatcattgggaatgaagcaggactcatcattcaaggactcagtacaggactatgtggaaacgctagcagaatcatag

SEQ ID NO: 920 - protein, 318 aa, Muscodor strobelii
  misc_feature: SGI Peptide ID NO. 559889
  misc_feature (4)..(231): Pfam Id: PF01073 Pfam Desc: 3-beta hydroxysteroid dehydrogenase/isomerase family
  misc_feature (3)..(244): Pfam Id: PF01370 Pfam Desc: NAD dependent epimerase/dehydratase family
  misc_feature (89)..(192): Pfam Id: PF01370 Pfam Desc: NAD dependent epimerase/dehydratase family
  misc_feature (3)..(21): Pfam Id: PF01370 Pfam Desc: NAD dependent epimerase/dehydratase family
  misc_feature (1)..(317): NCBI GI: 67525323 Blast Desc: AN3119.2 [Aspergillus nidulans FGSC A4] gi|40744514|gb|EAA63690.1| AN3119.2 [Aspergillus nidulans FGSC A4] gi|259485931|tpe|CBF83372.1| TPA: epimerase, (AFU_orthologue;
  misc_feature (1)..(311): NCBI GI: 238489749 Blast Desc: nucleoside-diphosphate-sugar epimerase, [Aspergillus flavus NRRL3357] gi|220698500|gb|EED54840.1| nucleoside-diphosphate-sugar epimerase, [Aspergillus flavus
  misc_feature (1)..(311): NCBI GI: 169763796 Blast Desc: [Aspergillus oryzae RIB40] gi|83770826|dbj|BAE60959.1| protein product [Aspergillus oryzae]
  misc_feature (1)..(311): NCBI GI: 145233273 Blast Desc: An02g08750 [Aspergillus niger] gi|134056937|emb|CAK44284.1| protein product [Aspergillus niger]
  misc_feature (1)..(311): NCBI GI: 115391585 Blast Desc: conserved [Aspergillus terreus NIH2624] gi|114194221|gb|EAU35921.1| conserved [Aspergillus terreus NIH2624]
  misc_feature (1)..(313): NCBI GI: 159127359 Blast Desc: nucleoside-diphosphate-sugar epimerase, [Aspergillus fumigatus A1163]
  misc_feature (1)..(313): NCBI GI: 119491128 Blast Desc: nucleoside-diphosphate-sugar epimerase, [Neosartorya fischeri NRRL 181] gi|119411346|gb|EAW21289.1| nucleoside-diphosphate-sugar epimerase, [Neosartorya fischeri
  misc_feature (1)..(313): NCBI GI: 70999245 Blast Desc: nucleoside-diphosphate-sugar epimerase [Aspergillus fumigatus Af293] gi|66851981|gb|EAL92306.1| nucleoside-diphosphate-sugar epimerase, [Aspergillus fumigatus
  misc_feature (1)..(315): NCBI GI: 212527550 Blast Desc: nucleoside-diphosphate-sugar epimerase, [Penicillium marneffei ATCC 18224] gi|210073330|gb|EEA27417.1| nucleoside-diphosphate-sugar epimerase, [Penicillium marneffei
  misc_feature (1)..(313): NCBI GI: 121706018 Blast Desc: nucleoside-diphosphate-sugar epimerase, [Aspergillus clavatus NRRL 1] gi|119399418|gb|EAW09846.1| nucleoside-diphosphate-sugar epimerase, [Aspergillus clavatus 1]
  misc_feature (2)..(169): SWISSPROT Homolog: EC 5.1.3.5 UDP-arabinose 4-epimerase
MRILITGAAGFIGQIVAKELLTDESNELILVDVIEPSVPPGSKYPQNAKSIKADLVESAASVVEQGLDSVIILHGIMSSGAEANFELGYRVNVDATRSLLNALVTTCAGIRVLYASSEAVYGSPVPKQAVTELDIPSPELSYGCQKIICETFINDYTRRNLINGVSLRFPTISVRPGKPTAAVTSFLSGIIREPLNGQVCTLPLKDRNWRHWMSSPKTLVHNILIALKLPRDSLPPHRRMINMPGFAVTVQDMLDALEEVGGKDALALVQEEDILELRPVLYSWADDFDNSLALSLGMKQDSSFKDSVQDYVETLAES

SEQ ID NO: 921 - DNA, 490 bp, Muscodor strobelii
  misc_feature: SGI EST ID NO. CUFF.2553.0
  misc_feature: Variant of the nucleotide sequence at SEQ ID NO 919
gcggccgttacctcattcctctctggcattattagggaaccactcaacgggcaagtttgcacgttacccctaaaagatcgcaattggcgtcattggatgtcttctcctaagacactggtgcacaacatcctgatagctctgaagctaccgcgcgattctctcccaccacatcggaggatgatcaacatgcctgggtttgcagtgacggtgcaagatatgttggatgcattagaagaggttggtggcaaggacgcgctcgctctcgtgcaagaagaggatattctagagctgcggcctgtgctatattcttgggcagatgacttcgataattcgctcgctttatcattgggaatgaagcaggactcatcattcaaggactcagtacaggactatgtggaaacgctagcagaatcatagttgacaacataaaggcttatatatcatattaatcgtgtcatatagtttcgggcattgcagtatatcttgaaag

SEQ ID NO: 922 - DNA, 987 bp, Muscodor strobelii
  misc_feature: SGI cDNA ID NO. 559890
  misc_feature: Encodes the peptide sequence at SEQ ID NO 923
atggcgaccatcactccggctgcagtcaaagtccagagccctttcaagcttcccactggatatggagattggcgggatgacctcgaggctcggggttatgcgattgtgaaaggtgctatcgcgccggaaagggcacaatattaccagaaaaaagcctttgaatggttgaactcgttcgatccggacctcaatcccaacgatccatctacctataaagcagagaagctcccaatccagacggaaaggaacacatacgagcactatggcgttgtccatgagaagttcatgtgggaagctcggcaagaagctggcgtcctcgatgcttttgagaaagtttgggggattggcgatcttcttgtttcatttgactctctgaatgtaactctaccgaatctgaagccggttcgtgcaccatggccgcacatagaccaggcgccgaggaagcgtggattgcattgtattcagggaatcatcaacctaagccatgttggccctgaagatggctctctcgtggtgatcccgggctctcatgccctcgtcgagaaattctttgacgagaagacgaagccatccgactgggaatggcgcgacaacagatactttgataagaatgacatggagttcttcgagagccgaggtttaaagccactcaaggtgttggcagagcctggcgatctaatcctctgggactctcgaacaatccactggggtggggagcctactgctaagagtacggtccctcgaactgtgatctacgctgcgtatgcaccagcaaaattggcgtcaaaggaggccattgaagagaagaaacgcgtgtttaatgcgtatggggctacaacacattggccgcatgacaacatcaaactgagggatctcaatgcccacttaccagacggtaccttagaccctcgcaatcgagaaggcccgttggaagagcccgagcgttctgaccgtctgctgaagttggctggagtggtggcgtattga

SEQ ID NO: 923 - protein, 328 aa, Muscodor strobelii
  misc_feature: SGI Peptide ID NO. 559890
  misc_feature (26)..(250): Pfam Id: PF05721 Pfam Desc: Phytanoyl-CoA dioxygenase (PhyH)
  misc_feature (12)..(328): NCBI GI: 255953413 Blast Desc: Pc21g04130 [Penicillium chrysogenum Wisconsin 54-1255] gi|211589170|emb|CAP95310.1| Pc21g04130 [Penicillium chrysogenum Wisconsin 54-1255]
  misc_feature (4)..(328): NCBI GI: 238505390 Blast Desc: conserved [Aspergillus flavus NRRL3357] gi|220690038|gb|EED46388.1| conserved [Aspergillus flavus NRRL3357]
  misc_feature (21)..(328): NCBI GI: 115387281 Blast Desc: conserved [Aspergillus terreus NIH2624] gi|114195230|gb|EAU36930.1| conserved [Aspergillus terreus NIH2624]
  misc_feature (21)..(328): NCBI GI: 189211353 Blast Desc: conserved [Pyrenophora tritici-repentis Pt-1C-BFP] gi|187978100|gb|EDU44726.1| conserved [Pyrenophora tritici-repentis Pt-1C-BFP]
  misc_feature (21)..(328): NCBI GI: 254564469 Blast Desc: [Pichia pastoris GS115] gi|238029141|emb|CAY67061.1| [Pichia pastoris GS115]
  misc_feature (21)..(328): NCBI GI: 169611606 Blast Desc: SNOG_08917 [Phaeosphaeria nodorum SN15] gi|111062965|gb|EAT84085.1| SNOG_08917 [Phaeosphaeria nodorum SN15]
  misc_feature (3)..(328): NCBI GI: 169763510 Blast Desc: [Aspergillus oryzae RIB40] gi|238489433|ref|XP_002375954.1| conserved [Aspergillus flavus NRRL3357] gi|83770683|dbj|BAE60816.1| protein product oryzae]
  misc_feature (5)..(328): NCBI GI: 145257290 Blast Desc: An04g03090 [Aspergillus niger] gi|134058589|emb|CAK44625.1| protein product [Aspergillus niger]
  misc_feature (21)..(328): NCBI GI: 189211303 Blast Desc: conserved [Pyrenophora tritici-repentis Pt-1C-BFP] gi|187978075|gb|EDU44701.1| conserved [Pyrenophora tritici-repentis Pt-1C-BFP]
  misc_feature (15)..(328): NCBI GI: 39975921 Blast Desc: MGG_06113 [Magnaporthe grisea 70-15] gi|145011590|gb|EDJ96246.1| MGG_06113 [Magnaporthe grisea 70-15]
MATITPAAVKVQSPFKLPTGYGDWRDDLEARGYAIVKGAIAPERAQYYQKKAFEWLNSFDPDLNPNDPSTYKAEKLPIQTERNTYEHYGVVHEKFMWEARQEAGVLDAFEKVWGIGDLLVSFDSLNVTLPNLKPVRAPWPHIDQAPRKRGLHCIQGIINLSHVGPEDGSLVVIPGSHALVEKFFDEKTKPSDWEWRDNRYFDKNDMEFFESRGLKPLKVLAEPGDLILWDSRTIHWGGEPTAKSTVPRTVIYAAYAPAKLASKEAIEEKKRVFNAYGATTHWPHDNIKLRDLNAHLPDGTLDPRNREGPLEEPERSDRLLKLAGVVAY

SEQ ID NO: 924 - DNA, 2077 bp, Muscodor strobelii
  misc_feature: SGI EST ID NO. CUFF.2556.0
  misc_feature: Variant of the nucleotide sequence at SEQ ID NO 922
gtatagtcgttaatgaacgtctcgcagatgatcttttgacatccgtaggaaagttcaggtgatggaatgtccaattccgtgacagcctgcttaggtacaggactaccgtacacggcctcgctggacgcgtatagtacgcgaattccagcgcacgttgttacaagagcgttcaagagagatcgcgttgcgtcaacgttgacgcggtagcctaattcgaagttggcttccgcccctgacgacatgataccatgtaagatgatcacagagtctagtccttgctcaaccacgcttgctgcagattcgaccagatctgcttttatgcttttggcattttgcggatatttactgcctggaggcacagatggctcaatgacatccaccaatataagctcattcgactcatctgtaaggagttctttcgcgactatctggccaatgaaaccagccgcgccggtgatgaggatgcgcatgttgaacaatgagcagttgcctgtgacaattgcatgtagaatatgatgcttcggcacctgtataatgctcggctaggtcaattcgtcgaggaggtctatagcttggagtgctccaaccccaaatgaataactggcgacactggctactcatgcgctggggtatcccagtagcctgccaagcaacattttcctccgccattagttcccccaacgcggggcaaacaccaaccgtagatggtcatgcggaggtgctacggcgtaatggtctcccggaattgtgcccatcacacgataccaattcactagtggcaactcggttatctagagcgttgtggtagtggagcttatatcttgagaataatgtgacttacaggcagcagaggttgtaaagagaattcattgacaagcattgtcgattcgtgaggattagttgagtaattttacaatatggcgaccatcactccggctgcagtcaaagtccagagccctttcaagcttcccactggatatggagattggcgggatgacctcgaggctcggggttatgcgattgtgaaaggtgctatcgcgccggaaagggcacaatattaccagaaaaaagcctttgaatggttgaactcgttcgatccggacctcaatcccaacgatccatctacctataaagcagagaagctcccaatccagacggaaaggaacacatacgagcactatggcgttgtccatgagaagttcatgtgggaagctcggcaagaagctggcgtcctcgatgcttttgagaaagtttgggggattggcgatcttcttgtttcatttgactctctgaatgtaactctaccgaatctgaagccggttcgtgcaccatggccgcacatagaccaggcgccgaggaagcgtggattgcattgtattcagggaatcatcaacctaagccatgttggccctgaagatggctctctcgtggtgatcccgggctctcatgccctcgtcgagaaattctttgacgagaagacgaagccatccgactgggaatggcgcgacaacagatactttgataagaatgacatggagttcttcgagagccgaggtttaaagccactcaaggtgttggcagagcctggcgatctaatcctctgggactctcgaacaatccactggggtggggagcctactgctaagagtacggtccctcgaactgtgatctacgctgcgtatgcaccagcaaaattggcgtcaaaggaggccattgaagagaagaaacgcgtgtttaatgcgtatggggctacaacacattggccgcatgacaacatcaaactgagggatctcaatgcccacttaccagacggtaccttagaccctcgcaatcgagaaggcccgttggaagagcccgagcgttctgaccgtctgctgaagttggctggagtggtggcgtattgaaaggaaagaaacgcggtataatctccaacctgacttcatgtaagatatggtgattcaccttgccagtgcctactagatagaataaactttccaattgcgacgcgatcttcgaagaggagcgtgaccagtcatatgcagtgccaaattttagggagcgactcgcttaaaacccc

SEQ ID NO: 925 - DNA, 1836 bp, Muscodor strobelii
  misc_feature: SGI cDNA ID NO. 559891
  misc_feature: Encodes the peptide sequence at SEQ ID NO 926
atgtcgagtggcgccgaggacgcatacgaagatggcttagatgcgtcaccattgaagcgggcaagagttctttcaaaggcacagagggcccagccagggctaaagccgggctacggcaaggcaatggaacgtcgactaagcagtttggaagaaagtgttgagaaaatcaatcggactctggaggacgtgctgagacaagtcagacctggcgataatgtgtcccagcagaacactgccatccccgctttgtacgatgattcgcagccatgggaggagaaccaacaacctcttccattgcaggcacatacttctgcttcgactgctatgcagcaatctgactctggtagtgttctcagatcgaggagtgagctgccgcccgacatcatcatggaacaactagtcgagttgttcttcgaaaaggtctatccgtgggctcccattttctatcgaccccattttgtcacgaatatgaagtccccagagcgtcttctacttctccacgggatcgtagtggtagcgttccgatactggaaacaaccggatccctcaatccaaatacgagaaaattatgttcaagcttcgagagataggatccttcttgagaccataaatacttgctctttgatctcgactcaggctctttctcttctggcaattgatgcaatcggacaaggcccgtcgcctagaacctggaaagtgatgtcgatgctttacactgctctgcaggaattaggtctggaaaagacccattctacagtggatgtcgacgtcgatacaccattagtgcgaaacgatgatctgaacgatgatctagacctatctatcgtccaaggagaggaaaagcgcaggctgttctggttgatatatcgccaggatcagttttcatctgtttctcgggggcgagcaggaactatcaatacgaacgatatccatctcccttatccggctggagaagacgaatggggccttccaacaacgcccaaatggtttgaagccgtgcctcaattgagacagccgggcacacatccatgcgatgatattctttggcagtgttacatcgatgtgatggtatttcttgaccgcacgaatcggcttctcgtcagacctgtcaacctttctcttcctgctcattgtcaagagtggcagagcaatttcagaagacttgacacgaatctctcgagttggtttgagaacctaccgaaggaaataaccgacacccctgccaaattcgatcccatatggctgatgcttcatgctaccttccacttgataaagatacgtatgtacacggtcgcgtcatttccctccacgagctcgccgtacttgaaagcctcttcgtcggcgcgcagcctctgccgacagtcggtcggaaatgtcgcgtcgcttaccacttcagtacagccacatgagcttgatcagctaagtccaatgttcgcgtttgtaatatgggttgcgagcagaagtctagtcatcctatggacaagcggctacgagtctacatacgcaacaccaccagctgaactcgagcctatgttgtggactttgcgacaaatgggatcatattggccaagcgctcaacgttatgttgacatcatccagttgatattagatactaagaataaccctggtggcccaactggcttggaagttttcaatgataccagacgaacagcatacggggtgcaaaatcgccttggaaagctcgccgtaaaccgggcgtatcaaggtcttgtaaattcgtttgactttctcgatataccactacttgatacaggtgacttgagtctaggccgtaccggtagcctaggctttgatatggttgatgaatggttatag

SEQ ID NO: 926 - protein, 611 aa, Muscodor strobelii
  misc_feature: SGI Peptide ID NO. 559891
  misc_feature (207)..(320): Pfam Id: PF04082 Pfam Desc: Fungal specific transcription factor domain
  misc_feature (75)..(601): NCBI GI: 46136737 Blast Desc: FG09884.1 [Gibberella zeae PH-1]
  misc_feature (116)..(559): NCBI GI: 212532435 Blast Desc: C6 transcription factor, [Penicillium marneffei ATCC 18224] gi|210071738|gb|EEA25827.1| C6 transcription factor, [Penicillium marneffei ATCC 18224]
  misc_feature (75)..(559): NCBI GI: 154294891 Blast Desc: BC1G_13568 [Botryotinia fuckeliana B05.10] gi|150844526|gb|EDN19719.1| BC1G_13568 [Botryotinia fuckeliana B05.10]
  misc_feature (72)..(559): NCBI GI: 156044442 Blast Desc: SS1G_10324 [Sclerotinia sclerotiorum 1980] gi|154694713|gb|EDN94451.1| SS1G_10324 [Sclerotinia sclerotiorum 1980]
  misc_feature (72)..(559): NCBI GI: 39946394 Blast Desc: MGG_08314 [Magnaporthe grisea 70-15] gi|145020040|gb|EDK04268.1| MGG_08314 [Magnaporthe grisea 70-15]
  misc_feature (116)..(559): NCBI GI: 242775540 Blast Desc: C6 transcription factor, [Talaromyces stipitatus ATCC 10500] gi|218722282|gb|EED21700.1| C6 transcription factor, [Talaromyces stipitatus ATCC 10500]
  misc_feature (101)..(559): NCBI GI: 171677484 Blast Desc: protein product [Podospora anserina] gi|170936810|emb|CAP61468.1| protein product [Podospora anserina]
  misc_feature (104)..(559): NCBI GI: 116201103 Blast Desc: CHGG_08436 [Chaetomium globosum CBS 148.51] gi|88176954|gb|EAQ84422.1| CHGG_08436 [Chaetomium globosum CBS 148.51]
  misc_feature (99)..(592): NCBI GI: 256731643 Blast Desc: [Nectria haematococca mpVI 77-13-4]
  misc_feature (120)..(559): NCBI GI: 85091598 Blast Desc: NCU09033 [Neurospora crassa OR74A] gi|28920374|gb|EAA29744.1| NCU09033 [Neurospora crassa OR74A]
MSSGAEDAYEDGLDASPLKRARVLSKAQRAQPGLKPGYGKAMERRLSSLEESVEKINRTLEDVLRQVRPGDNVSQQNTAIPALYDDSQPWEENQQPLPLQAHTSASTAMQQSDSGSVLRSRSELPPDIIMEQLVELFFEKVYPWAPIFYRPHFVTNMKSPERLLLLHGIVVVAFRYWKQPDPSIQIRENYVQASRDRILLETINTCSLISTQALSLLAIDAIGQGPSPRTWKVMSMLYTALQELGLEKTHSTVDVDVDTPLVRNDDLNDDLDLSIVQGEEKRRLFWLIYRQDQFSSVSRGRAGTINTNDIHLPYPAGEDEWGLPTTPKWFEAVPQLRQPGTHPCDDILWQCYIDVMVFLDRTNRLLVRPVNLSLPAHCQEWQSNFRRLDTNLSSWFENLPKEITDTPAKFDPIWLMLHATFHLIKIRMYTVASFPSTSSPYLKASSSARSLCRQSVGNVASLTTSVQPHELDQLSPMFAFVIWVASRSLVILWTSGYESTYATPPAELEPMLWTLRQMGSYWPSAQRYVDIIQLILDTKNNPGGPTGLEVFNDTRRTAYGVQNRLGKLAVNRAYQGLVNSFDFLDIPLLDTGDLSLGRTGSLGFDMVDEWL

SEQ ID NO: 927 - DNA, 736 bp, Muscodor strobelii
  misc_feature: SGI EST ID NO. CUFF.2566.0
  misc_feature: Variant of the nucleotide sequence at SEQ ID NO 925
cgcacctccccaagctcattaaaatatcggtcataaaaggatatacttcttctacgacatttatgtgaacacttaacagccatgtcgagtggcgccgaggacgcatacgaagatggcttagatgcgtcaccattgaagcgggcaagagttctttcaaaggcatgcgagagttgtcagatcaagaaatccaagtgtgatagtgcacgtccgacttgtggatcttgccgagttaaaggcatttcttgtaactatagacagagggcccagccagggctaaagccgggctacggcaaggcaatggaacgtcgactaagcagtttggaagaaagtgttgagaaaatcaatcggactctggaggacgtgctgagacaagtcagacctggcgataatgtgtcccagcagaacactgccatccccgctttgtacgatgattcgcagccatgggaggagaaccaacaacctcttccattgcaggcacatacttctgcttcgactgctatgcagcaatctgactctggtagtgttctcagatcgaggagtgagctgccgcccgacatcatcatggaacaactagtcgagttgttcttcgaaaaggtctatccgtgggctcccattttctatcgaccccattttgtcacgaatatgaagtccccagagcgtcttctacttctccacgggatcgtagtggtagcgttccgatactggaaacaaccggatccctcaatccaaatacgag

SEQ ID NO: 928 - DNA, 1083 bp, Muscodor strobelii
  misc_feature: SGI cDNA ID NO. 559892
  misc_feature: Encodes the peptide sequence at SEQ ID NO 929
atgtctaagccaaaagcattgcttctaggccgaatcgaccatgcgcaggattcatgggatgccctctcaaatatcgcagagttagtaacaccaacagctacgaaccgggaagagtttatccaagagtgtcggagcggaaaacttgacggcattgtcgcaatctgcgacagagccccttctagtctcgcacttactggtaaatttgatgaagaattgataaacgcactacctcagagtgtcaggttcctctgtcacaatggtacgtctcgcagcgcaggtgttcggggtctcctgataggtggttttcgcaaactaatcatcgcaattgaaggtgctggatatgacagtatagacgtcgcggcctgcacggcacgatccatcttgctttcaaactgccccaaagtcgttgatgatgctactgcggacacagccgtatttctcattttggctgcgctgcgtgggtttaataacggcatcatggcaattcggaatcgcgcatggactgggcacgtacctccaccacccctaggacatgacccgcaaggcaaagtgctcggaattctcggaatgggaggtatagggagaaacctcaagagaaaaatggaggtatttgggatgcgatgtatctaccacaatcgatcgcaagtcgaccctgaactggcggatggagccgagtacgttagttttgatgaactactagccaaaagcgatgtactaagcctcaatcttcccctaaacgagaatacgcggaatatcatctctacaaacgagtttgcgaagatgacaaggggtatcgtcatcgtaaacacagcaaggggcggcgtgctggacgaagaagcacttgtgcaagctttgaatgcaggtcaagtcttatctgttggtcttgacgtgtatcagaacgagccggacattcaccctggtctactatcgaatcctcatgtttgtcttttgcctcacatgggaacatcttccgttgaaacgaaaacgaaaatggagcgatggaccattgcaaatgtccgagccggcctagagacaggacaattgaatagcatcgtgcccgagcaagcacatttatcttcgtga

SEQ ID NO: 929 - protein, 360 aa, Muscodor strobelii
  misc_feature: SGI Peptide ID NO. 559892
  misc_feature (52)..(353): Pfam Id: PF00389 Pfam Desc: D-isomer specific 2-hydroxyacid dehydrogenase, catalytic domain
  misc_feature (145)..(321): Pfam Id: PF02826 Pfam Desc: D-isomer specific 2-hydroxyacid dehydrogenase, NAD binding domain
  misc_feature (106)..(353): Pfam Id: PF00389 Pfam Desc: D-isomer specific 2-hydroxyacid dehydrogenase, catalytic domain
  misc_feature (2)..(359): NCBI GI: 240276326 Blast Desc: glyoxylate reductase [Ajellomyces capsulatus H143]
  misc_feature (2)..(359): NCBI GI: 225559799 Blast Desc: glyoxylate reductase [Ajellomyces capsulatus G186AR]
  misc_feature (2)..(358): NCBI GI: 121708143 Blast Desc: glyoxylate reductase [Aspergillus clavatus NRRL 1] gi|119400190|gb|EAW10616.1| glyoxylate reductase [Aspergillus clavatus NRRL 1]
  misc_feature (2)..(358): NCBI GI: 159125430 Blast Desc: glyoxylate reductase [Aspergillus fumigatus A1163]
  misc_feature (2)..(358): NCBI GI: 261191805 Blast Desc: glyoxylate reductase [Ajellomyces dermatitidis SLH14081] gi|239589626|gb|EEQ72269.1| glyoxylate reductase [Ajellomyces dermatitidis SLH14081] gi|239608632|gb|EEQ85619.1|
  misc_feature (3)..(358): NCBI GI: 240105302 Blast Desc: D-isomer specific 2-hydroxyacid dehydrogenase family protein [Coccidioides posadasii C735 delta SOWgp]
  misc_feature (3)..(359): NCBI GI: 258567790 Blast Desc: hydroxyacid dehydrogenase [Uncinocarpus reesii 1704] gi|237906085|gb|EEP80486.1| hydroxyacid dehydrogenase [Uncinocarpus reesii 1704]
  misc_feature (2)..(358): NCBI GI: 119500182 Blast Desc: glyoxylate reductase [Neosartorya fischeri NRRL 181] gi|119415013|gb|EAW24951.1| glyoxylate reductase [Neosartorya fischeri NRRL 181]
  misc_feature (2)..(358): NCBI GI: 70993598 Blast Desc: glyoxylate reductase [Aspergillus fumigatus Af293] gi|66849280|gb|EAL89608.1| glyoxylate reductase [Aspergillus fumigatus Af293]
  misc_feature (3)..(358): NCBI GI: 238843830 Blast Desc: glyoxylate reductase [Microsporum canis CBS 113480]
  misc_feature (97)..(331): SWISSPROT Homolog: EC 1.1.1.26 Glyoxylate reductase
MSKPKALLLGRIDHAQDSWDALSNIAELVTPTATNREEFIQECRSGKLDGIVAICDRAPSSLALTGKFDEELINALPQSVRFLCHNGTSRSAGVRGLLIGGFRKLIIAIEGAGYDSIDVAACTARSILLSNCPKVVDDATADTAVFLILAALRGFNNGIMAIRNRAWTGHVPPPPLGHDPQGKVLGILGMGGIGRNLKRKMEVFGMRCIYHNRSQVDPELADGAEYVSFDELLAKSDVLSLNLPLNENTRNIISTNEFAKMTRGIVIVNTARGGVLDEEALVQALNAGQVLSVGLDVYQNEPDIHPGLLSNPHVCLLPHMGTSSVETKTKMERWTIANVRAGLETGQLNSIVPEQAHLSS

SEQ ID NO: 930 - DNA, 427 bp, Muscodor strobelii
  misc_feature: SGI EST ID NO. CUFF.2706.0
  misc_feature: Variant of the nucleotide sequence at SEQ ID NO 928
ttttaaactcgtttgtacttttaataacgaccaaacttgagtcgtactatggagaatcatttctctgagcattcgtcgtagcatcaaatcagaaacgagccgatacatgcggggtgcttgatcaaacaacgtgtcacaatcatgtctaagccaaaagcattgcttctaggccgaatcgaccatgcgcaggattcatgggatgccctctcaaatatcgcagagttagtaacaccaacagctacgaaccgggaagagtttatccaagagtgtcggagcggaaaacttgacggcattgtcgcaatctgcgacagagccccttctagtctcgcacttactggtaaatttgatgaagaattgataaacgcactacctcagagtgtcaggttcctctgtcacaatggtacgtctcgcagcgcaggtgttcggg

SEQ ID NO: 931 - DNA, 837 bp, Muscodor strobelii
  misc_feature: SGI cDNA ID NO. 559893
  misc_feature: Elevated expression when VOC is produced
  misc_feature: Encodes the peptide sequence at SEQ ID NO 932
atgtctatgccagatgctgaattccaccctgttgctacaggggcggcaaggcccactgtagatgctcattctgcagagcaacccctgaagctcttcgcgggatggttctgtccctttgtgcagcgcacatggatcgcacttgaggagaaaggcattccataccaatatgttgaagtaaatccctaccataagggcccagagttgatggctgcgaacccacgtggattagtacctacccttcaagcatctcccggcaaatccttgtacgagagttcgattatctgccaatatctagaggacaactatcccactcacaaaccacaattgctatcttcggacccttacgagcgtgcacggtcccgcatttggatggatttcgtgacaagtcgcatcatcccggcttaccaccgtctccttcagttccagccgggctcatacgagggtgacggcgaggctcggcttgatgaactccgcgtcgagtttcgcaagtatctcctcgagttcgtaagtgagatggcggacgcctcagaaggcccatggtttgcgggcaaggaattcggcctggtcgacatacagttgttgccttgggctgctcgactctgggtgtttgatgagttcaagggtggtctgagaatacccgagaagggacagggtggcgaggatgagagcaagtgggagcgttttcgagtgtggatcacggctgcgaaggcaagagatagtgtggtgaagaccacaagcgagcgtgaacattaccgacccatgtacaagaagtacgcggatgatatcgcgcagtcggatttggcgaaagcgacccgagctggtcgaggtgtaccgtag

SEQ ID NO: 932 - protein, 278 aa, Muscodor strobelii
  misc_feature: SGI Peptide ID NO. 559893
  misc_feature (27)..(100): Pfam Id: PF02798 Pfam Desc: Glutathione S-transferase, N-terminal domain
  misc_feature (150)..(204): Pfam Id: PF00043 Pfam Desc: Glutathione S-transferase, C-terminal domain
  misc_feature (2)..(278): NCBI GI: 119496379 Blast Desc: glutathione S-transferase, [Neosartorya fischeri NRRL 181] gi|119413125|gb|EAW23066.1| glutathione S-transferase, [Neosartorya fischeri NRRL 181]
  misc_feature (4)..(278): NCBI GI: 189200599 Blast Desc: glutathione transferase omega-1 [Pyrenophora tritici-repentis Pt-1C-BFP] gi|187983735|gb|EDU49223.1| glutathione transferase omega-1 [Pyrenophora tritici-repentis
  misc_feature (3)..(278): NCBI GI: 238489971 Blast Desc: glutathione-S-transferase theta, GST, [Aspergillus flavus NRRL3357] gi|220698611|gb|EED54951.1| glutathione-S-transferase theta, GST, [Aspergillus flavus
  misc_feature (2)..(278): NCBI GI: 255948688 Blast Desc: Pc22g11650 [Penicillium chrysogenum Wisconsin 54-1255] gi|211592128|emb|CAP98453.1| Pc22g11650 [Penicillium chrysogenum Wisconsin 54-1255]
  misc_feature (1)..(256): NCBI GI: 145238772 Blast Desc: An07g09590 [Aspergillus niger] gi|134076529|emb|CAK39724.1| protein product [Aspergillus niger]
  misc_feature (4)..(276): NCBI GI: 238842877 Blast Desc: conserved [Microsporum canis CBS 113480]
  misc_feature (6)..(263): NCBI GI: 258569871 Blast Desc: [Uncinocarpus reesii 1704] gi|237904009|gb|EEP78410.1| [Uncinocarpus reesii 1704]
  misc_feature (9)..(256): NCBI GI: 226290437 Blast Desc: lactoylglutathione lyase [Paracoccidioides brasiliensis Pb18]
  misc_feature (3)..(251): NCBI GI: 225555466 Blast Desc: glutathione S-transferase [Ajellomyces capsulatus G186AR]
  misc_feature (4)..(248): NCBI GI: 169624901 Blast Desc: SNOG_15716 [Phaeosphaeria nodorum SN15] gi|160705557|gb|EAT76811.2| SNOG_15716 [Phaeosphaeria nodorum SN15]
  misc_feature (29)..(200): SWISSPROT Homolog: EC 2.5.1.18 Glutathione transferase
  misc_feature: Useful for introducing or modulating the production of volatile compounds
MSMPDAEFHPVATGAARPTVDAHSAEQPLKLFAGWFCPFVQRTWIALEEKGIPYQYVEVNPYHKGPELMAANPRGLVPTLQASPGKSLYESSIICQYLEDNYPTHKPQLLSSDPYERARSRIWMDFVTSRIIPAYHRLLQFQPGSYEGDGEARLDELRVEFRKYLLEFVSEMADASEGPWFAGKEFGLVDIQLLPWAARLWVFDEFKGGLRIPEKGQGGEDESKWERFRVWITAAKARDSVVKTTSEREHYRPMYKKYADDIAQSDLAKATRAGRGVP

SEQ ID NO: 933 - DNA, 4048 bp, Muscodor strobelii
  misc_feature: SGI EST ID NO. CUFF.3053.0
  misc_feature: Variant of the nucleotide sequence at SEQ ID NO 931
aaaaacaaaacataggcgtatgtcagcaatagaaaccgacggagagaccatcctaaggttcactttcaccatcacgggcatttcatccctccggatgagaatgtggtaatgaagatgggggcgggtgtaatggcattcggtcacggcgcggcacagaaaaaggatgcgtatagcaacatcctgttacgcgtcgcagtatcgcggaaaagctcatagatcatcggtacacaagacgaaggcgccataccctgagaaacggaggaagttatttgttcaatattatcgcaatttactacagcgctcacaattaagcccttctttgacatgaagggatcagttgggatcgaatgacaccggacggaggctggatcattgaacagcatccggacatgagcaattggatcgtagcattaggcggaccaagacacggcttcaaattcctacaagtggctggaaaacggattatcgacatcgtcaaaggcgagaatgttgatgcgtctggcgacggtcatgatgaccctcctgcctccggcgagacagcgagagatgggaatggggaaggccggccaacgagaatttcaaggtctctggtgtcgccattaaaggtcgcgaaatgagatattggacatctgggctaaagctaggcgggactactatcacgatgctctaagatagaatcgcgtgtgttgggatcagcgcaggacaaaatttcccccgctcattcagctgaccttagtaacaaaagcatttatttcaggcggcacagacacaagacaaggctgatttatacccaggacaatactgatttctaatgaaattcagtcctggaacactttttgtccactctctctgtgtctcctaggagaaatacgacatttgctcctaattatgacggtgccattcgatgtgcggggctgaataatcacgtcattgacgcaacatataaagccgagacggtcgcattttaatatgttggaaagcattgatttcgagaagatcatcggtaccaggaattgaacaatctaatcggtcatacagttggcaacagaagttatacgcataagccttcttcctgacagaaagttgcaagtcaaaaatgtctatgccagatgctgaattccaccctgttgctacaggggcggcaaggcccactgtagatgctcattctgcagagcaacccctgaagctcttcgcgggatggttctgtccctttgtgcagcgcacatggatcgcacttgaggagaaaggcattccataccaatatgttgaagtaaatccctaccataagggcccagagttgatggctgcgaacccacgtggattagtacctacccttcaagcatctcccggcaaatccttgtacgagagttcgattatctgccaatatctagaggacaactatcccactcacaaaccacaattgctatcttcggacccttacgagcgtgcacggtcccgcatttggatggatttcgtgacaagtcgcatcatcccggcttaccaccgtctccttcagttccagccgggctcatacgagggtgacggcgaggctcggcttgatgaactccgcgtcgagtttcgcaagtatctcctcgagttcgtaagtgagatggcggacgcctcagaaggcccatggtttgcgggcaaggaattcggcctggtcgacatacagttgttgccttgggctgctcgactctgggtgtttgatgagttcaagggtggtctgagaatacccgagaagggacagggtggcgaggatgagagcaagtgggagcgttttcgagtgtggatcacggctgcgaaggcaagagatagtgtggtgaagaccacaagcgagcgtgaacattaccgacccatgtacaagaagtacgcggatgatatcgcgcagtcggatttggcgaaagcgacccgagctggtcgaggtgtaccgtaggcatttaaactcaacgtggcatgtgacgatacttatgtatagatactagaaggatatatggccaaaacatggttctggagccgtgaatacaagatttctacaacactgaactaggagaaacagtagatgctcgtgtgtggtatctaaaattcataaatccaagcacgcctcgctgatcccacgctctattatacaatatttacaagcgataacccggcaacacgattctagtcgtagtatacaccatgccattgtggcatcttcagagtcgccaacagtcaactcgtctctgagtcatctgtttgtaaggagcacttggccaagaaccaaagaaggatttgtgcgaggtgcaaatgaaccagtcttggtatgtttgacgctcttagatttcgatacttgggggtatgcttttgagatgcatgcccctcatgtattcatcttggtccacattctcacgacccagaaaccaggtagccgtggcattcaaatggagtccattgttgatgcttcttactccataccaccacccagggggtaccaacaaaccgtctcctggccgcagtttcgcaaaaacgacgtcatccgtcttcgctagctcgtcttcgaactcttgtgtccaagttttactggccagagcatcttggtaaacattgggtactctttcatggaaccctaatggagcaccgttcagtgcttgtagactcggaggaatcagcgtcgcaatgccatatccggcgatctggcctacgacaacggtgctttctttatagcgccgcatgtcgctgcgcagcggccttacacccacgcgaatgctacatgatctagcgttatatctcgagtctcctatatcgcggatgatgcgtgggaatggaaagtcatcggtcatcttctccactaacactactagagcgctgatttcggtgatgcaattaggatagtccttcctgtcaaaatgagtgatatcctttgatgcggtcaaatccccaggctgtggttgttgggcgaggttgtactggtttacagctcggatgaacacgagaggtgctttgaatggcaaccagggcaggggcgatttgttgtgcaagtcgatcaattcagcaacgacgtcgcccagctggtattcgtcgagatgcctagactgccgcacccaatccaggaacctcagtattggtggatactctccctcgaatgcgactgccttgatcttgagtactgcatcgaatttgtcgaacatcgcctgtccctcatcacggtccactttgcttccaccggatgctggacccgcaccggcccaaatggttctcatgactttataacctagctggtcttgagaatttttctgcgggcgcttcctaaaggacccttctggtccgatgtcagatgcaattagggggttgctgatcaggaagccgggaaggttgccaatgagcattggctgtccacgttcaattctgccagtgtatgttttaaccagtccgtcgagcgatcgcttgcgcgcattgaccgaattgagatatttcttaggaaatatttgtattggtttggacaacttggtgagtggtgtcgagcctgctgttggttgctcaccagcctgcgacactttcctgaatgagcctgctggatctggccagtgtttcctccattgtgtcaccttttcaaaaagctcttttggcggctttcgaggggaaagcgtgaacaaatcgttcttttttattactgttcgtctctttctcccaggtagactcaatatggtcgagatcgtagcggggccagcaccttgttcaagagattgtttgcccgtcccagcacgatttggcagttgttcagatacctcactgctctctttcaactgttgacgaaacataacgagcggatgcattggatatctcttcttccatcgtgcgcttttcccaggtgccggctgaatggacttcgtgccccgatgtgggctaccggagaagtaacgtgtgcatcgtgggcacgtaaagcgagcacgagatgaaacaaacggacgcgacaccatgcgaggtaatgattgaaatattgtcgcgggcgtgacatgtgagaccatctcgctagataggatatttgcggtgatcaggatttgacgcgtag

SEQ ID NO: 934 - DNA, 1482 bp, Muscodor strobelii
  misc_feature: SGI cDNA ID NO. 559894
  misc_feature: Encodes the peptide sequence at SEQ ID NO 935
atgtttcgtcaacagttgaaagagagcagtgaggtatctgaacaactgccaaatcgtgctgggacgggcaaacaatctcttgaacaaggtgctggccccgctacgatctcgaccatattgagtctacctgggagaaagagacgaacagtaataaaaaagaacgatttgttcacgctttcccctcgaaagccgccaaaagagctttttgaaaaggtgacacaatggaggaaacactggccagatccagcaggctcattcaggaaagtgtcgcaggctggtgagcaaccaacagcaggctcgacaccactcaccaagttgtccaaaccaatacaaatatttcctaagaaatatctcaattcggtcaatgcgcgcaagcgatcgctcgacggactggttaaaacatacactggcagaattgaacgtggacagccaatgctcattggcaaccttcccggcttcctgatcagcaaccccctaattgcatctgacatcggaccagaagggtcctttaggaagcgcccgcagaaaaattctcaagaccagctaggttataaagtcatgagaaccatttgggccggtgcgggtccagcatccggtggaagcaaagtggaccgtgatgagggacaggcgatgttcgacaaattcgatgcagtactcaagatcaaggcagtcgcattcgagggagagtatccaccaatactgaggttcctggattgggtgcggcagtctaggcatctcgacgaataccagctgggcgacgtcgttgctgaattgatcgacttgcacaacaaatcgcccctgccctggttgccattcaaagcacctctcgtgttcatccgagctgtaaaccagtacaacctcgcccaacaaccacagcctggggatttgaccgcatcaaaggatatcactcattttgacaggaaggactatcctaattgcatcaccgaaatcagcgctctagtagtgttagtggagaagatgaccgatgactttccattcccacgcatcatccgcgatataggagactcgagatataacgctagatcatgtagcattcgcgtgggtgtaaggccgctgcgcagcgacatgcggcgctataaagaaagcaccgttgtcgtaggccagatcgccggatatggcattgcgacgctgattcctccgagtctacaagcactgaacggtgctccattagggttccatgaaagagtacccaatgtttaccaagatgctctggccagtaaaacttggacacaagagttcgaagacgagctagcgaagacggatgacgtcgtttttgcgaaactgcggccaggagacggtttgttggtaccccctgggtggtggtatggagtaagaagcatcaacaatggactccatttgaatgccacggctacctggtttctgggtcgtgagaatgtggaccaagatgaatacatgaggggcatgcatctcaaaagcatacccccaagtatcgaaatctaa

SEQ ID NO: 935 - protein, 493 aa, Muscodor strobelii
  misc_feature: SGI Peptide ID NO. 559894
  misc_feature (233)..(468): NCBI GI: 256733453 Blast Desc: NECHADRAFT_35722 [Nectria haematococca mpVI 77-13-4]
  misc_feature (210)..(468): NCBI GI: 171681638 Blast Desc: protein product [Podospora anserina] gi|170940778|emb|CAP66427.1| protein product [Podospora anserina]
  misc_feature (320)..(458): NCBI GI: 238838781 Blast Desc: conserved [Microsporum canis CBS 113480]
MFRQQLKESSEVSEQLPNRAGTGKQSLEQGAGPATISTILSLPGRKRRTVIKKNDLFTLSPRKPPKELFEKVTQWRKHWPDPAGSFRKVSQAGEQPTAGSTPLTKLSKPIQIFPKKYLNSVNARKRSLDGLVKTYTGRIERGQPMLIGNLPGFLISNPLIASDIGPEGSFRKRPQKNSQDQLGYKVMRTIWAGAGPASGGSKVDRDEGQAMFDKFDAVLKIKAVAFEGEYPPILRFLDWVRQSRHLDEYQLGDVVAELIDLHNKSPLPWLPFKAPLVFIRAVNQYNLAQQPQPGDLTASKDITHFDRKDYPNCITEISALVVLVEKMTDDFPFPRIIRDIGDSRYNARSCSIRVGVRPLRSDMRRYKESTVVVGQIAGYGIATLIPPSLQALNGAPLGFHERVPNVYQDALASKTWTQEFEDELAKTDDVVFAKLRPGDGLLVPPGWWYGVRSINNGLHLNATATWFLGRENVDQDEYMRGMHLKSIPPSIEI

SEQ ID NO: 936 - DNA, 5490 bp, Muscodor strobelii
  misc_feature: SGI cDNA ID NO. 559895
  misc_feature: Elevated expression when VOC is produced
  misc_feature: Encodes the peptide sequence at SEQ ID NO 937
atgcttccaattggtgccccggccgcaagttaccacgccacgcaagagaccacgatgcaactagagagcgatgccgtagatcgacccagatcagtctgtgatctcatcgattactgggcaactaagcagcccgatcatcccgctattctcaatgggtcgaaacgggtctcgtatcgacagctgaacgaggccgccgcgagaattgcattacttctgatagctaaacaggtccaacccggtgatgtgatcccagtcttggcaacccgtacgtacgagacggtcgcaagctttctgggcgtactcaaaactggcgcttgttatgtccccattgatgtcgatgcttggggagaagaccgcacctcctctacagttgagagactcccagcacgtgtggtgattaatctaggttctacgtcgttctcggggtacgaaactatatcacgttccgatatccagtccgccttcttacacgatgtggcccgatcggataattctgaaagcgatctgccccagccgaagatcctaccagaggatttggtgtatattgtctttacatcggggactacttcgacgccaaaaggcgtcatgatacctcatcgcgctttgcttaactatgtgcagcaaggtgatgacgaggcacctttcaacactatggcacgtccaggtgataagtcactgctgacgttttcacctggatttgatgctgcgacgggcattatcttttcgaccatctgcaacggcgcggcactaataatgtctgaaattgcggactttgaaagtcatgcaacagaggctgacattcttgtgatcacgccatctatgctctcggcaatccagaacgtacatgcctgctctcaaattcgaacgctaatcatagggggcgagccaccaacggcaaggctcattgaaagatggaccactccaggccgcagcatttacaacggttatggaccttcagaaacaaccgtcgggagcctcatgggcaaagttgagccatcaaagcctatcactttaggtcgtcctatgtctaacagcagtgtttttctgctggacggagacaatgagtcagattacggagagatttgcttggcagggcccggtctcgcattaggctactacgaagaccaagcactgacagcgcagaaattcgtttcctggaatggcacgagaatatataaaactggcgactatgcgcgtcggactaaacttggtcttgagtatgttggccgcgcagacagtttcgtcaagaatcgtgggttcttagtgaacattgactctcaagtcattcccatacttcttagtagcaaagctgaaacggcaacggctttcatgtatcaggaccgtctggtagccttcgtgacaccagagacgatcgatatacgagctttccgccagtctctcgctgataagcatgattcttttgttgtacccgatcttatacgagccatatcatctatacccttgacaccgaacggcaaagctgacagtcgagctctgcgaatcattttggaagcagagctacccaaagatgatacatgtggtcaatcacaccctgagttgcaaccggcgccaaatctaagggccttgaagatggccatcgctgatgccacatccactccaatctcggagatgtcggacgactctactttcttcgacctcgggggaaactcccttgctgcactcaaagtcatatctcacttacgaagccagcaactaaagttgaggatcaaagatctgtttagtcttcccagtctaatagctgtgagtgaagcgatccaacccgataaactggagagcagtgtagcgagaccagcggaaacgggaaacaatctcgataaacacgggcaatcaatacttggacccatgtcgaacttacaaacaaagatgatacaagctagcctcaagacgccgggtgctaacactgtacttctacgtatcagtatcccgcaccaagatgagttgctggaaggtgcacgactcgagacagcctggcgtgaggtgttacatcaccatagtatctttcgaacttcctttggcctagatggcgaattacaatgcgttagaccgaatctggagctagattgggagcaagagatgacaacaacggaccgattccaggacatagtcatgattcgatcacttgagatgcgtgaaaacatgctcaatttcaagacacttgacggattctttgtcccagccaaccagtttcgcctaatcactattactgcgaaagagtctacactcttattctcttcgcatcatgctcaagcggatggctggtcgctgagcatcattctagacgatgttcaagccattatcgcgggcaatccgttatctttgcgtagcaaatcccctgacttcattaatgtcgcatcagctcagagacgtcagcagctttcccttgacgggcggatgttttggacgtcactgctcgagcagtacatggacctgcctaaacttggattggccaaaccaccaccgacccaagtcgattctgggtggactaaatccatgcgactcgatcttcaacttgctctaagagatatcgataaagtttctcgcgacctccatataacgtcctcgaccttgatttacgtagcctggggtgttgtcatgtcgaattatacatcctctgaccgtgttgcttttggtgcagtattttcaggacgaaaccttacggatgtgcccgatatccaggatgcagtgggacctttgctcacgactgtgcccttccccatcaatttcgagccagatcgcgacgatataatggaattcggattgacgcttttggtcgagaggagctccgacgaaggccacacttacagttcgagcgagaaagacgagggtctccaagccagaattctcttcgacggctctaagtacgcggaagaatcaatccataagcttctcgcgcatttcaggaacgcgttgatggggttgatcaattcaaataacgaacagatgatagacgtgcgcaatcaactcatggacgaaccggagagaagagagttactcgatgttcccaaggcttttggaatacaagctaaggaaacagctcacctgggccaggtgaccgttaaagatcgcttcgagaacgctgcgatcacctggcccgatgaatgcgcgattgaaatgccaggtggctccaaaattacgtaccaagaattagacagagctgcaaataaggtggcggcgcgtctgagccgagaattgaagggtcgatcgctgcgcgatgaggttattggtgttcttgcagatggttcagtgtattgggttatcgcaatcttggcggtagtcaaaactagctacatttgctgtcccattgatatcagcctacctgaaaaacgaatcaaggacattatagaccagagcggcgcttctattttaatatctgcaactcaattcgccgcagacaagataaatatcacaaccaatggactaaacatcaatcttgtagtcgatcgatttctcgagaccgcgcctgaggactccaccgagctactgacatttgcagaaacttcggacgtgatctacttgctatttacttctggaagcacaggaattccaaaaggagttcagttacacaatctttcaatcctcaacttcttggacactccagaagctcggctatttgcaaggccaggtcgacgtgtctctcagttgtgttctttagcattggaccctgaggaacaccaaaatctggacaccgtgcttttggcgggcgagcctgtgtcacaagcattagctaataattggggcgccagtgttcccactctcctgaacttctatggccctagtgagtgcggatgtgtctcatcaggaacttggcttcggtttcgtcagaatgtcagtataggaaggccgattgctggaatgacgatctacatcctggatcaccatcaatgcttagtaccgcaaggtatagttggcgagatatacatcgcaggagcccaggtcacgcggggttaccgcaacaagacacaacaggcgacaacgatttcccaatttatgacaaatcctttctcaacaagtgcccgtgcccgcgtcatgtatcgcactggcgatttggcattctgggatagggggatgaacatctcatatgtcggccgtgtcgacaatatggtcaagattcgcggatttcggatcgagcttgaagaagtcgagaacgccctcatttctgctggcagggacgaagtcaaaagtgcggccgtagtctccattggaactgacgacgacaatagcatggacgggaacaaacgtattatagcgttagttacaccagcgaacgcggatctggctgcgcttcgactcaatgtccgcaccttgcttcccagctatgcatgcccgtcacaaatcattgctatatccgatctaccacgaactgcaaactcgaaactcgatcgaaaggaaattaaacgcatagcacttactgctcataaagacaagggtctagattcgacgagaaccgaagaagctgaaatgcgtgtcagccatctatcttctactgaggccaaagtcgctagtatatggaacgagcagcttcagttgccaaagggtattcggatacataaagatgacgacttaatcgcccttggtggaaattcgatcttatcaatcaaagtcgctcgttctatcggtgcatcacttgggcacaccataccgttggctatacttatccgagagacggttctaaaggatttggcacgtgccattgatcaagaaatcacttcagtgtcctcgaataactcttatcatgcatcattttcttcttatttgatgtcggctgacaatgaccaaaccgctcatgataacgatacggcacctcatccgctcccattctcatatgttgaggacgaaatgtatcgatcttggaccgtatcgaaagtcaaatcaccattcaacacagttgtcgcacttcttgtcgtcggaactcttcataaagacatactggcgacggcctttactgatcttgtccgtcgtcacccggttctccgctctagatatttcacatatgaaggtcgtaatgttcgcatagttgcagcacgatccacctcgccactgcgattcgtcaacaacgaattagactttcaaatcttgcaagacttggtcgataggccattcaacctagagaaagaccagcttctcaaagtcgtactatgggagaaaccagggccgcaaaatcaaactgagatagtgcttattacgcatcacatcattacagataaagcatctttgtcccttatgctacagtggcacgaccgggtcattcagacagcacagctgattacctcaaatggacaaaatggctcaaccaacagagaccactcaacgggccccaagtccaagagcgttcggaattttggaaacaatatctgcatgatcgcccgattaccccacaacttcaacttagtggtcgagctgatcttacaggtagcccgggaattgcacatcatatttatattccccttccgtcaagcgaggcaaccgtag

SEQ ID NO: 937 - protein, 1829 aa, Muscodor strobelii
  misc_feature: SGI Peptide ID NO. 559895
  misc_feature (57)..(439): Pfam Id: PF00501 Pfam Desc: AMP-binding enzyme
  misc_feature (1052)..(1404): Pfam Id: PF00501 Pfam Desc: AMP-binding enzyme
  misc_feature (615)..(916): Pfam Id: PF00668 Pfam Desc: Condensation domain
  misc_feature (527)..(592): Pfam Id: PF00550 Pfam Desc: Phosphopantetheine attachment site
  misc_feature (1504)..(1571): Pfam Id: PF00550 Pfam Desc: Phosphopantetheine attachment site
  misc_feature (57)..(420): Pfam Id: PF00501 Pfam Desc: AMP-binding enzyme
  misc_feature (1233)..(1404): Pfam Id: PF00501 Pfam Desc: AMP-binding enzyme
  misc_feature (1052)..(1227): Pfam Id: PF00501 Pfam Desc: AMP-binding enzyme
  misc_feature (735)..(916): Pfam Id: PF00668 Pfam Desc: Condensation domain
  misc_feature (30)..(1750): NCBI GI: 242818728 Blast Desc: nonribosomal peptide synthase GliP-like, [Talaromyces stipitatus ATCC 10500] gi|218713640|gb|EED13064.1| nonribosomal peptide synthase GliP-like, [Talaromyces stipitatus ATCC 10500]
  misc_feature (31)..(1768): NCBI GI: 46403055 Blast Desc: SirP [Leptosphaeria maculans]
  misc_feature (31)..(1754): NCBI GI: 212529362 Blast Desc: nonribosomal peptide synthase GliP-like, [Penicillium marneffei ATCC 18224] gi|210074236|gb|EEA28323.1| nonribosomal peptide synthase GliP-like, [Penicillium marneffei ATCC 18224]
  misc_feature (31)..(1750): NCBI GI: 157382476 Blast Desc: non ribosomal peptide synthase [Hypocrea virens]
  misc_feature (35)..(1777): NCBI GI: 119491025 Blast Desc: nonribosomal peptide synthase GliP2 [Neosartorya fischeri NRRL 181] gi|119411333|gb|EAW21276.1| nonribosomal peptide synthase GliP2 [Neosartorya fischeri NRRL 181]
  misc_feature (54)..(1772): NCBI GI: 159127346 Blast Desc: nonribosomal peptide synthase GliP2 [Aspergillus fumigatus A1163]
  misc_feature (54)..(1772): NCBI GI: 146323460 Blast Desc: nonribosomal peptide synthase GliP-like [Aspergillus fumigatus Af293] gi|129558279|gb|EAL92291.2| nonribosomal peptide synthase GliP-like, [Aspergillus fumigatus Af293]
  misc_feature (35)..(1767): NCBI GI: 115433823 Blast Desc: ATEG_08427 [Aspergillus terreus NIH2624] gi|114189900|gb|EAU31600.1| ATEG_08427 [Aspergillus terreus NIH2624]
  misc_feature (31)..(1759): NCBI GI: 119470756 Blast Desc: nonribosomal peptide synthase GliP [Neosartorya fischeri NRRL 181] gi|119406235|gb|EAW16186.1| nonribosomal peptide synthase GliP [Neosartorya fischeri NRRL 181]
  misc_feature (32)..(1750): NCBI GI: 70992013 Blast Desc: nonribosomal peptide synthase GliP [Aspergillus fumigatus Af293] gi|66848488|gb|EAL88817.1| nonribosomal peptide synthase GliP [Aspergillus fumigatus Af293] non-ribosomal peptide
  misc_feature (12)..(1750): SWISSPROT Homolog: EC 5.1.1.11 Phenylalanine racemase (ATP-hydrolyzing)
  misc_feature: Useful for introducing or modulating the production of volatile compounds
MLPIGAPAASYHATQETTMQLESDAVDRPRSVCDLIDYWATKQPDHPAILNGSKRVSYRQLNEAAARIALLLIAKQVQPGDVIPVLATRTYETVASFLGVLKTGACYVPIDVDAWGEDRTSSTVERLPARVVINLGSTSFSGYETISRSDIQSAFLHDVARSDNSESDLPQPKILPEDLVYIVFTSGTTSTPKGVMIPHRALLNYVQQGDDEAPFNTMARPGDKSLLTFSPGFDAATGIIFSTICNGAALIMSEIADFESHATEADILVITPSMLSAIQNVHACSQIRTLIIGGEPPTARLIERWTTPGRSIYNGYGPSETTVGSLMGKVEPSKPITLGRPMSNSSVFLLDGDNESDYGEICLAGPGLALGYYEDQALTAQKFVSWNGTRIYKTGDYARRTKLGLEYVGRADSFVKNRGFLVNIDSQVIPILLSSKAETATAFMYQDRLVAFVTPETIDIRAFRQSLADKHDSFVVPDLIRAISSIPLTPNGKADSRALRIILEAELPKDDTCGQSHPELQPAPNLRALKMAIADATSTPISEMSDDSTFFDLGGNSLAALKVISHLRSQQLKLRIKDLFSLPSLIAVSEAIQPDKLESSVARPAETGNNLDKHGQSILGPMSNLQTKMIQASLKTPGANTVLLRISIPHQDELLEGARLETAWREVLHHHSIFRTSFGLDGELQCVRPNLELDWEQEMTTTDRFQDIVMIRSLEMRENMLNFKTLDGFFVPANQFRLITITAKESTLLFSSHHAQADGWSLSIILDDVQAIIAGNPLSLRSKSPDFINVASAQRRQQLSLDGRMFWTSLLEQYMDLPKLGLAKPPPTQVDSGWTKSMRLDLQLALRDIDKVSRDLHITSSTLIYVAWGVVMSNYTSSDRVAFGAVFSGRNLTDVPDIQDAVGPLLTTVPFPINFEPDRDDIMEFGLTLLVERSSDEGHTYSSSEKDEGLQARILFDGSKYAEESIHKLLAHFRNALMGLINSNNEQMIDVRNQLMDEPERRELLDVPKAFGIQAKETAHLGQVTVKDRFENAAITWPDECAIEMPGGSKITYQELDRAANKVAARLSRELKGRSLRDEVIGVLADGSVYWVIAILAVVKTSYICCPIDISLPEKRIKDIIDQSGASILISATQFAADKINITTNGLNINLVVDRFLETAPEDSTELLTFAETSDVIYLLFTSGSTGIPKGVQLHNLSILNFLDTPEARLFARPGRRVSQLCSLALDPEEHQNLDTVLLAGEPVSQALANNWGASVPTLLNFYGPSECGCVSSGTWLRFRQNVSIGRPIAGMTIYILDHHQCLVPQGIVGEIYIAGAQVTRGYRNKTQQATTISQFMTNPFSTSARARVMYRTGDLAFWDRGMNISYVGRVDNMVKIRGFRIELEEVENALISAGRDEVKSAAVVSIGTDDDNSMDGNKRIIALVTPANADLAALRLNVRTLLPSYACPSQIIAISDLPRTANSKLDRKEIKRIALTAHKDKGLDSTRTEEAEMRVSHLSSTEAKVASIWNEQLQLPKGIRIHKDDDLIALGGNSILSIKVARSIGASLGHTIPLAILIRETVLKDLARAIDQEITSVSSNNSYHASFSSYLMSADNDQTAHDNDTAPHPLPFSYVEDEMYRSWTVSKVKSPFNTVVALLVVGTLHKDILATAFTDLVRRHPVLRSRYFTYEGRNVRIVAARSTSPLRFVNNELDFQILQDLVDRPFNLEKDQLLKVVLWEKPGPQNQTEIVLITHHIITDKASLSLMLQWHDRVIQTAQLITSNGQNGSTNRDHSTGPKSKSVRNFGNNICMIARLPHNFNLVVELILQVARELHIIFIFPFRQARQP

SEQ ID NO: 938 - DNA, 4090 bp, Muscodor strobelii
  misc_feature: SGI EST ID NO. CUFF.2589.0
  misc_feature: Variant of the nucleotide sequence at SEQ ID NO 936
gcatacgatgctcagcatggcgtgcctcgggagcgctcgcagatcatattgccagtccatgattaacatatagagtgagagtatcatcatttgaacatttgctggatatcagagagcatcatattattgacactcttatatgttttcggcattatgcttccaattggtgccccggccgcaagttaccacgccacgcaagagaccacgatgcaactagagagcgatgccgtagatcgacccagatcagtctgtgatctcatcgattactgggcaactaagcagcccgatcatcccgctattctcaatgggtcgaaacgggtctcgtatcgacagctgaacgaggccgccgcgagaattgcattacttctgatagctaaacaggtccaacccggtgatgtgatcccagtcttggcaacccgtacgtacgagacggtcgcaagctttctgggcgtactcaaaactggcgcttgttatgtccccattgatgtcgatgcttggggagaagaccgcacctcctctacagttgagagactcccagcacgtgtggtgattaatctaggttctacgtcgttctcggggtacgaaactatatcacgttccgatatccagtccgccttcttacacgatgtggcccgatcggataattctgaaagcgatctgccccagccgaagatcctaccagaggatttggtgtatattgtctttacatcggggactacttcgacgccaaaaggcgtcatgatacctcatcgcgctttgcttaactatgtgcagcaaggtgatgacgaggcacctttcaacactatggcacgtccaggtgataagtcactgctgacgttttcacctggatttgatgctgcgacgggcattatcttttcgaccatctgcaacggcgcggcactaataatgtctgaaattgcggactttgaaagtcatgcaacagaggctgacattcttgtgatcacgccatctatgctctcggcaatccagaacgtacatgcctgctctcaaattcgaacgctaatcatagggggcgagccaccaacggcaaggctcattgaaagatggaccactccaggccgcagcatttacaacggttatggaccttcagaaacaaccgtcgggagcctcatgggcaaagttgagccatcaaagcctatcactttaggtcgtcctatgtctaacagcagtgtttttctgctggacggagacaatgagtcagattacggagagatttgcttggcagggcccggtctcgcattaggctactacgaagaccaagcactgacagcgcagaaattcgtttcctggaatggcacgagaatatataaaactggcgactatgcgcgtcggactaaacttggtcttgagtatgttggccgcgcagacagtttcgtcaagaatcgtgggttcttagtgaacattgactctcaagtcattcccatacttcttagtagcaaagctgaaacggcaacggctttcatgtatcaggaccgtctggtagccttcgtgacaccagagacgatcgatatacgagctttccgccagtctctcgctgataagcatgattcttttgttgtacccgatcttatacgagccatatcatctatacccttgacaccgaacggcaaagctgacagtcgagctctgcgaatcattttggaagcagagctacccaaagatgatacatgtggtcaatcacaccctgagttgcaaccggcgccaaatctaagggccttgaagatggccatcgctgatgccacatccactccaatctcggagatgtcggacgactctactttcttcgacctcgggggaaactcccttgctgcactcaaagtcatatctcacttacgaagccagcaactaaagttgaggatcaaagatctgtttagtcttcccagtctaatagctgtgagtgaagcgatccaacccgataaactggagagcagtgtagcgagaccagcggaaacgggaaacaatctcgataaacacgggcaatcaatacttggacccatgtcgaacttacaaacaaagatgatacaagctagcctcaagacgccgggtgctaacactgtacttctacgtatcagtatcccgcaccaagatgagttgctggaaggtgcacgactcgagacagcctggcgtgaggtgttacatcaccatagtatctttcgaacttcctttggcctagatggcgaattacaatgcgttagaccgaatctggagctagattgggagcaagagatgacaacaacggaccgattccaggacatagtcatgattcgatcacttgagatgcgtgaaaacatgctcaatttcaagacacttgacggattctttgtcccagccaaccagtttcgcctaatcactattactgcgaaagagtctacactcttattctcttcgcatcatgctcaagcggatggctggtcgctgagcatcattctagacgatgttcaagccattatcgcgggcaatccgttatctttgcgtagcaaatcccctgacttcattaatgtcgcatcagctcagagacgtcagcagctttcccttgacgggcggatgttttggacgtcactgctcgagcagtacatggacctgcctaaacttggattggccaaaccaccaccgacccaagtcgattctgggtggactaaatccatgcgactcgatcttcaacttgctctaagagatatcgataaagtttctcgcgacctccatataacgtcctcgaccttgatttacgtagcctggggtgttgtcatgtcgaattatacatcctctgaccgtgttgcttttggtgcagtattttcaggacgaaaccttacggatgtgcccgatatccaggatgcagtgggacctttgctcacgactgtgcccttccccatcaatttcgagccaggtcaatgcgtaaagaagacgctgtctagcgtcaatagtcaacttcttcagatgctggaatttcaatggtccgcaaatgaagctatgacaaggataagtggcgcgagcattgacgcgatgatgcagactttagtcgtgacagagtatgatgtcccgccatcgattaactcgactggatcgtagatcgcgacgatataatggaattcggattgacgcttttggtcgagaggagctccgacgaaggccacacttacagttcgagcgagaaagacgagggtctccaagccagaattctcttcgacggctctaagtacgcggaagaatcaatccataagcttctcgcgcatttcaggaacgcgttgatggggttgatcaattcaaataacgaacagatgatagacgtgcgcaatcaactcatggacgaaccggagagaagagagttactcgatgttcccaaggcttttggaatacaagctaaggaaacagctcacctgggccaggtgaccgttaaagatcgcttcgagaacgctgcgatcacctggcccgatgaatgcgcgattgaaatgccaggtggctccaaaattacgtaccaagaattagacagagctgcaaataaggtggcggcgcgtctgagccgagaattgaagggtcgatcgctgcgcgatgaggttattggtgttcttgcagatggttcagtgtattgggttatcgcaatcttggcggtagtcaaaactagctacatttgctgtcccattgatatcagcctacctgaaaaacgaatcaaggacattatagaccagagcggcgcttctattttaatatctgcaactcaattcgccgcagacaagataaatatcacaaccaatggactaaacatcaatcttgtagtcgatcgatttctcgagaccgcgcctgaggactccaccgagctactgacatttgcagaaacttcggacgtgatctacttgctatttacttctggaagcacaggaattccaaaaggagttcagttacacaatctttcaatcctcaacttcttggacactccagaagctcggctatttgcaaggccaggtcgacgtgtctctcagttgtgttctttaggtatattggtctttatttgtcacacaaacataacataaacggtgccatatcgtggaaatgagtagggataattactagttcg

SEQ ID NO: 939 - DNA, 7779 bp, Muscodor strobelii
  misc_feature: SGI cDNA ID NO. 559896
  misc_feature: Encodes the peptide sequence at SEQ ID NO 940
atgatagtgaacggtgtcgatggccaagatcagttcttatcgtccattgccgtagttggcttatcattcgagtttcccgatgggatcacttcttgccaagaattctgggacgctattagttctggaagatctgctagtagaaaatttccccgggaccgtttgaatatcgacgccttcttccacccagatgcctcgcgtcatagtactatcgcggtacgaaatggtcactttctgacagaggatctgggggcttttgatgccccattcttcacaatttctcccgctgaggcagcctcgatggatcctcagcatcgacgaatgctcgagaccgtatatcatgctcttgaagattcggggattccccttgaggactgccaaggatctgataccgctgtctatactgggtctttcacaaacgactatgaacatatgatagcccaagactatgaagcagagcaccgccatgctgctatgggattatcgagctcgatgttagctaacagaattagctggttctataatttcaaggggccctccatgaatctcgatagcgcttgctcgagtagcttgtctgcacttcacctagcctgtgaaaacttgcgtcacagtaaatcgaaaatggcattggttggaggtgtgaacctggtttttcatccggatatgatgaagatgatgtcgaacttccattttctatcccccgagggaatttcttggagctttgacgagagagccaatggatacgctagaggagagggcgttgctgttctcgttcttaagcgggttaaagatgcgttacgcgatggtgatactattcgcgccgttatccgtgctactggcctaaatcaagacggccgaactcctggtattacccagcctagtagtgaagcccaagcgagtctcattaagagaacatacgccgaggcaggacttgacatggacacgacaagattcgtggaggctcatggtacagggactcgaattggtgatccgattgaagccaatgcgatcggaactgcgttccgcgaatctggcagtaactttgacctttacattggcgctgtgaaagcttccatcggacatctagagggttgcagcggccttgcgggtatcattaaaaccatactagtattagagtgcggcttaataccccctattgccggttttcgttcattgaacccactgatagaggcggaccagttgcgtttacgttttccgaccaatctcactacatggccacagggaggactacgccgcgcttgtgtcaattcattcggtttcggagggtcaaatgcaaccgccattttggatgatgtttatcattttctccagcagagtggcgtggaaggccatcatcgcacgttggcgagtcctcctaggacaccgcaactcgaaaatgatggaaacgttgccaatagcgcattgaatgcatctgctaggtctatcaacaagatcaaggacacaagggggaaattgttggagtcggacgttgtagggtgccagaaaaagctgcttgtatggtctgctcacgatgggaaagcagcagaaaaattggcacaaaattggcgctcatatctcctcgtcaatcccgagtgctgttccgacgtagcgaacattatggctaccagaaggacgacatttccgtggcgaactttcagcgtcatctccgaaggcactgccgaagccgatgaaccatcggagttccggccagtccaggtaattgaaaaacgtgagcttgcctgggtgttcacagggcagggcgcacaatatgttggtatgggcagtgagctgcttcagtacactacattccgagagactttgaaaacccttgatagctgcctccaaaatctgcattgcccctggtcactgctggatacccttggctcttccatacaagccacatccatcgatgagccgcactatgcgcagcctctaacgacatgtttacaaattgccctagtagatctccttcgagacttcggtctggagcctacaattgtccttggccactcttctggtgagatagccgctgcgtatgctgctggtgcgatttcgcgggacagcgctgtgaagatcgcctattttcgtggagtcgtgtccgccaaacttgccatggatgctggagaccaaggcatgctagctgcagctacgtccagagacaaaatctcgcaatatatacagcgccttcaagagtcccatggcactctaaaggtccaaattggctgttttaatagtcccaaaagcttgacactcacggggtgcgcctcccagcttacgcagctcgaagagtggcttggccatgacggcatatctgcacgacggctccgagtgcccgttgcatatcactcccgcttcatggaagccatggctactacttatcaatcagaaatcgagggtcttgaggcggggaagtctgtaggcagaataccaatgatgtcgtccgtgaccggcgatattatacctacccaagaactctgtcaagcgggttattgggtccgaaaccttgtctctccggttgattttgatggtgctttgtccaaaacactgctgcaactaagatcatcaactaaacccaggcgtcagctgggaaaacgtcgcagcctcgatttaagtatcaccgatatactcgagattggcccacacagcgcgttgcaaggacctattcgagacatatgtcagtcaattcctgacgctaggaggccacggtattactcagtattgtctcgtcagaaacactctgttaccaccttacttcaaactatgggacatctctactgcttcgggtaccagatcaacttgcgcgagattaattcaataacacatctacgctcacgtacaccatataacgcccccaaatatccgttcaaccacgaccgaacgtactggggtgagtctcggctcagcaaacggttcagattccgggagcatgcgagacatgacctgctcggggcacgtgtcagtgactggaattcgcaagttgcacaatttcgcaacgtgctccgcgttagcgagcttccatggattgaggatcacaaggttaatgggctgcgtatcttccctgcgagcggaatgatggtcatggcgactgaagccctccgacagttgttcgatgccaaggagagcctcgcgacaatccaactgaaggacatctccttcgtgcgaccgatgccgttcccccagggtgtggacaaggtcgaggcgcagttgactcttctaccttcgtcatctggctacatagatcgcgcgtggtctgccttccgacttttcgtagtagaaggtgaagagtacgtcgaggtgtgcaatggtttcatcagaggactcgttcagacgttcaataatcaaggttcacatgatctttcgtctagtcaaggtaccgccctccaagattctgatgggacattagtcgaccaacatgtcatgtatgaggcaataactgcacagggaatgcaatatgggccatgtttccagacactcagcaacatccggatcagcggaaacaacacagcgcacgcagatatctcgacggagcaacacaagatcagaccggttaatgagtttgcacacaaagtttttatacatcccacgacactcgatgcactagctcagctcgtttatcctgcgattagtctaggcggggctcgggatgttccagctatggtgttatcgagagtttcatctatgtggatagattgtagccatagtgagttgctccttgaaggcacagtacacggcgctgcatcgtgtgagtggcgaggagttcgcggagcgaatgcagacattaccgtttcgaagcaaccgtgctctagaaatcctttggtacaagtcaaagggcttgaagttaccttcgtaggggcccagagggatcagcaagactcaacccaaactacggatatgtgccttagccttcaatggcacccggatgtggaagagatgaccggcaagcagatagtcttgcattgcacccgtgaccgggcgagtgaaaacgtagggcaggacgagctgagaacgacaattgatctagctttgtctgcctctatccagcatgctctgcgatggcttgatgcctctacgtcgttattgctaccgcctcatattcagaagcacgtcggatggatgagataccaggcgcgaagagcacaggctggaaacatcaaggtcgatcctacgcgaatagaggccctagcttcaaacacggtagaacgcgagcaactcctcgagcatatcaagactctagggccagagggcaaattctctgcgacagtagctgagaatcttctgccgatcctgcaaggaagcgttcataccttggatcttttcttcagtacagatctagtcagtcggtattacgaggactttgctgccaatgagtttcacctatatcctctagagaagtttattaagcttctttccttcaagaacccctcgctaaacatccttgaggtgggtgcagggacaggtgctcacacgcttcccatattgaatgctctagctcaaggcggcatacgaagatggtgccgctatgatttcaccgacatttccgcgggatttttttctcaagcgcgggataagttcaatgagtatagctctaacatggaatttcgtgttttcgatattcagaaggatcatgaccaacaaggattgccttcggcgagttatgatcttatagtcgcctcacacgtacttcacgccacgaacagcctagacacatcgttgacgaaccttcggaagctcttgaaaccgaaagggagacttttgctcttcgagacggtagtcccagatgttcttcacatcggctttacctttgggcttcttcaaggttggtgggagccattggagcatgaatctcgatctgagtatagcccttgcgttagcacggcagagtgggacaagcgcctccgcaagaacgggttctctgggatagatattgaattccctgatcaagaacgtaaagagacgcactggagcagtatcatcgtatccagggctgttggagaaccggaattggtcgaacatcaagcgcagttcacgatagtgatcaatcctcagattgaagcacaacacgagatggctgagatgttggtgtcacacttgggtgtacaatgcctaatcaaatctctcgatgaactacgctcggtggaaaagggcagggacttatctcatggtgcgcttctttttcttgtcgaaatagaggcgttactgctcgatggtatcgacagagcttcctatgagacgctccaaaaaacgcttttatgttgctctctcgttctatgggtcaccaaagctgtggaaccctcgatggagcccagcatgagcctggccgtaggcttaggaagaacactcgcatccgaagactcctccttgaagttcatcacgctggctttggagatggatcaaggaatggactcctcgacatcgaaacagattgcagatcttgctgtaaggcacttcgatatgagcacaagtgagctagaaaataatctagctgtaagtaatggtatgctccatatcccgcgagtgaccgaggcgacctccctcaatcacagcgttgtccaaagagcggcggatcaagagcacaggctctgcgatattgcatattcgcctcctttaacagtcagagttatatcaaacggcgggacgctcagtacacagtggcgtgagcactcgctcgaacatgagctgccccgtagcgattatgtcgatgtgcaagtgaagtctttcgggctgactttcaaggacttcctcactatgagcggtcactaccacggcggtactctatcaaacgaattctcgggaatagtacgagccgtagcacctggatcgccattcatgattggcgagcgcgttttcggtatcgggacagggactgcaaagacagttgtgcgcacgagagggagtgctcttgttcatattccgtcagatatggactttgcgcaggcggctgcccttccttattctctctttgtgtcctactatggacttgtcgacattgcacgcattcgaaagggagagacagtcttgatctgccaaccgacttccacagttgggcaagtttctgcgcagttatgtgcagctctcggagtaaatatagctgtacgtggcactactacagaacgagctgacgatctcgcgagggggtgggatattcctggtgacaagctagtgacctggccggtcgatatagagtcggcaagcacgattcaccaggctacaaaggtagacgtggtgtttggagcgctgtcaattgctgacattacagatatcgttccctcgttagccgcatatgggcgcattatcaacatcgatgtgaatacccgtccgctatgggaatatagcacacccttccagatgccgacaaacacgacatttgccaccgtgaacgcgtttcggttgatagaggacaagccagataccgcgcataggctctttcaacaagcattcagtctttggagggacaatcagctagttatgccaaagtcaatacgcgaatattcggcaaccgacatagtgacagcgattcaagattatcaggacagaagcatccatgtgaagcgagttgtgagcatcgatcaaaatacacctatcatggctgttgtggctcgaaggcctacctacaacttcaatgctggcgctacatacgtcattgctggaggcttcggaggtttaggcaggagcctagcaacctggatggcgacgcgggatgctcgccatctcgtcatattgtcacgatcaggtgcctcaagcgaagcagcaaagattatgctgcttagactcgaacaactcggggtcagtgtacatgctcctcggtgcgatatcagtgatgcaaaccagctggtcgccgtgatggactgggtcaaagtgaacatgccacctgtcaagggctgcatacaggcgaccatgatcgtcagggatcgtatctttcctaaaatgagtttcgaagactgggatattggcactaggccaaaggtgcgcggttcttggaatctgcatgaggcgatgcctaacaacctcgacttttttattctcatatcctcagtgaacggagtcttgggccgccaaacgcaggcaaactatgccgcgggaaacgttttcaaggatgtgcttgctcggtaccgagtggaacgtgggttgaaagctgtttcccttgaccttggtatgcttgtagacgacggaattctggccgagaatgcgcagctcaagactgctctgggtcgtgacggccacctaaaggagcttcgaagggagcatttcttggcgctctttgaatactactgcgatcctaatctcccgatactcgatgtttcaaattgccagatcatagttggtctagagccacccagtgtcgtcgagaggaagggtaaagaagtacatcactcacttcggcgtcccatctttcggcatttatctcagatgggtgctctggattcggccagaggatcaatggagaccaccagctcatccgctaatcgtcagcttctcgtggacgcagagtcgatcgaacacgctagccatcttatcatgcaatggttctcggccaagatcgggcagattctaagcgtacctgtagctgatattgatccggcgaagccaatacacgcattgggtgtggattctttggttggaatagatctgaaggaatggtttaagaaagaaatcggctcagacgttcccgtcttcgagctccttggaaatagctcgctgagagatatatgtactgcagcggctgagcgtagctcctttcgaaaagcactagatagcctaactacaaatagtggcaaggagtag

SEQ ID NO: 940 - protein, 2592 aa, Muscodor strobelii
  misc_feature: SGI Peptide ID NO. 559896
  misc_feature (579)..(930): Pfam Id: PF00698 Pfam Desc: Acyl transferase domain
  misc_feature (2209)..(2375): Pfam Id: PF00106 Pfam Desc: short chain dehydrogenase
  misc_feature (14)..(264): Pfam Id: PF00109 Pfam Desc: Beta-ketoacyl synthase, N-terminal domain
  misc_feature (272)..(389): Pfam Id: PF02801 Pfam Desc: Beta-ketoacyl synthase, C-terminal domain
  misc_feature (2209)..(2388): Pfam Id: PF08659 Pfam Desc: KR domain
  misc_feature (1478)..(1585): Pfam Id: PF08241 Pfam Desc: Methyltransferase domain
  misc_feature (1478)..(1583): Pfam Id: PF08242 Pfam Desc: Methyltransferase domain
  misc_feature (579)..(844): Pfam Id: PF00698 Pfam Desc: Acyl transferase domain
  misc_feature (9)..(2578): NCBI GI: 226288756 Blast Desc: acetolactate synthase catalytic subunit [Paracoccidioides brasiliensis Pb18]
  misc_feature (13)..(2576): NCBI GI: 255935711 Blast Desc: Pc13g04470 [Penicillium chrysogenum Wisconsin 54-1255] gi|211583502|emb|CAP91516.1| Pc13g04470 [Penicillium chrysogenum Wisconsin 54-1255]
  misc_feature (70)..(2538): NCBI GI: 40787326 Blast Desc: polyketide synthase [Botryotinia fuckeliana]
  misc_feature (8)..(2578): NCBI GI: 46118226 Blast Desc: FG04694.1 [Gibberella zeae PH-1]
  misc_feature (13)..(2581): NCBI GI: 40806899 Blast Desc: polyketide synthase [Gibberella moniliformis]
  misc_feature (16)..(2575): NCBI GI: 145613074 Blast Desc: MGG_08236 [Magnaporthe grisea 70-15] gi|145020125|gb|EDK04353.1| MGG_08236 [Magnaporthe grisea 70-15]
  misc_feature (16)..(2578): NCBI GI: 57157400 Blast Desc: PKSN polyketide synthase for alternapyrone biosynthesis [Alternaria solani]
  misc_feature (16)..(2577): NCBI GI: 145607551 Blast Desc: MGG_12214 [Magnaporthe grisea 70-15] gi|145015078|gb|EDJ99646.1| MGG_12214 [Magnaporthe grisea 70-15]
  misc_feature (7)..(2020): NCBI GI: 156040852 Blast Desc: SS1G_11404 [Sclerotinia sclerotiorum 1980] gi|154695788|gb|EDN95526.1| SS1G_11404 [Sclerotinia sclerotiorum 1980]
  misc_feature (16)..(2578): NCBI GI: 189196278 Blast Desc: mycocerosic acid synthase [Pyrenophora tritici-repentis Pt-1C-BFP] gi|187980356|gb|EDU46982.1| mycocerosic acid synthase [Pyrenophora tritici-repentis
  misc_feature: Useful for fungicidal and/or biocontrol applications
MIVNGVDGQDQFLSSIAVVGLSFEFPDGITSCQEFWDAISSGRSASRKFPRDRLNIDAFFHPDASRHSTIAVRNGHFLTEDLGAFDAPFFTISPAEAASMDPQHRRMLETVYHALEDSGIPLEDCQGSDTAVYTGSFTNDYEHMIAQDYEAEHRHAAMGLSSSMLANRISWFYNFKGPSMNLDSACSSSLSALHLACENLRHSKSKMALVGGVNLVFHPDMMKMMSNFHFLSPEGISWSFDERANGYARGEGVAVLVLKRVKDALRDGDTIRAVIRATGLNQDGRTPGITQPSSEAQASLIKRTYAEAGLDMDTTRFVEAHGTGTRIGDPIEANAIGTAFRESGSNFDLYIGAVKASIGHLEGCSGLAGIIKTILVLECGLIPPIAGFRSLNPLIEADQLRLRFPTNLTTWPQGGLRRACVNSFGFGGSNATAILDDVYHFLQQSGVEGHHRTLASPPRTPQLENDGNVANSALNASARSINKIKDTRGKLLESDVVGCQKKLLVWSAHDGKAAEKLAQNWRSYLLVNPECCSDVANIMATRRTTFPWRTFSVISEGTAEADEPSEFRPVQVIEKRELAWVFTGQGAQYVGMGSELLQYTTFRETLKTLDSCLQNLHCPWSLLDTLGSSIQATSIDEPHYAQPLTTCLQIALVDLLRDFGLEPTIVLGHSSGEIAAAYAAGAISRDSAVKIAYFRGVVSAKLAMDAGDQGMLAAATSRDKISQYIQRLQESHGTLKVQIGCFNSPKSLTLTGCASQLTQLEEWLGHDGISARRLRVPVAYHSRFMEAMATTYQSEIEGLEAGKSVGRIPMMSSVTGDIIPTQELCQAGYWVRNLVSPVDFDGALSKTLLQLRSSTKPRRQLGKRRSLDLSITDILEIGPHSALQGPIRDICQSIPDARRPRYYSVLSRQKHSVTTLLQTMGHLYCFGYQINLREINSITHLRSRTPYNAPKYPFNHDRTYWGESRLSKRFRFREHARHDLLGARVSDWNSQVAQFRNVLRVSELPWIEDHKVNGLRIFPASGMMVMATEALRQLFDAKESLATIQLKDISFVRPMPFPQGVDKVEAQLTLLPSSSGYIDRAWSAFRLFVVEGEEYVEVCNGFIRGLVQTFNNQGSHDLSSSQGTALQDSDGTLVDQHVMYEAITAQGMQYGPCFQTLSNIRISGNNTAHADISTEQHKIRPVNEFAHKVFIHPTTLDALAQLVYPAISLGGARDVPAMVLSRVSSMWIDCSHSELLLEGTVHGAASCEWRGVRGANADITVSKQPCSRNPLVQVKGLEVTFVGAQRDQQDSTQTTDMCLSLQWHPDVEEMTGKQIVLHCTRDRASENVGQDELRTTIDLALSASIQHALRWLDASTSLLLPPHIQKHVGWMRYQARRAQAGNIKVDPTRIEALASNTVEREQLLEHIKTLGPEGKFSATVAENLLPILQGSVHTLDLFFSTDLVSRYYEDFAANEFHLYPLEKFIKLLSFKNPSLNILEVGAGTGAHTLPILNALAQGGIRRWCRYDFTDISAGFFSQARDKFNEYSSNMEFRVFDIQKDHDQQGLPSASYDLIVASHVLHATNSLDTSLTNLRKLLKPKGRLLLFETVVPDVLHIGFTFGLLQGWWEPLEHESRSEYSPCVSTAEWDKRLRKNGFSGIDIEFPDQERKETHWSSIIVSRAVGEPELVEHQAQFTIVINPQIEAQHEMAEMLVSHLGVQCLIKSLDELRSVEKGRDLSHGALLFLVEIEALLLDGIDRASYETLQKTLLCCSLVLWVTKAVEPSMEPSMSLAVGLGRTLASEDSSLKFITLALEMDQGMDSSTSKQIADLAVRHFDMSTSELENNLAVSNGMLHIPRVTEATSLNHSVVQRAADQEHRLCDIAYSPPLTVRVISNGGTLSTQWREHSLEHELPRSDYVDVQVKSFGLTFKDFLTMSGHYHGGTLSNEFSGIVRAVAPGSPFMIGERVFGIGTGTAKTVVRTRGSALVHIPSDMDFAQAAALPYSLFVSYYGLVDIARIRKGETVLICQPTSTVGQVSAQLCAALGVNIAVRGTTTERADDLARGWDIPGDKLVTWPVDIESASTIHQATKVDVVFGALSIADITDIVPSLAAYGRIINIDVNTRPLWEYSTPFQMPTNTTFATVNAFRLIEDKPDTAHRLFQQAFSLWRDNQLVMPKSIREYSATDIVTAIQDYQDRSIHVKRVVSIDQNTPIMAVVARRPTYNFNAGATYVIAGGFGGLGRSLATWMATRDARHLVILSRSGASSEAAKIMLLRLEQLGVSVHAPRCDISDANQLVAVMDWVKVNMPPVKGCIQATMIVRDRIFPKMSFEDWDIGTRPKVRGSWNLHEAMPNNLDFFILISSVNGVLGRQTQANYAAGNVFKDVLARYRVERGLKAVSLDLGMLVDDGILAENAQLKTALGRDGHLKELRREHFLALFEYYCDPNLPILDVSNCQIIVGLEPPSVVERKGKEVHHSLRRPIFRHLSQMGALDSARGSMETTSSSANRQLLVDAESIEHASHLIMQWFSAKIGQILSVPVADIDPAKPIHALGVDSLVGIDLKEWFKKEIGSDVPVFELLGNSSLRDICTAAAERSSFRKALDSLTTNSGKE

SEQ ID NO: 941 - DNA, 129 bp, Muscodor strobelii
  misc_feature: SGI EST ID NO. CUFF.2604.0
  misc_feature: Variant of the nucleotide sequence at SEQ ID NO 939
aggcgaccatgatcgtcagggatcgtatctttcctaaaatgagtttcgaagactgggatattggcactaggccaaaggtgcgcggttcttggaatctgcatgaggcgatgcctaacaacctcgactttt

SEQ ID NO: 942 - DNA, 7782 bp, Muscodor strobelii
  misc_feature: SGI cDNA ID NO. 559897
  misc_feature: Encodes the peptide sequence at SEQ ID NO 943
atgatagtgaacggtgtcgatggccaagatcagttcttatcgtccattgccgtagttggcttatcattcgagtttcccgatgggatcacttcttgccaagaattctgggacgctattagttctggaagatctgctagtagaaaatttccccgggaccgtttgaatatcgacgccttcttccacccagatgcctcgcgtcatagtactatcgcggtacgaaatggtcactttctgacagaggatctgggggcttttgatgccccattcttcacaatttctcccgctgaggcagcctcgatggatcctcagcatcgacgaatgctcgagaccgtatatcatgctcttgaagattcggggattccccttgaggactgccaaggatctgataccgctgtctatactgggtctttcacaaacgactatgaacatatgatagcccaagactatgaagcagagcaccgccatgctgctatgggattatcgagctcgatgttagctaacagaattagctggttctataatttcaaggggccctccatgaatctcgatagcgcttgctcgagtagcttgtctgcacttcacctagcctgtgaaaacttgcgtcacagtaaatcgaaaatggcattggttggaggtgtgaacctggtttttcatccggatatgatgaagatgatgtcgaacttccattttctatcccccgagggaatttcttggagctttgacgagagagccaatggatacgctagaggagagggcgttgctgttctcgttcttaagcgggttaaagatgcgttacgcgatggtgatactattcgcgccgttatccgtgctactggcctaaatcaagacggccgaactcctggtattacccagcctagtagtgaagcccaagcgagtctcattaagagaacatacgccgaggcaggacttgacatggacacgacaagattcgtggaggctcatggtacagggactcgaattggtgatccgattgaagccaatgcgatcggaactgcgttccgcgaatctggcagtaactttgacctttacattggcgctgtgaaagcttccatcggacatctagagggttgcagcggccttgcgggtatcattaaaaccatactagtattagagtgcggcttaataccccctattgccggttttcgttcattgaacccactgatagaggcggaccagttgcgtttacgttttccgaccaatctcactacatggccacagggaggactacgccgcgcttgtgtcaattcattcggtttcggagggtcaaatgcaaccgccattttggatgatgtttatcattttctccagcagagtggcgtggaaggccatcatcgcacgttggcgagtcctcctaggacaccgcaactcgaaaatgatggaaacgttgccaatagcgcattgaatgcatctgctaggtctatcaacaagatcaaggacacaagggggaaattgttggagtcggacgttgtagggtgccagaaaaagctgcttgtatggtctgctcacgatgggaaagcagcagaaaaattggcacaaaattggcgctcatatctcctcgtcaatcccgagtgctgttccgacgtagcgaacattatggctaccagaaggacgacatttccgtggcgaactttcagcgtcatctccgaaggcactgccgaagccgatgaaccatcggagttccggccagtccaggtaattgaaaaacgtgagcttgcctgggtgttcacagggcagggcgcacaatatgttggtatgggcagtgagctgcttcagtacactacattccgagagactttgaaaacccttgatagctgcctccaaaatctgcattgcccctggtcactgctggatacccttggctcttccatacaagccacatccatcgatgagccgcactatgcgcagcctctaacgacatgtttacaaattgccctagtagatctccttcgagacttcggtctggagcctacaattgtccttggccactcttctggtgagatagccgctgcgtatgctgctggtgcgatttcgcgggacagcgctgtgaagatcgcctattttcgtggagtcgtgtccgccaaacttgccatggatgctggagaccaaggcatgctagctgcagctacgtccagagacaaaatctcgcaatatatacagcgccttcaagagtcccatggcactctaaaggtccaaattggctgttttaatagtcccaaaagcttgacactcacggggtgcgcctcccagcttacgcagctcgaagagtggcttggccatgacggcatatctgcacgacggctccgagtgcccgttgcatatcactcccgcttcatggaagccatggctactacttatcaatcagaaatcgagggtcttgaggcggggaagtctgtaggcagaataccaatgatgtcgtccgtgaccggcgatattatacctacccaagaactctgtcaagcgggttattgggtccgaaaccttgtctctccggttgattttgatggtgctttgtccaaaacactgctgcaactaagatcatcaactaaacccaggcgtcagctgggaaaacgtcgcagcctcgatttaagtatcaccgatatactcgagattggcccacacagcgcgttgcaaggacctattcgagacatatgtcagtcaattcctgacgctaggaggccacggtattactcagtattgtctcgtcagaaacactctgttaccaccttacttcaaactatgggacatctctactgcttcgggtaccagatcaacttgcgcgagattaattcaataacacatctacgctcacgtacaccatataacgcccccaaatatccgttcaaccacgaccgaacgtactggggtgagtctcggctcagcaaacggttcagattccgggagcatgcgagacatgacctgctcggggcacgtgtcagtgactggaattcgcaagttgcacaatttcgcaacgtgctccgcgttagcgagcttccatggattgaggatcacaaggttaatgggctgcgtatcttccctgcgagcggaatgatggtcatggcgactgaagccctccgacagttgttcgatgccaaggagagcctcgcgacaatccaactgaaggacatctccttcgtgcgaccgatgccgttcccccagggtgtggacaaggtcgaggcgcagttgactcttctaccttcgtcatctggctacatagatcgcgcgtggtctgccttccgacttttcgtagtagaaggtgaagagtacgtcgaggtgtgcaatggtttcatcagaggactcgttcagacgttcaataatcaaggttcacatgatctttcgtctagtcaaggtaccgccctccaagattctgatgggacattagtcgaccaacatgtcatgtatgaggcaataactgcacagggaatgcaatatgggccatgtttccagacactcagcaacatccggatcagcggaaacaacacagcgcacgcagatatctcgacggagcaacacaagatcagaccggttaatgagtttgcacacaaagtttttatacatcccacgacactcgatgcactagctcagctcgtttatcctgcgattagtctaggcggggctcgggatgttccagctatggtgttatcgagagtttcatctatgtggatagattgtagccatagtgagttgctccttgaaggcacagtacacggcgctgcatcgtgtgagtggcgaggagttcgcggagcgaatgcagacattaccgtttcgaagcaaccgtgctctagaaatcctttggtacaagtcaaagggcttgaagttaccttcgtaggggcccagagggatcagcaagactcaacccaaactacggatatgtgccttagccttcaatggcacccggatgtggaagagatgaccggcaagcagatagtcttgcattgcacccgtgaccgggcgagtgaaaacgtagggcaggacgagctgagaacgacaattgatctagctttgtctgcctctatccagcatgctctgcgatggcttgatgcctctacgtcgttattgctaccgcctcatattcagaagcacgtcggatggatgagataccaggcgcgaagagcacaggctggaaacatcaaggtcgatcctacgcgaatagaggccctagcttcaaacacggtagaacgcgagcaactcctcgagcatatcaagactctagggccagagggcaaattctctgcgacagtagctgagaatcttctgccgatcctgcaaggaagcgttcataccttggatcttttcttcagtacagatctagtcagtcggtattacgaggactttgctgccaatgagtttcacctatatcctctagagaagtttattaagcttctttccttcaagaacccctcgctaaacatccttgaggtgggtgcagggacaggtgctcacacgcttcccatattgaatgctctagctcaaggcggcatacgaagatggtgccgctatgatttcaccgacatttccgcgggatttttttctcaagcgcgggataagttcaatgagtatagctctaacatggaatttcgtgttttcgatattcagaaggatcatgaccaacaaggattgccttcggcgagttatgatcttatagtcgcctcacacgtacttcacgccacgaacagcctagacacatcgttgacgaaccttcggaagctcttgaaaccgaaagggagacttttgctcttcgagacggtagtcccagatgttcttcacatcggctttacctttgggcttcttcaaggttggtgggagccattggagcatgaatctcgatctgagtatagcccttgcgttagcacggcagagtgggacaagcgcctccgcaagaacgggttctctgggatagatattgaattccctgatcaagaacgtaaagagacgcactggagcagtatcatcgtatccagggctgttggagaaccggaattggtcgaacatcaagcgcagttcacgatagtgatcaatcctcagattgaagcacaacacgagatggctgagatgttggtgtcacacttgggtgtacaatgcctaatcaaatctctcgatgaactacgctcggtggaaaagggcagggacttatctcatggtgcgcttctttttcttgtcgaaatagaggcgttactgctcgatggtatcgacagagcttcctatgagacgctccaaaaaacgcttttatgttgctctctcgttctatgggtcaccaaagctgtggaaccctcgatggagcccagcatgagcctggccgtaggcttaggaagaacactcgcatccgaagactcctccttgaagttcatcacgctggctttggagatggatcaaggaatggactcctcgacatcgaaacagattgcagatcttgctgtaaggcacttcgatatgagcacaagtgagctagaaaataatctagctgtaagtaatggtatgctccatatcccgcgagtgaccgaggcgacctccctcaatcacagcgttgtccaaagagcggcggatcaagagcacaggctctgcgatattgcatattcgcctcctttaacagtcagagttatatcaaacggcgggacgctcagtacacagtggcgtgagcactcgctcgaacatgagctgccccgtagcgattatgtcgatgtgcaagtgaagtctttcgggctgactttcaaggacttcctcactatgagcggtcactaccacggcggtactctatcaaacgaattctcgggaatagtacgagccgtagcacctggatcgccattcatgattggcgagcgcgttttcggtatcgggacagggactgcaaagacagttgtgcgcacgagagggagtgctcttgttcatattccgtcagatatggactttgcgcaggcggctgcccttccttattctctctttgtgtcctactatggacttgtcgacattgcacgcattcgaaagggagagacagtcttgatctgccaaccgacttccacagttgggcaagtttctgcgcagttatgtgcagctctcggagtaaatatagctgtacgtggcactactacagaacgagctgacgatctcgcgagggggtgggatattcctggtgacaagctagtgacctggccggtcgatatagagtcggcaagcacgattcaccaggctacaaaggtagacgtggtgtttggagcgctgtcaattgctgacattacagatatcgttccctcgttagccgcatatgggcgcattatcaacatcgatgtgaatacccgtccgctatgggaatatagcacacccttccagatgccgacaaacacgacatttgccaccgtgaacgcgtttcggttgatagaggacaagccagataccgcgcataggctctttcaacaagcattcagtctttggagggacaatcagctagttatgccaaagtcaatacgcgaatattcggcaaccgacatagtgacagcgattcaagattatcaggacagaagcatccatgtgaagcgagttgtgagcatcgatcaaaatacacctatcatggctgttgtggctcgaaggcctacctacaacttcaatgctggcgctacatacgtcattgctggaggcttcggaggtttaggcaggagcctagcaacctggatggcgacgcgggatgctcgccatctcgtcatattgtcacgatcaggtgcctcaagcgaagcagcaaagattatgctgcttagactcgaacaactcggggtcagtgtacatgctcctcggtgcgatatcagtgatgcaaaccagctggtcgccgtgatggactgggtcaaagtgaacatgccacctgtcaagggctgcatacaggcgaccatgatcgtcaggcaggatcgtatctttcctaaaatgagtttcgaagactgggatattggcactaggccaaaggtgcgcggttcttggaatctgcatgaggcgatgcctaacaacctcgacttttttattctcatatcctcagtgaacggagtcttgggccgccaaacgcaggcaaactatgccgcgggaaacgttttcaaggatgtgcttgctcggtaccgagtggaacgtgggttgaaagctgtttcccttgaccttggtatgcttgtagacgacggaattctggccgagaatgcgcagctcaagactgctctgggtcgtgacggccacctaaaggagcttcgaagggagcatttcttggcgctctttgaatactactgcgatcctaatctcccgatactcgatgtttcaaattgccagatcatagttggtctagagccacccagtgtcgtcgagaggaagggtaaagaagtacatcactcacttcggcgtcccatctttcggcatttatctcagatgggtgctctggattcggccagaggatcaatggagaccaccagctcatccgctaatcgtcagcttctcgtggacgcagagtcgatcgaacacgctagccatcttatcatgcaatggttctcggccaagatcgggcagattctaagcgtacctgtagctgatattgatccggcgaagccaatacacgcattgggtgtggattctttggttggaatagatctgaaggaatggtttaagaaagaaatcggctcagacgttcccgtcttcgagctccttggaaatagctcgctgagagatatatgtactgcagcggctgagcgtagctcctttcgaaaagcactagatagcctaactacaaatagtggcaaggagtag

SEQ ID NO: 943 - protein, 2593 aa, Muscodor strobelii
  misc_feature: SGI Peptide ID NO. 559897
  misc_feature (579)..(930): Pfam Id: PF00698 Pfam Desc: Acyl transferase domain
  misc_feature (2209)..(2376): Pfam Id: PF00106 Pfam Desc: short chain dehydrogenase
  misc_feature (14)..(264): Pfam Id: PF00109 Pfam Desc: Beta-ketoacyl synthase, N-terminal domain
  misc_feature (272)..(389): Pfam Id: PF02801 Pfam Desc: Beta-ketoacyl synthase, C-terminal domain
  misc_feature (2209)..(2389): Pfam Id: PF08659 Pfam Desc: KR domain
  misc_feature (1478)..(1585): Pfam Id: PF08241 Pfam Desc: Methyltransferase domain
  misc_feature (1478)..(1583): Pfam Id: PF08242 Pfam Desc: Methyltransferase domain
  misc_feature (579)..(844): Pfam Id: PF00698 Pfam Desc: Acyl transferase domain
  misc_feature (16)..(2581): NCBI GI: 238502997 Blast Desc: polyketide synthase, [Aspergillus flavus NRRL3357] gi|220691542|gb|EED47890.1| polyketide synthase, [Aspergillus flavus NRRL3357]
  misc_feature (13)..(2581): NCBI GI: 189206211 Blast Desc: lovastatin nonaketide synthase [Pyrenophora tritici-repentis Pt-1C-BFP] gi|187975533|gb|EDU42159.1| lovastatin nonaketide synthase [Pyrenophora tritici-repentis
  misc_feature (16)..(2582): NCBI GI: 121711140 Blast Desc: polyketide synthase, [Aspergillus clavatus NRRL 1] gi|119401336|gb|EAW11760.1| polyketide synthase, [Aspergillus clavatus NRRL 1]
  misc_feature (13)..(2582): NCBI GI: 146322741 Blast Desc: polyketide synthase [Aspergillus fumigatus Af293] gi|129556779|gb|EAL87227.2| polyketide synthase, [Aspergillus fumigatus Af293]
  misc_feature (13)..(2582): NCBI GI: 119497865 Blast Desc: polyketide synthase, [Neosartorya fischeri NRRL 181] gi|119413854|gb|EAW23793.1| polyketide synthase, [Neosartorya fischeri NRRL 181]
  misc_feature (13)..(2582): NCBI GI: 159128679 Blast Desc: polyketide synthase, [Aspergillus fumigatus A1163]
  misc_feature (9)..(2587): NCBI GI: 156063352 Blast Desc: SS1G_01792 [Sclerotinia sclerotiorum 1980] gi|154697128|gb|EDN96866.1| SS1G_01792 [Sclerotinia sclerotiorum 1980]
  misc_feature (13)..(2581): NCBI GI: 189195356 Blast Desc: phenolpthiocerol synthesis polyketide synthase ppsA [Pyrenophora tritici-repentis Pt-1C-BFP] gi|187979895|gb|EDU46521.1| phenolpthiocerol synthesis polyketide
  misc_feature (31)..(2576): NCBI GI: 242810825 Blast Desc: polyketide synthase, [Talaromyces stipitatus ATCC 10500] gi|218716287|gb|EED15709.1| polyketide synthase, [Talaromyces stipitatus ATCC 10500]
  misc_feature (10)..(2582): NCBI GI: 238501530 Blast Desc: polyketide synthase, [Aspergillus flavus NRRL3357] gi|220692236|gb|EED48583.1| polyketide synthase, [Aspergillus flavus NRRL3357]
  misc_feature: Useful for fungicidal and/or biocontrol applications
MIVNGVDGQDQFLSSIAVVGLSFEFPDGITSCQEFWDAISSGRSASRKFPRDRLNIDAFFHPDASRHSTIAVRNGHFLTEDLGAFDAPFFTISPAEAASMDPQHRRMLETVYHALEDSGIPLEDCQGSDTAVYTGSFTNDYEHMIAQDYEAEHRHAAMGLSSSMLANRISWFYNFKGPSMNLDSACSSSLSALHLACENLRHSKSKMALVGGVNLVFHPDMMKMMSNFHFLSPEGISWSFDERANGYARGEGVAVLVLKRVKDALRDGDTIRAVIRATGLNQDGRTPGITQPSSEAQASLIKRTYAEAGLDMDTTRFVEAHGTGTRIGDPIEANAIGTAFRESGSNFDLYIGAVKASIGHLEGCSGLAGIIKTILVLECGLIPPIAGFRSLNPLIEADQLRLRFPTNLTTWPQGGLRRACVNSFGFGGSNATAILDDVYHFLQQSGVEGHHRTLASPPRTPQLENDGNVANSALNASARSINKIKDTRGKLLESDVVGCQKKLLVWSAHDGKAAEKLAQNWRSYLLVNPECCSDVANIMATRRTTFPWRTFSVISEGTAEADEPSEFRPVQVIEKRELAWVFTGQGAQYVGMGSELLQYTTFRETLKTLDSCLQNLHCPWSLLDTLGSSIQATSIDEPHYAQPLTTCLQIALVDLLRDFGLEPTIVLGHSSGEIAAAYAAGAISRDSAVKIAYFRGVVSAKLAMDAGDQGMLAAATSRDKISQYIQRLQESHGTLKVQIGCFNSPKSLTLTGCASQLTQLEEWLGHDGISARRLRVPVAYHSRFMEAMATTYQSEIEGLEAGKSVGRIPMMSSVTGDIIPTQELCQAGYWVRNLVSPVDFDGALSKTLLQLRSSTKPRRQLGKRRSLDLSITDILEIGPHSALQGPIRDICQSIPDARRPRYYSVLSRQKHSVTTLLQTMGHLYCFGYQINLREINSITHLRSRTPYNAPKYPFNHDRTYWGESRLSKRFRFREHARHDLLGARVSDWNSQVAQFRNVLRVSELPWIEDHKVNGLRIFPASGMMVMATEALRQLFDAKESLATIQLKDISFVRPMPFPQGVDKVEAQLTLLPSSSGYIDRAWSAFRLFVVEGEEYVEVCNGFIRGLVQTFNNQGSHDLSSSQGTALQDSDGTLVDQHVMYEAITAQGMQYGPCFQTLSNIRISGNNTAHADISTEQHKIRPVNEFAHKVFIHPTTLDALAQLVYPAISLGGARDVPAMVLSRVSSMWIDCSHSELLLEGTVHGAASCEWRGVRGANADITVSKQPCSRNPLVQVKGLEVTFVGAQRDQQDSTQTTDMCLSLQWHPDVEEMTGKQIVLHCTRDRASENVGQDELRTTIDLALSASIQHALRWLDASTSLLLPPHIQKHVGWMRYQARRAQAGNIKVDPTRIEALASNTVEREQLLEHIKTLGPEGKFSATVAENLLPILQGSVHTLDLFFSTDLVSRYYEDFAANEFHLYPLEKFIKLLSFKNPSLNILEVGAGTGAHTLPILNALAQGGIRRWCRYDFTDISAGFFSQARDKFNEYSSNMEFRVFDIQKDHDQQGLPSASYDLIVASHVLHATNSLDTSLTNLRKLLKPKGRLLLFETVVPDVLHIGFTFGLLQGWWEPLEHESRSEYSPCVSTAEWDKRLRKNGFSGIDIEFPDQERKETHWSSIIVSRAVGEPELVEHQAQFTIVINPQIEAQHEMAEMLVSHLGVQCLIKSLDELRSVEKGRDLSHGALLFLVEIEALLLDGIDRASYETLQKTLLCCSLVLWVTKAVEPSMEPSMSLAVGLGRTLASEDSSLKFITLALEMDQGMDSSTSKQIADLAVRHFDMSTSELENNLAVSNGMLHIPRVTEATSLNHSVVQRAADQEHRLCDIAYSPPLTVRVISNGGTLSTQWREHSLEHELPRSDYVDVQVKSFGLTFKDFLTMSGHYHGGTLSNEFSGIVRAVAPGSPFMIGERVFGIGTGTAKTVVRTRGSALVHIPSDMDFAQAAALPYSLFVSYYGLVDIARIRKGETVLICQPTSTVGQVSAQLCAALGVNIAVRGTTTERADDLARGWDIPGDKLVTWPVDIESASTIHQATKVDVVFGALSIADITDIVPSLAAYGRIINIDVNTRPLWEYSTPFQMPTNTTFATVNAFRLIEDKPDTAHRLFQQAFSLWRDNQLVMPKSIREYSATDIVTAIQDYQDRSIHVKRVVSIDQNTPIMAVVARRPTYNFNAGATYVIAGGFGGLGRSLATWMATRDARHLVILSRSGASSEAAKIMLLRLEQLGVSVHAPRCDISDANQLVAVMDWVKVNMPPVKGCIQATMIVRQDRIFPKMSFEDWDIGTRPKVRGSWNLHEAMPNNLDFFILISSVNGVLGRQTQANYAAGNVFKDVLARYRVERGLKAVSLDLGMLVDDGILAENAQLKTALGRDGHLKELRREHFLALFEYYCDPNLPILDVSNCQIIVGLEPPSVVERKGKEVHHSLRRPIFRHLSQMGALDSARGSMETTSSSANRQLLVDAESIEHASHLIMQWFSAKIGQILSVPVADIDPAKPIHALGVDSLVGIDLKEWFKKEIGSDVPVFELLGNSSLRDICTAAAERSSFRKALDSLTTNSGKE

SEQ ID NO: 944 - DNA, 129 bp, Muscodor strobelii; identical to SEQ ID NO: 941
  misc_feature: SGI EST ID NO. CUFF.2604.0
  misc_feature: Variant of the nucleotide sequence at SEQ ID NO 942

SEQ ID NO: 945 - DNA, 846 bp, Muscodor strobelii
  misc_feature: SGI cDNA ID NO. 559898
  misc_feature: Encodes the peptide sequence at SEQ ID NO 946
atgcagcggagctatcacgataaaaatggctcttaccagctccctaatgacgcaccggaataccagcgacttgacagtcaatctagagctctagttttcttgatgaacaacaaaccattccatgcaccactttccaccccgcaaaagatacttgacattggttgtggaacgggagcgatgacgaaacttctcggccgcatgtttccggaagctcacatcatcggtgtggacattactatcacccctgacctactcgaaagcgagcacaatgtccaattcattcaaggggatattcgagacattctccgccgagagaatgacccattgtttgtacccgcttcttttgactacgtattctcaaggctgctgatccttggaatgacacaatggccccaatacatcaagtcggttgttcgtttagtcaagtcgggcgggtggatggagatgcatgagagtaccatgcatctatattccccgaacgatcagcctctcacagagtcgtggtggaactttcgttgctttcaagaggatgtgaagccctcgggactcgacattgagattggatcccgactcgcgatgtacctcacctccaactcatcgttgaatcacgtcgctgaaagtgtatataaatacgctccagttcccacggccgacgttgacataatgcttccgttagaaagtcagggcttacctttgtacaaggggctactggagaaggtctgtggcaagtcaagggcaacagaagaagtgaggagaatgcaggatgaggttgaccaaatatgggctgaaggatttgaagatggcacgcactttaagatctttgtagtcactgcccagaagacataa

SEQ ID NO: 946 - protein, 281 aa, Muscodor strobelii
  misc_feature: SGI Peptide ID NO. 559898
  misc_feature (51)..(149): Pfam Id: PF08241 Pfam Desc: Methyltransferase domain
  misc_feature (51)..(147): Pfam Id: PF08242 Pfam Desc: Methyltransferase domain
  misc_feature (3)..(178): NCBI GI: 242794113 Blast Desc: conserved [Talaromyces stipitatus ATCC 10500] gi|218718894|gb|EED18314.1| conserved [Talaromyces stipitatus ATCC 10500]
  misc_feature (3)..(157): NCBI GI: 212535834 Blast Desc: conserved [Penicillium marneffei ATCC 18224] gi|210070472|gb|EEA24562.1| conserved [Penicillium marneffei ATCC 18224]
  misc_feature (3)..(161): NCBI GI: 238842040 Blast Desc: conserved [Microsporum canis CBS 113480]
  misc_feature (3)..(162): NCBI GI: 46139735 Blast Desc: FG11382.1 [Gibberella zeae PH-1]
  misc_feature (2)..(158): NCBI GI: 240273562 Blast Desc: conserved [Ajellomyces capsulatus H143]
  misc_feature (3)..(209): NCBI GI: 46128727 Blast Desc: FG08741.1 [Gibberella zeae PH-1]
  misc_feature (2)..(158): NCBI GI: 225556458 Blast Desc: conserved [Ajellomyces capsulatus G186AR]
  misc_feature (2)..(130): NCBI GI: 169600609 Blast Desc: SNOG_03146 [Phaeosphaeria nodorum SN15] gi|111068757|gb|EAT89877.1| SNOG_03146 [Phaeosphaeria nodorum SN15]
  misc_feature (3)..(161): NCBI GI: 242827123 Blast Desc: conserved [Talaromyces stipitatus ATCC 10500] gi|218712023|gb|EED11451.1| conserved [Talaromyces stipitatus ATCC 10500]
  misc_feature (3)..(172): NCBI GI: 85118349 Blast Desc: NCU02648 [Neurospora crassa OR74A] gi|28927230|gb|EAA36185.1| conserved [Neurospora crassa OR74A]
MQRSYHDKNGSYQLPNDAPEYQRLDSQSRALVFLMNNKPFHAPLSTPQKILDIGCGTGAMTKLLGRMFPEAHIIGVDITITPDLLESEHNVQFIQGDIRDILRRENDPLFVPASFDYVFSRLLILGMTQWPQYIKSVVRLVKSGGWMEMHESTMHLYSPNDQPLTESWWNFRCFQEDVKPSGLDIEIGSRLAMYLTSNSSLNHVAESVYKYAPVPTADVDIMLPLESQGLPLYKGLLEKVCGKSRATEEVRRMQDEVDQIWAEGFEDGTHFKIFVVTAQKT

SEQ ID NO: 947 - DNA, 3060 bp, Muscodor strobelii
  misc_feature: SGI cDNA ID NO. 559899
  misc_feature: Encodes the peptide sequence at SEQ ID NO 948
atgcggttctctgtatggctctgttggggctttgtaactttatccctggctctcttggaagagactatcgtttcatttacgccaagcgatgggtctatctctatccacgatgcgtcagtagtgtatagcgcagatgatccgattggcattgagatcgcgctcaatagtttaaccgtcgacttagaagcgatcactgggttgcgaccagcgctggtgaaggtcggagcggataattcaacagcttgtacaacatgtgcgccaaatgcgattattgccgcgacggtggactcgaagctaatcaagagtcttgtcaacgctggtaaattgaacgttactggaataactggaagatgggagatgtatcagacatccattgtcgagagtccaatacgcggagttgaaagagccctagtcattgtggggagtgataaaaggggtacaatattcggagtatacacgttggcagagcaatgcggtcaatcgccgtgggtgttcttccaagtttcgatagcttttactaactattatgataggtttcattggtggacggacaccgctgcaacgcagcacgatgagatttacgtcgacagaaaaacaacgacgttcggacctcctagtgtcaagtaccggggtctttttatcaatgacgaagcgccagcattgatgggttggtgggcgaaagtccatggagtcgctcatcaaccactggatcaagaattctatcgacatgtcttcgacctgctgctgcgactcaaggccaattacctttggccgggaatgtggaagtcattcgtgcccacaccagggaacattttctttgaagatgatcctggaaatcaacagcttgccgatgactacgggatcgtcgtatccaccagtcatgcggagccaatgcaaagaagccagagcgaatggaacaacacaattcaagggccttggcagtgggaaactaatcaggccaacgtgtcggcttatatgagagaaggcgtacaacgggctggtcataatgaatcttacttcacaataggcatgcgcggtgatggcgacagctcgatacaaggaagcgatcctctagagattctgaaggaagttttcgaatttcaacgacaagtttttgccgacgaatatggaaatacaagcgctgtgaaccaggtctgggcactttacaaagaagttgcgacgtactatgccgctggtctcatgccacccggcgaggacgtgacgttgttattctcagatgacaattttggcaatattcagcgactacccctcgcaaatgaatcagagagaagcggcggagttggggtatactatcatcttgaatatgtgggagtaccgaagtcgtacaagtggcaaaatacaaacaacctgcctaaggttctaaaggaactatatcaggcttatcagcgtggtgcgcatcgcatttgggttgtcaatgtggctgatatcaaacccttagaaatgccatttggcttcattatggattacgcctggaatacatcatctattaactttgcgacgattccgacctacttgacagcattggcgaccagagagtttggatccgagcaagcagcagacatctcagagatctggatggagcaaagtagacttatcggtcgtcggaaatacgagtcggttcagacaaagacgtattcggtcttgcattatcatgaaaacgaaagagttatgactgagtggcagaccttaggaaacaaagttctttcagttcttaacgcattaccggaagataggaaagatgcttactggcaccatgtgcaatacccgatcctggctgggcaagcatattatgcgacaatgctgggtcttggcaaaaatcagcaaatcggatacgaacgtcgaaactctgctaatggtctggctgatgaagtccgcgcaagcttcgatactgatttcgatttgactgcgcagtatgattccgtggcgaacgggaagtgggcagggatgctttcacaaccacactacgatcaatacaaccaagctgcaggagacgactgggcagaagctacgagagacgtcattactggattatggtatgttcagatgcgccagaattctacgtacgcatttggaaatcttggtatctatgcagaaggatgcgaaagtgctcaagctcaagcacggtcgctcccgtctgcgtggaactcagcaccgacagttgatcagttctcgcctaccttgccaccgattgatcgatatggtaagggcgtttggaatgttgagcttttccatagaggcgactaccgtatccccatccaatgggaggccgacttgccctatgaatggatcagcttctcgccaatgtctggcgaactgtcctctgatcaattagagcagcgggtgaacgtctcgattgattggtctgcagtcccggaggatttcgaagagaacattggagttagaattaactttgatacgtcacctttctttgatcttgtccacttgcctatcatcaactacaaagccccgaacgagtttgtggggttccctgaaacgggcggcattatctcgattgaagcgtctcattttcagcgtaaatcagacgacgaggtcgcatttgaaacaattccctatttaggtacacgctccgagtctggttcgctggctcttcgaccctatgtggattcacgggcatcaaaagtagatgcagagggcgcatgggctgactatgacatctatctatataatgacacttcgtccgtcactgcgactgtttatgtcacaaccggcttggatactgatcctacatcaccgatgtcttattcgttgactctcaacgatgatggcgctcaagccaacttcacgcaacttttgaaaactcccgaatctgcaggcgctctgcccgccgactggagaacgaccgtggctgatcaagtatggatacgcaatgtcacattaggtgagatggcacatgggcaacacactcttcgatggcagacgaattcgcctgaggtatatcttgagaaaatcgttctcaatgtgagaatggctttgaaatatagctacctgggcccccccgagacgacaatcatcaagtaa

SEQ ID NO: 948 - protein, 1019 aa, Muscodor strobelii
  misc_feature: SGI Peptide ID NO. 559899
  misc_feature (1)..(1015): NCBI GI: 171677554 Blast Desc: protein product [Podospora anserina] gi|170936845|emb|CAP61503.1| protein product [Podospora anserina]
  misc_feature (15)..(791): NCBI GI: 116201441 Blast Desc: CHGG_08605 [Chaetomium globosum CBS 148.51] gi|88177123|gb|EAQ84591.1| CHGG_08605 [Chaetomium globosum CBS 148.51]
  misc_feature (179)..(1014): NCBI GI: 67904684 Blast Desc: AN9329.2 [Aspergillus nidulans FGSC A4] gi|40747240|gb|EAA66396.1| AN9329.2 [Aspergillus nidulans FGSC A4] gi|259488166|tpe|CBF87414.1| TPA: conserved [Aspergillus FGSC
  misc_feature (18)..(1016): NCBI GI: 46115372 Blast Desc: FG03528.1 [Gibberella zeae PH-1]
  misc_feature (18)..(1016): NCBI GI: 28202136 Blast Desc: [Gibberella zeae]
  misc_feature (18)..(1016): NCBI GI: 27924023 Blast Desc: [Fusarium sporotrichioides]
  misc_feature (18)..(1015): NCBI GI: 238506235 Blast Desc: conserved [Aspergillus flavus NRRL3357] gi|220689032|gb|EED45383.1| conserved [Aspergillus flavus NRRL3357]
  misc_feature (18)..(1015): NCBI GI: 169785259 Blast Desc: [Aspergillus oryzae RIB40] gi|83775838|dbj|BAE65957.1| protein product [Aspergillus oryzae]
  misc_feature (18)..(1012): NCBI GI: 261359513 Blast Desc: conserved [Verticillium albo-atrum VaMs.102]
  misc_feature (18)..(1013): NCBI GI: 256725517 Blast Desc: NECHADRAFT_95198 [Nectria haematococca mpVI 77-13-4]
MRFSVWLCWGFVTLSLALLEETIVSFTPSDGSISIHDASVVYSADDPIGIEIALNSLTVDLEAITGLRPALVKVGADNSTACTTCAPNAIIAATVDSKLIKSLVNAGKLNVTGITGRWEMYQTSIVESPIRGVERALVIVGSDKRGTIFGVYTLAEQCGQSPWVFFQVSIAFTNYYDRFHWWTDTAATQHDEIYVDRKTTTFGPPSVKYRGLFINDEAPALMGWWAKVHGVAHQPLDQEFYRHVFDLLLRLKANYLWPGMWKSFVPTPGNIFFEDDPGNQQLADDYGIVVSTSHAEPMQRSQSEWNNTIQGPWQWETNQANVSAYMREGVQRAGHNESYFTIGMRGDGDSSIQGSDPLEILKEVFEFQRQVFADEYGNTSAVNQVWALYKEVATYYAAGLMPPGEDVTLLFSDDNFGNIQRLPLANESERSGGVGVYYHLEYVGVPKSYKWQNTNNLPKVLKELYQAYQRGAHRIWVVNVADIKPLEMPFGFIMDYAWNTSSINFATIPTYLTALATREFGSEQAADISEIWMEQSRLIGRRKYESVQTKTYSVLHYHENERVMTEWQTLGNKVLSVLNALPEDRKDAYWHHVQYPILAGQAYYATMLGLGKNQQIGYERRNSANGLADEVRASFDTDFDLTAQYDSVANGKWAGMLSQPHYDQYNQAAGDDWAEATRDVITGLWYVQMRQNSTYAFGNLGIYAEGCESAQAQARSLPSAWNSAPTVDQFSPTLPPIDRYGKGVWNVELFHRGDYRIPIQWEADLPYEWISFSPMSGELSSDQLEQRVNVSIDWSAVPEDFEENIGVRINFDTSPFFDLVHLPIINYKAPNEFVGFPETGGIISIEASHFQRKSDDEVAFETIPYLGTRSESGSLALRPYVDSRASKVDAEGAWADYDIYLYNDTSSVTATVYVTTGLDTDPTSPMSYSLTLNDDGAQANFTQLLKTPESAGALPADWRTTVADQVWIRNVTLGEMAHGQHTLRWQTNSPEVYLEKIVLNVRMALKYSYLGPPETTIIK

SEQ ID NO: 949 - DNA, 792 bp, Muscodor strobelii
  misc_feature: SGI cDNA ID NO. 559900
  misc_feature: Elevated expression when VOC is produced
  misc_feature: Encodes the peptide sequence at SEQ ID NO 950
atgcctaacctctcattgatcattatccccgcagcgtccgctctccccttcttctatgatacagtcgtcgagaaagtcaaagagcatggatattctatcgaagctttgcatattccaagtattggcttgaagacaggagcgagaggggggacacctcccaccatgtatgacgatgcggcattcattgcagatcatgttgcaggtcttgcagagtccggacgcgacgtactactcataacacattcgtacggaggcacaccagctaccgagagtgctcgcggactcagcaagcgcgagaggctgacagaaggcaaaaaaggtggcatcgtcggcctcgcttacatgaactcacttgtacccgaagtagggcatccagcatcaacagtggcggggactgcaccgaagggacagcaacctcttatgttagtcgatgatgacggttggttctactaccccgattttacacgtgcagcggaggtagtcttctccgatcttccattagaggaagggaagtcttgggcgtcaaaaatggtgaagcattcagccttgagcttcaaaggcaatctgacatatgctggctacaaagatgtgcccgtgtcatacttggtcgctgagaaggaccgttctgtttcgccagcgacacagagatcccagatcgagatgattgaacgagtaagcggcaacaaggtcgatgtctcgactgttcaatcagatcatgttacgtgtataagcaatccccaggccgtcgttgattacattcttggagttgctcagaaactcgtgtccgaataa

SEQ ID NO: 950 - protein, 263 aa, Muscodor strobelii
  misc_feature: SGI Peptide ID NO. 559900
  misc_feature (1)..(260): NCBI GI: 256731604 Blast Desc: NECHADRAFT_105405 [Nectria haematococca mpVI 77-13-4]
  misc_feature (5)..(259): NCBI GI: 238506793 Blast Desc: conserved [Aspergillus flavus NRRL3357] gi|220689311|gb|EED45662.1| conserved [Aspergillus flavus NRRL3357]
  misc_feature (5)..(259): NCBI GI: 169785883 Blast Desc: [Aspergillus oryzae RIB40] gi|83776150|dbj|BAE66269.1| protein product [Aspergillus oryzae]
  misc_feature (1)..(261): NCBI GI: 145235011 Blast Desc: An03g02580 [Aspergillus niger] gi|134057830|emb|CAK38225.1| protein product [Aspergillus niger]
  misc_feature (1)..(193): NCBI GI: 115391807 Blast Desc: [Aspergillus terreus NIH2624] gi|114194332|gb|EAU36032.1| [Aspergillus terreus NIH2624]
  misc_feature (1)..(253): NCBI GI: 46114548 Blast Desc: FG03116.1 [Gibberella zeae PH-1]
  misc_feature (5)..(253): NCBI GI: 39963918 Blast Desc: MGG_09797 [Magnaporthe grisea 70-15] gi|145011096|gb|EDJ95752.1| MGG_09797 [Magnaporthe grisea 70-15]
  misc_feature (6)..(253): NCBI GI: 238837612 Blast Desc: conserved [Microsporum canis CBS 113480]
  misc_feature (1)..(259): NCBI GI: 169603309 Blast Desc: SNOG_04663 [Phaeosphaeria nodorum SN15] gi|160706370|gb|EAT88423.2| SNOG_04663 [Phaeosphaeria nodorum SN15]
  misc_feature (3)..(260): NCBI GI: 240107276 Blast Desc: CPC735_065610 [Coccidioides posadasii C735 delta SOWgp]
  misc_feature: Useful for introducing or modulating the production of volatile compounds
MPNLSLIIIPAASALPFFYDTVVEKVKEHGYSIEALHIPSIGLKTGARGGTPPTMYDDAAFIADHVAGLAESGRDVLLITHSYGGTPATESARGLSKRERLTEGKKGGIVGLAYMNSLVPEVGHPASTVAGTAPKGQQPLMLVDDDGWFYYPDFTRAAEVVFSDLPLEEGKSWASKMVKHSALSFKGNLTYAGYKDVPVSYLVAEKDRSVSPATQRSQIEMIERVSGNKVDVSTVQSDHVTCISNPQAVVDYILGVAQKLVSE

SEQ ID NO: 951 - DNA, 1524 bp, Muscodor strobelii
  misc_feature: SGI EST ID NO. CUFF.2646.0
  misc_feature: Variant of the nucleotide sequence at SEQ ID NO 949
caataatcgaaacacaagtcggctaagcgatcgtaacatgacgtattgggatggggagatgtaatccctcaatgcgcccgagactagcagtcgtatggtcgtcgaagaatactgaacgatattgtgttcatactttgttttcacaggaaaccattgctgacaaggtatcgcgaccgccatgcctaacctctcattgatcattatccccgcagcgtccgctctccccttcttctatgatacagtcgtcgagaaagtcaaagagcatggatattctatcgaagctttgcatattccaagtattggcttgaagacaggagcgagaggggggacacctcccaccatgtatgacgatgcggcattcattgcagatcatgttgcaggtcttgcagagtccggacgcgacgtactactcataacacattcgtacggaggcacaccagctaccgagagtgctcgcggactcagcaagcgcgagaggctgacagaaggcaaaaaaggtggcatcgtcggcctcgcttacatgaactcacttgtacccgaagtagggcatccagcatcaacagtggcggggactgcaccgaagggacagcaacctcttatgttagtcgatgatgacggttggttctactaccccgattttacacgtgcagcggaggtagtcttctccgatcttccattagaggaagggaagtcttgggcgtcaaaaatggtgaagcattcagccttgagcttcaaaggcaatctgacatatgctggctacaaagatgtgcccgtgtcatacttggtcgctgagaaggaccgttctgtttcgccagcgacacagagatcccagatcgagatgattgaacgagtaagcggcaacaaggtcgatgtctcgactgttcaatcagatcatgttacgtgtataagcaatccccaggccgtcgttgattacattcttggagttgctcagaaactcgtgtccgaataatagggtcaatatccggtacccctttcccgaggcctcgtcgctacacacaagagcccctttaacagtcacgaatgctgtcgctggatttccattttatgggcaactttcgtgtgattgttcccaacgtataccagacgaattaatgcgaatcccagcgctgattgttcttcgtgtcgctttgttgctctcgctctccactttctggcaattgcatagtcgctgacactcatttgatccactccacctgggcgaatttcgagcattcacttggagctgccgttgtttcagtagagcgaacgactacaaattttccgaatgggcggtaggaaagcaccgagaatgaagcaatgcaggttacatcaactatgtcatcgccttccaaatgcgggtagaatcacgaagttcggggtaataaagggtggagtgtgaatgcgaaaagtggcgatttggtgcggagaacacgagttgccaagtaatcaaccaaaagttaattcggccgtttaatcaactataataaaggaatactgcacctcaaatgagtaaggaaattgcag

SEQ ID NO: 952 - DNA, 375 bp, Muscodor strobelii
  misc_feature: SGI cDNA ID NO. 559901
  misc_feature: Encodes the peptide sequence at SEQ ID NO 953
atggcagcttcacaagagactttttcaacggcggcagcagaggagaaggctaaaatccgagccttctatcagtcatacctcgatgcctgcaatgaccaggacttcgaccgcatgcagcaattctatgcatcgccacacgtgctcatcaatggcgagcccaagacaccatatggctcgctgagcgcgttaagtccatggccgacgggtttgctggctggcgcctcagaatttggcactttgctattgacggatattgaggctaccggccggcgtgtcgacacgaccgaattcgcgctatactgccttgtcgatcgcaagtttgttgaaatttggctcatgctggatatggcgagtgtgctgaagcaaattcagtag

SEQ ID NO: 953 - protein, 124 aa, Muscodor strobelii
  misc_feature: SGI Peptide ID NO. 559901
  misc_feature (84)..(123): Pfam Id: PF07366 Pfam Desc: SnoaL-like polyketide cyclase
  misc_feature: Useful for fungicidal and/or biocontrol applications
MAASQETFSTAAAEEKAKIRAFYQSYLDACNDQDFDRMQQFYASPHVLINGEPKTPYGSLSALSPWPTGLLAGASEFGTLLLTDIEATGRRVDTTEFALYCLVDRKFVEIWLMLDMASVLKQIQ

SEQ ID NO: 954 - DNA, 1179 bp, Muscodor strobelii
  misc_feature: SGI cDNA ID NO. 559902
  misc_feature: Encodes the peptide sequence at SEQ ID NO 955
atggcaggacgagctgctgacgtagttgctaatgatgttatcaaattcttcacgcccgaccctcgatttgcattcgacaaaaaagccggagccggaggttggggcaagacgctatgcttcaaagtcaatcacccgcagcctggtattaggtattcgcgctttatcgtgaagatcattactactcgatctatcaccggctcttcaaatgtcgagcaagaaatagcctatttgagacgcctccagtgggcaaaacacattctacaaatttacaacattacacccgaccctttggcagttccgggtttcaaccgcccatatttctttaccgagtatctagagaatggaacgctattcagattcattcaaaaattcgcggctgctcatcccgatcaaaggcttccgaacagattcctttggtctatttttctctgtcttgctcgagccgtaacggcgatggcataccctcctggacagcgggagaatggcgcccctacgaatgcagcccaaaggatacttgaagcaacacctagagggtcacgtactccagaacctgaaagcctcatgcacaatgacatgaaaaacgataacatcatgtttggtgagaatgagatgtcttttttggatgtcttggcggaagggcccgcagcagcaactgaacatgttcccgtcccattcctcaaattaatcgatttcggtaatgcaattgaagaattgccagcagaaggacgcttcgtgccgccgcagcacgccattgataactatgacggagtacttggcttccctgcgatcgctcaggcggaggcagccgacgtaaacatcgacaactctccgacaaacgaagctgtcagaaaaaacatcattgatatcggaacagcgatggcgcgttgcttcttcctgaacaattattttggtctggttagacgacccgacatcaccaggctcctccaagcccagagagatgtgaaaatgcgagatccgactattgacgatgatctactgatgctaatagctcggtgtcttgcgttcgatcaaaacaaccgcgcggggctttcacagctacttactatctgtcgggatgcagctcactcgagaacgcaggcgttttatgggggcaaccagagagaatcggatgctttcatagcttcgcttgtgcagacgctgattcttgatgctagatga

SEQ ID NO: 955 - protein, 392 aa, Muscodor strobelii
  misc_feature: SGI Peptide ID NO. 559902
  misc_feature (25)..(232): NCBI GI: 85109420 Blast Desc: NCU05722 [Neurospora crassa OR74A] gi|28924551|gb|EAA33672.1| [Neurospora crassa OR74A]
  misc_feature (22)..(156): NCBI GI: 256730581 Blast Desc: NECHADRAFT_74247 [Nectria haematococca mpVI 77-13-4]
  misc_feature (55)..(360): NCBI GI: 189195164 Blast Desc: protein kinase domain-containing protein [Pyrenophora tritici-repentis Pt-1C-BFP] gi|187979799|gb|EDU46425.1| protein kinase domain-containing protein [Pyrenophora tritici-repentis
  misc_feature (22)..(245): NCBI GI: 46109284 Blast Desc: FG01524.1 [Gibberella zeae PH-1]
  misc_feature (25)..(236): NCBI GI: 116201421 Blast Desc: [Chaetomium globosum CBS 148.51] gi|88177113|gb|EAQ84581.1| [Chaetomium globosum CBS 148.51]
MAGRAADVVANDVIKFFTPDPRFAFDKKAGAGGWGKTLCFKVNHPQPGIRYSRFIVKIITTRSITGSSNVEQEIAYLRRLQWAKHILQIYNITPDPLAVPGFNRPYFFTEYLENGTLFRFIQKFAAAHPDQRLPNRFLWSIFLCLARAVTAMAYPPGQRENGAPTNAAQRILEATPRGSRTPEPESLMHNDMKNDNIMFGENEMSFLDVLAEGPAAATEHVPVPFLKLIDFGNAIEELPAEGRFVPPQHAIDNYDGVLGFPAIAQAEAADVNIDNSPTNEAVRKNIIDIGTAMARCFFLNNYFGLVRRPDITRLLQAQRDVKMRDPTIDDDLLMLIARCLAFDQNNRAGLSQLLTICRDAAHSRTQAFYGGNQRESDAFIASLVQTLILDAR

SEQ ID NO: 956 - DNA, 1758 bp, Muscodor strobelii
  misc_feature: SGI cDNA ID NO. 559903
  misc_feature: Encodes the peptide sequence at SEQ ID NO 957
atgtctggaatcgagacggcaggactcgtcttgggagtcattccattgatcatctctggcttggagcactatgctaacggtgcttccaaaatcaaaaggtacatgaagtatcaaagagaggtgcagtcgcttataaccatcctccaggcagagcagattaggcttcaaaacactcttgtaaaacttctacatggaatattcagagatcgggaggttaaaggtttactagaatgtccttttggagagacatggaaacaagacgctattcgaacaaagatccaatcgaggctccgcgaagcgttttccccatttgaagaaacggtcaaagatgttcacgaagcaacccaggaaatgatgaccaggttggggcttgataccgatggaaagatcaagcaagacgaagaaagtactattcggcggcatatgaggcgtgcgaccttttccctctctaaatcatcctacgatgatcttttagctcgaattactgcccaaatttcccgtctggaggctctcacgtcgggaagcatcgagcaagagccgatgagaatatcgaactcccgtggtcgattcttagttcacgtgagagagactctccaaagcatttaccgtgcctttcgaggaagtcttacctgtcaaggtacacataccatgaatctcgaacttgggaggctgaatgaagagctcattatccacgacgaagaccgacaaatcgacgaatttaccagaaagcactattttcgaatgatcatttcaggtcattctcaatctaaatgcttggatgtctccgaggctaaaattcaaatttgtcacgagataaaaatcaaagagaaggctcgcgaaaagcctgagccagtcactgcctctctcgaggataaaccgaagagggagcagaagagagcagtgcggttcttgttgtcgtcctcaagcaaccaacgaaagaaagaggggggaagcgtcatacctacagcgaatctacaaacagtggctctgagaaaagcccccactattgctatacctccaattgaagataatgggacattactcaatctatgcgaaacgttgcggaaattgaacgagctggatctgaagaagtgcttcggatacctcgttgataccaacaccgcaaagagaagggaattcgagatcttcaaagcttcagactcccataacagtgagaagtggtcgatcatatcccttcgacagatcttggagcaccctaatgccaatatgatgcctcttacattaggggatagattggacctggccgcagtcatttcatccaatgtattgcaactctatgaaacaccgtggcttgcaggtggctttacaagtgacaacattctctttcttcgagataagggactgccgcttaatcgtcgcattttcgtcacgcagcagctatctcaagcccctcataatgtccagatcactcatccagatctcggttccttgacagacaatctcacaattcttcagcttggggttattctgattgagcttattcttgccaagtcgatcagccagtctcacacgcacgatacatggatccttgattttttgaataactacagaaatactatggaactggtcaaggaagttagtacttacgccggacagggatatgccgacgcagtacgccagtgtctcacctctacgcctaagaggcatggctcagaggctgattacgaggacttctgttgtcggatttaccgtactgttgtcgcgcccctcgaagcaaatcttgcgtatctcggctag

SEQ ID NO: 957 - protein, 585 aa, Muscodor strobelii
  misc_feature: SGI Peptide ID NO. 559903
  misc_feature (1)..(584): NCBI GI: 169615082 Blast Desc: SNOG_10696 [Phaeosphaeria nodorum SN15] gi|111060970|gb|EAT82090.1| SNOG_10696 [Phaeosphaeria nodorum SN15]
  misc_feature (75)..(584): NCBI GI: 46139091 Blast Desc: FG11060.1 [Gibberella zeae PH-1]
  misc_feature (1)..(581): NCBI GI: 240274341 Blast Desc: conserved [Ajellomyces capsulatus H143]
  misc_feature (97)..(581): NCBI GI: 164422634 Blast Desc: NCU09957 [Neurospora crassa OR74A] gi|157069754|gb|EAA29228.2| [Neurospora crassa OR74A]
  misc_feature (1)..(215): NCBI GI: 256734980 Blast Desc: NECHADRAFT_90584 [Nectria haematococca mpVI 77-13-4]
  misc_feature (1)..(215): NCBI GI: 46137989 Blast Desc: FG10509.1 [Gibberella zeae PH-1]
  misc_feature (1)..(581): NCBI GI: 154270750 Blast Desc: [Ajellomyces capsulatus NAm1] gi|150409803|gb|EDN05243.1| [Ajellomyces capsulatus NAm1]
  misc_feature (1)..(210): NCBI GI: 119196583 Blast Desc: CIMG_02666 [Coccidioides immitis RS]
  misc_feature (1)..(219): NCBI GI: 256724298 Blast Desc: NECHADRAFT_53534 [Nectria haematococca mpVI 77-13-4]
  misc_feature (1)..(584): NCBI GI: 242795329 Blast Desc: conserved [Talaromyces stipitatus ATCC 10500] gi|218719151|gb|EED18571.1| conserved [Talaromyces stipitatus ATCC 10500]
MSGIETAGLVLGVIPLIISGLEHYANGASKIKRYMKYQREVQSLITILQAEQIRLQNTLVKLLHGIFRDREVKGLLECPFGETWKQDAIRTKIQSRLREAFSPFEETVKDVHEATQEMMTRLGLDTDGKIKQDEESTIRRHMRRATFSLSKSSYDDLLARITAQISRLEALTSGSIEQEPMRISNSRGRFLVHVRETLQSIYRAFRGSLTCQGTHTMNLELGRLNEELIIHDEDRQIDEFTRKHYFRMIISGHSQSKCLDVSEAKIQICHEIKIKEKAREKPEPVTASLEDKPKREQKRAVRFLLSSSSNQRKKEGGSVIPTANLQTVALRKAPTIAIPPIEDNGTLLNLCETLRKLNELDLKKCFGYLVDTNTAKRREFEIFKASDSHNSEKWSIISLRQILEHPNANMMPLTLGDRLDLAAVISSNVLQLYETPWLAGGFTSDNILFLRDKGLPLNRRIFVTQQLSQAPHNVQITHPDLGSLTDNLTILQLGVILIELILAKSISQSHTHDTWILDFLNNYRNTMELVKEVSTYAGQGYADAVRQCLTSTPKRHGSEADYEDFCCRIYRTVVAPLEANLAYLG

SEQ ID NO: 958 - DNA, 1308 bp, Muscodor strobelii
  misc_feature: SGI cDNA ID NO. 559904
  misc_feature: Encodes the peptide sequence at SEQ ID NO 959
atgaaggtctctgcgaaccatctactacccctcagtgcactgctcttgcagtcgctagcacacgacgcttggctgccgcatcgacaggtaccgaacaattctatacctcccagtaaggacccctggtatgcggcgcctgcaggctacgagtcagcttctcctggagagatcttgaagatacgtacggatccaagcaatatcacagctatagttcccgctgctgctgcttacaacatcttataccgcacgaccgacacgcgttatcaaccatcatgggctgtcacgacgatcttaattcctgggaatcaggactgtggcagaaatggaaacaatgtgacatttgggaccggagctaacaaggcctgtgacgccgcccttgtaacatatgacattccttataacacagcatcggtcgatggcagccctagtcatattctatccactgcccttgccgtcccatttctaggaaatccggccttcactgaccccatcgcgagcctacttgagcgcggatggtatgggccgggtgagggacatgcagttctagactcagtgcgcgcaactctctcctcggaacactttcccagcgacatcgagaatgcacgctacgcaatatggggatactcaggaggctcggttgcgagcgcatttgctgccgagcgccaagcttcatatgcccccgagctcaactttgccggccttgcaatcggcggtctggtgccaaatgctagtgtcatcttcgaggatcctacctcgattgttgcgggcttaattccagctgcttttttgggcgtcacatctcaataccctgaagcccgccagtttctactatcgcaaattaactctgaaggaccatacaacattaccggatttctacaagccttgcagctgaatgtatgggaaaacttgattgcgtacaccggtcaggacttgggcgcgtatttcgtcaacggactccaagctgtggtcattgcgccagagttggcatgcgtcttcggcaacaatatttatcaagggtatcacggtatccctcagatgcctgtctttgcttacatagcaattggtgacgaggccggcggcattgaagccgcagatgccgtcatctcacgttattgcggagttggcgccaatatactttaccaccgtaactcaatcggcgggcatacggaagaactaagcaacggcgctccacgggccttgggatttttgagcggggtgtttgatggctcattcgctctcgagcacaaaacttcgggctgtgaatgggttgatgtcgcggtgaatgtcacgacatcctctattgcttag

SEQ ID NO: 959 - protein, 435 aa, Muscodor strobelii
  misc_feature: SGI Peptide ID NO. 559904
  misc_feature (155)..(415): Pfam Id: PF03583 Pfam Desc: Secretory lipase
  misc_feature (178)..(415): Pfam Id: PF03583 Pfam Desc: Secretory lipase
  misc_feature (9)..(432): NCBI GI: 226509938 Blast Desc: LOC100274543 [Zea mays] gi|194708508|gb|ACF88338.1| [Zea mays]
  misc_feature (9)..(432): NCBI GI: 145236980 Blast Desc: An07g00440 [Aspergillus niger] gi|134075602|emb|CAK39268.1| protein product [Aspergillus niger]
  misc_feature (7)..(434): NCBI GI: 169778470 Blast Desc: [Aspergillus oryzae RIB40] gi|83772438|dbj|BAE62567.1| protein product [Aspergillus oryzae]
  misc_feature (1)..(430): NCBI GI: 149209067 Blast Desc: MGCH7_ch7g27 [Magnaporthe grisea 70-15] gi|86195982|gb|EAQ70620.1| MGCH7_ch7g27 [Magnaporthe grisea 70-15]
  misc_feature (27)..(430): NCBI GI: 46116008 Blast Desc: FG03846.1 [Gibberella zeae PH-1]
  misc_feature (6)..(412): NCBI GI: 256723301 Blast Desc: NECHADRAFT_105602 [Nectria haematococca mpVI 77-13-4]
  misc_feature (35)..(434): NCBI GI: 13621072 Blast Desc: AF359360_9 Tri8 [Fusarium sporotrichioides] gi|15054398|gb|AAK77934.1| T-2 toxin biosynthesis protein [Fusarium sporotrichioides]
  misc_feature (35)..(434): NCBI GI: 4249358 Blast Desc: T-2 toxin biosynthesis protein [Fusarium sporotrichioides]
  misc_feature (35)..(429): NCBI GI: 116195544 Blast Desc: CHGG_04370 [Chaetomium globosum CBS 148.51] gi|88180283|gb|EAQ87751.1| CHGG_04370 [Chaetomium globosum CBS 148.51]
  misc_feature (8)..(433): NCBI GI: 256724167 Blast Desc: NECHADRAFT_53596 [Nectria haematococca mpVI 77-13-4]
  misc_feature (37)..(428): SWISSPROT Homolog: EC 3.1.1.3 Triacylglycerol lipase
MKVSANHLLPLSALLLQSLAHDAWLPHRQVPNNSIPPSKDPWYAAPAGYESASPGEILKIRTDPSNITAIVPAAAAYNILYRTTDTRYQPSWAVTTILIPGNQDCGRNGNNVTFGTGANKACDAALVTYDIPYNTASVDGSPSHILSTALAVPFLGNPAFTDPIASLLERGWYGPGEGHAVLDSVRATLSSEHFPSDIENARYAIWGYSGGSVASAFAAERQASYAPELNFAGLAIGGLVPNASVIFEDPTSIVAGLIPAAFLGVTSQYPEARQFLLSQINSEGPYNITGFLQALQLNVWENLIAYTGQDLGAYFVNGLQAVVIAPELACVFGNNIYQGYHGIPQMPVFAYIAIGDEAGGIEAADAVISRYCGVGANILYHRNSIGGHTEELSNGAPRALGFLSGVFDGSFALEHKTSGCEWVDVAVNVTTSSIA

SEQ ID NO: 960 - DNA, 555 bp, Muscodor strobelii
  misc_feature: SGI cDNA ID NO. 559905
  misc_feature: Encodes the peptide sequence at SEQ ID NO 961
atggttcaactcaataccatcgccgctgctatcattggcgcacgtgctgcctccgcctgcaccggcccagcagtgaatcaagcgactattgatctcatcgcagaatttgaaggcttccgcgcagacgtctacaacgacccgactggaaacccaactatcggatacggacatctctgccagcagagcggatgctctgagatcccttactccatcccactctcacaagccgacgggaagaaactccttgcagacgatgttattccacctcaaaactgcattaccacagatactgccgaaccagtcacgctaaacgccaaccagtatggtgcgctcgtaagctgggcattcaacaatgggtgcggtgctgccgggtcatctacactgattgcacgcctgaacgacggcgaggatccccagaccgtcattgaggaggagctaccgcagtgggtctactcaggtggacaagttctggacggtttggtgagaaggaggaaggctgaagtcgacctcgctgacacacccacttctgctccggcactaccagcaggttgttag

SEQ ID NO: 961 - protein, 184 aa, Muscodor strobelii
  misc_feature: SGI Peptide ID NO. 559905
  misc_feature (50)..(166): Pfam Id: PF00959 Pfam Desc: Phage lysozyme
  misc_feature (9)..(184): NCBI GI: 256726057 Blast Desc: NECHADRAFT_81573 [Nectria haematococca mpVI 77-13-4]
  misc_feature (19)..(184): NCBI GI: 256725679 Blast Desc: NECHADRAFT_94402 [Nectria haematococca mpVI 77-13-4]
  misc_feature (4)..(182): NCBI GI: 261361283 Blast Desc: lysozyme [Verticillium albo-atrum VaMs.102]
  misc_feature (4)..(184): NCBI GI: 256720456 Blast Desc: NECHADRAFT_55896 [Nectria haematococca mpVI 77-13-4]
  misc_feature (18)..(184): NCBI GI: 116205263 Blast Desc: CHGG_10515 [Chaetomium globosum CBS 148.51] gi|88176643|gb|EAQ84111.1| CHGG_10515 [Chaetomium globosum CBS 148.51]
  misc_feature (23)..(181): NCBI GI: 39970045 Blast Desc: MGG_10631 [Magnaporthe grisea 70-15] gi|145010069|gb|EDJ94725.1| MGG_10631 [Magnaporthe grisea 70-15]
  misc_feature (16)..(184): NCBI GI: 170112706 Blast Desc: glycoside hydrolase family 24 protein [Laccaria bicolor S238N-H82] gi|164637456|gb|EDR01741.1| glycoside hydrolase family 24 protein [Laccaria bicolor S238N-H82]
  misc_feature (17)..(182): NCBI GI: 225561137 Blast Desc: conserved [Ajellomyces capsulatus G186AR]
  misc_feature (20)..(184): NCBI GI: 115491283 Blast Desc: conserved [Aspergillus terreus NIH2624] gi|114197129|gb|EAU38829.1| conserved [Aspergillus terreus NIH2624]
  misc_feature (17)..(184): NCBI GI: 238497189 Blast Desc: lysozyme, [Aspergillus flavus NRRL3357] gi|220694710|gb|EED51054.1| lysozyme, [Aspergillus flavus NRRL3357]
  misc_feature (25)..(170): SWISSPROT Homolog: EC 3.2.1.17 Lysozyme
MVQLNTIAAAIIGARAASACTGPAVNQATIDLIAEFEGFRADVYNDPTGNPTIGYGHLCQQSGCSEIPYSIPLSQADGKKLLADDVIPPQNCITTDTAEPVTLNANQYGALVSWAFNNGCGAAGSSTLIARLNDGEDPQTVIEEELPQWVYSGGQVLDGLVRRRKAEVDLADTPTSAPALPAGC

SEQ ID NO: 962 - DNA, 487 bp, Muscodor strobelii
  misc_feature: SGI EST ID NO. CUFF.2673.0
  misc_feature: Variant of the nucleotide sequence at SEQ ID NO 960
cagaatttgaaggcttccgcgcagacgtctgtaagtactagctagattgaagattacgtttcacgaatgcagctaaccgtcaaccagacaacgacccgactggaaacccaactatcggatacggacatctctgccagcagagcggatgctctgagatcccttactccatcccactctcacaagccgacgggaagaaactccttgcagacgatgttattccacctcaaaactgcattaccacagatactgccgaaccagtcacgctaaacgccaaccagtatggtgcgctcgtaagctgggcattcaacaatgggtgcggtgctgccgggtcatctacactgattgcacgcctgaacgacggcgaggatccccagaccgtcattgaggaggagctaccgcagtgggtctactcaggtggacaagttctggacggtttggtgagaaggaggaaggctgaagtcgacctcgctgacacacccacttctgc

SEQ ID NO: 963 - DNA, 957 bp, Muscodor strobelii
  misc_feature: SGI cDNA ID NO. 559906
  misc_feature: Elevated expression when VOC is produced
  misc_feature: Encodes the peptide sequence at SEQ ID NO 964
atgcgctcctcccacttcattgctgtcgctagtgcgctcgctgcgtctggtttggcctggaacaccgatgtgcaccaacaaatcgcatacaccgccgaggagcttctatcgccctcctcgaagatcgtgatcaagaagttgctggagcccgagtacaaaggcagccttggacgcgtgggcgcgtgggcagactcataccgaaagacgcccgagggcaaatataccgagacatggcactacatcgactcttcggatgacccgccggcgttctgcaacgtgtatcccaaccgcgacaacactctggccggcagcattgtcagcgcgatcacgaaccagactcagatcctaaaggactgtatccatcaagtcaaagctggcaagatacacaatggcgagaactaccaatgcgccaactccgtcaagttcatcgcccacttcttaagtgatatcgcgcagccccttcatacctctggaattgcgatcggaggaaatgctttccctgtcacattcaacggtgctacgactaacctccacgctgtctgggacggacaaatcatctactccctcgccaacgtaaaatccttcgacaacaccacgatccaacccttcttcaaaaacatcgcctcccgcatccgccgcgacgacttcttcacacccacatccgagtggacttcctgcaccgacccaggccgcccaggtgaatgcgccctcagctgggcacgcgacaccaacgcgtggacttgcgactacgtctacagtcagaacttcaacgccaccgatctcgcgacctccgggtacgccgagggcgcttggcctatcgtcaatatacaggttgcgaaggcggcgctgcgtatggcgacttggttcaatcgccttgttgagggctcgtataaagagcgcgaggtcattctcaggctcaaccctagctgggttggcggacctgctggtggtgcgtag

SEQ ID NO: 964 - protein, 318 aa, Muscodor strobelii
  misc_feature: SGI Peptide ID NO. 559906
  misc_feature (20)..(294): Pfam Id: PF02265 Pfam Desc: S1/P1 Nuclease
  misc_feature (7)..(303): NCBI GI: 189197247 Blast Desc: nuclease PA3 [Pyrenophora tritici-repentis Pt-1C-BFP] gi|187980909|gb|EDU47535.1| nuclease PA3 [Pyrenophora tritici-repentis Pt-1C-BFP]
  misc_feature (1)..(317): NCBI GI: 261355699 Blast Desc: nuclease PA3 [Verticillium albo-atrum VaMs.102]
  misc_feature (11)..(295): NCBI GI: 169616298 Blast Desc: SNOG_11319 [Phaeosphaeria nodorum SN15] gi|111059907|gb|EAT81027.1| SNOG_11319 [Phaeosphaeria nodorum SN15]
  misc_feature (19)..(296): NCBI GI: 156045187 Blast Desc: SS1G_09782 [Sclerotinia sclerotiorum 1980] gi|154694177|gb|EDN93915.1| SS1G_09782 [Sclerotinia sclerotiorum 1980]
  misc_feature (1)..(296): NCBI GI: 6863036 Blast Desc: nuclease Le1 [Lentinula edodes] gi|7594874|dbj|BAA94694.1| nuclease Le1 [Lentinula edodes]
  misc_feature (16)..(293): NCBI GI: 242782633 Blast Desc: nuclease S1 precursor, [Talaromyces stipitatus ATCC 10500] gi|218720186|gb|EED19605.1| nuclease S1 precursor, [Talaromyces stipitatus ATCC 10500]
  misc_feature (6)..(298): NCBI GI: 169624232 Blast Desc: SNOG_15372 [Phaeosphaeria nodorum SN15] gi|111056185|gb|EAT77305.1| SNOG_15372 [Phaeosphaeria nodorum SN15]
  misc_feature (1)..(296): NCBI GI: 170114742 Blast Desc: [Laccaria bicolor S238N-H82] gi|164636480|gb|EDR00775.1| [Laccaria bicolor S238N-H82]
  misc_feature (19)..(294): NCBI GI: 189190648 Blast Desc: nuclease PA3 [Pyrenophora tritici-repentis Pt-1C-BFP] gi|187973269|gb|EDU40768.1| nuclease PA3 [Pyrenophora tritici-repentis Pt-1C-BFP]
  misc_feature (1)..(294): NCBI GI: 261353466 Blast Desc: nuclease S1 [Verticillium albo-atrum VaMs.102]
  misc_feature (20)..(292): SWISSPROT Homolog: EC 3.1.30.1 Aspergillus nuclease S(1)
  misc_feature: Useful for introducing or modulating the production of volatile compounds
MRSSHFIAVASALAASGLAWNTDVHQQIAYTAEELLSPSSKIVIKKLLEPEYKGSLGRVGAWADSYRKTPEGKYTETWHYIDSSDDPPAFCNVYPNRDNTLAGSIVSAITNQTQILKDCIHQVKAGKIHNGENYQCANSVKFIAHFLSDIAQPLHTSGIAIGGNAFPVTFNGATTNLHAVWDGQIIYSLANVKSFDNTTIQPFFKNIASRIRRDDFFTPTSEWTSCTDPGRPGECALSWARDTNAWTCDYVYSQNFNATDLATSGYAEGAWPIVNIQVAKAALRMATWFNRLVEGSYKEREVILRLNPSWVGGPAGGA

SEQ ID NO: 965 - DNA, 1760 bp, Muscodor strobelii
  misc_feature: SGI EST ID NO. CUFF.2696.0
  misc_feature: Variant of the nucleotide sequence at SEQ ID NO 963
ttcttatcgggcttcagtccgaagaaaataatactttgaatatgccaagagatccctatctgtaagtcagcagcgctgaactagccctaatagtcaggtccggagggcgccgagagcgccaatcccgccatcctcgtcgcgtctcgaacgcacgccaatcaacaccattcgacacccagcatctttcttgatcaggcaatattgccttccaactcttcgtctgctccttgctcatgagcttctcatttgtgggcatggagatgaattactcctaagctaacacaatctagcagagctttgggctgaaagataaaggtcatcatggcttggcgaaccacagctagccggccgaaccagcttgtcgggaggtataaatgattaccgaagtcagcgagcggtcgttgagcggaattggatcggtgtgtccagcctatctggtttctatcgccctcagacgttgaagaccatatccgcaatgcgctcctcccacttcattgctgtcgctagtgcgctcgctgcgtctggtttggcctggaacaccgatgtgcaccaacaaatcgcatacaccgccgaggagcttctatcgccctcctcgaagatcgtgatcaagaagttgctggagcccgagtacaaaggcagccttggacgcgtgggcgcgtgggcagactcataccgaaagacgcccgagggcaaatataccgagacatggcactacatcgactcttcggatgacccgccggcgttctgcaacgtgtatcccaaccgcgacaacactctggccggcagcattgtcagcgcgatcacgaaccagactcagatcctaaaggactgtatccatcaagtcaaagctggcaagatacacaatggcgagaactaccaatgcgccaactccgtcaagttcatcgcccacttcttaagtgatatcgcgcagccccttcatacctctggaattgcgatcggaggaaatgctttccctgtcacattcaacggtgctacgactaacctccacgctgtctgggacggacaaatcatctactccctcgccaacgtaaaatccttcgacaacaccacgatccaacccttcttcaaaaacatcgcctcccgcatccgccgcgacgacttcttcacacccacatccgagtggacttcctgcaccgacccaggccgcccaggtgaatgcgccctcagctgggcacgcgacaccaacgcgtggacttgcgactacgtctacagtcagaacttcaacgccaccgatctcgcgacctccgggtacgccgagggcgcttggcctatcgtcaatatacaggttgcgaaggcggcgctgcgtatggcgacttggttcaatcgccttgttgagggctcgtataaagagcgcgaggtcattctcaggctcaaccctagctgggttggcggacctgctggtggtgcgtagaggcgacagggtcagagtgatgtgattgatgatgatggggaatgagaaatgagtctgtaacgggtaaatgaacctatctacataacataatggatatactcgttgaacgcatctcgatcgatatcttacttaggcttcactgacatccacccgttggttaggatatcgacatgtcacatttcaatcacgtagaggagctatggcacatagggagacagatcaatcaatttagctagctaagcattgctagacttcgtctgtgcgagatcactcatccggctgagtgcagtactaccaacagcctttttactcggtttgtgctatgcca

SEQ ID NO: 966 - DNA, 1191 bp, Muscodor strobelii
  misc_feature: SGI cDNA ID NO. 559907
  misc_feature: Encodes the peptide sequence at SEQ ID NO 967
atggagcagcatcaacacaaccttgatgctgaaccacaccttcggctgcacctcgacaatcaacgggcctatctatatgaccagtgggtctctcaacgcgcctccgaacgtgctgctgagcgcgccaagcatgcagaagctattgaggaacgagagtcaaagatacgggttctcgagatcaaggtcgtgcaggaacgcgaagctggctatcaatatggggtaaaggagaccaaggaggtttgctcgaaagacctcgctgctcaagcacaagcctctaaacaggagattggtgatcttcaacgacttatcaatgagaagaacaaagagttggactccgtcagagagatgtggcaagatgcagtcagagagctctcgaatctcaagacgtctaacaagtgcttcgccatcgatgatgccagcctggtcgcgaagtgggagcgtctgcaatatgtcatcaagaattttgccgtctcatacatcagtcatctcaagatgatagggcccatgacggccaaacaggaggcagactacaattctctcacgcacatgtacaatgacctagttgcctcagaagagtatgtcgatgtacttttacaggctcgcatttggaagtttctggttcgcagactcttcgatgaccccaacatagtttggggcgaggatgctcgagtcaagatgcagtccatgtgggacatcttgaataatgatggtgacactccaaaagtcgcccccaaggagtggcacacatttcgagcccagacggtagcgatggtcaagaccaagattggcgttgataagcagacccgcgaacgtctctccaagatggcgcccagtgtcactcagcctttcgttgttcacgagaatgaagatgactttaccgcggactggcacgatatcatcgacaaaacagtcgagctcgcgactctgttctctcagtcacgatgtcagtatgatgtgattttttccaaaacaggaagggcatacgaattcgagagtgaatatatgttcgacatcatcagtacagccaaggatggcgctgaagtcatgatgctcgtctctcctctgctcctgcgctacggcaattctaaaggagaagattacgacagaaaaaccgtcctcgcaaaggcgtctgttctttgcactcaatcatacaaagccataccttccaaggaagatgaagaggagctttga

SEQ ID NO: 967 - protein, 396 aa, Muscodor strobelii
  misc_feature: SGI Peptide ID NO. 559907
  misc_feature (88)..(380): NCBI GI: 67900768 Blast Desc: AN7371.2 [Aspergillus nidulans FGSC A4] gi|40742552|gb|EAA61742.1| AN7371.2 [Aspergillus nidulans FGSC A4] gi|259483270|tpe|CBF78519.1| TPA: conserved [Aspergillus FGSC
  misc_feature (196)..(383): NCBI GI: 171683123 Blast Desc: protein product [Podospora anserina] gi|170941521|emb|CAP67173.1| protein product [Podospora anserina]
  misc_feature (116)..(380): NCBI GI: 256728731 Blast Desc: NECHADRAFT_85974 [Nectria haematococca mpVI 77-13-4]
  misc_feature (53)..(380): NCBI GI: 85085291 Blast Desc: NCU04397 [Neurospora crassa OR74A] gi|28918566|gb|EAA28238.1| [Neurospora crassa OR74A] gi|40882226|emb|CAF06051.1| [Neurospora crassa]
  misc_feature (184)..(388): NCBI GI: 46106189 Blast Desc: FG00412.1 [Gibberella zeae PH-1]
  misc_feature (136)..(390): NCBI GI: 170940142 Blast Desc: protein product [Podospora anserina]
  misc_feature (130)..(380): NCBI GI: 256734570 Blast Desc: NECHADRAFT_74979 [Nectria haematococca mpVI 77-13-4]
  misc_feature (92)..(222): NCBI GI: 67539860 Blast Desc: AN6100.2 [Aspergillus nidulans FGSC A4] gi|40738885|gb|EAA58075.1| AN6100.2 [Aspergillus nidulans FGSC A4] gi|259479712|tpe|CBF70185.1| TPA: conserved [Aspergillus FGSC
MEQHQHNLDAEPHLRLHLDNQRAYLYDQWVSQRASERAAERAKHAEAIEERESKIRVLEIKVVQEREAGYQYGVKETKEVCSKDLAAQAQASKQEIGDLQRLINEKNKELDSVREMWQDAVRELSNLKTSNKCFAIDDASLVAKWERLQYVIKNFAVSYISHLKMIGPMTAKQEADYNSLTHMYNDLVASEEYVDVLLQARIWKFLVRRLFDDPNIVWGEDARVKMQSMWDILNNDGDTPKVAPKEWHTFRAQTVAMVKTKIGVDKQTRERLSKMAPSVTQPFVVHENEDDFTADWHDIIDKTVELATLFSQSRCQYDVIFSKTGRAYEFESEYMFDIISTAKDGAEVMMLVSPLLLRYGNSKGEDYDRKTVLAKASVLCTQSYKAIPSKEDEEEL

SEQ ID NO: 968 - DNA, 1698 bp, Muscodor strobelii
  misc_feature: SGI cDNA ID NO. 559908
  misc_feature: Encodes the peptide sequence at SEQ ID NO 969
atgtctgcccaggcagccaaaacgacgctcctagtcggcatcgacttcggcacaactttctctggcgtgtcctggctcctccacaaggatggtagtgagcctggtaagccggaagtcattgacatctggcccgcgcttcttgctcgcgactcatctcaggtcaaagtcccgtccaagctgtactacgacggtgagtccaaagaggtcgtctttggatacaacattcccgccgatgcccaccctattgagtggttcaagcttctacttctcgagcctgaggacctgcaggaccacgtccaagactccactaacatcaaactggccaagatacgaatgcaagagttgggcaagagccccgtcgaccttgtcggtgactacctgaaggcgctagccacgcccatccacgtcgttctcaccgtccctgccatctggaagggatatgcacgccagcggatgcaggaagctgcaacaaaggcaggcattcttgcctacagacccgcgggcaagaccactctatccttcatttcagagcccgaagctgctactctggcgactctgtctgagctcgatgttcgccaggacctttccgttggtgaaacatttgtcgtgctcgatgcaggtggcggtacagtcgacatcatcagctacaaagtcgagaagaccgatccccttgtcgtctctgagtgtgttgaaggagacggcgctctatgcggggccacatttctcgacgaggagtttgagaacttcatgaaagttcgtgtcggtgctcaggcctgggcagttatggacaaagaagctatcaagaagatgatgtccagtgagtgggagcatggcatcaaatccgagttcaatggcaagaaggctacctacaccattgacattccaaagaggcgtgcgcgaggccaggaaaaggtgaccgcggatgagatccgaaagatattcgaaagtgtcatgcctcagattcgtgatctactggctcagcagaccagtgcaatcatggacaagctacgttgttatccaaagtttgtcattctagtcggtgggttcggtcgatgcccatatttgtttgaagatttgaagaagtcgttcagcaatagagtctctgttctgaaggctcgcggagacaagccttggtcggcagtgtgtcgcggtgctaccttatctggcatcacgggacgtggccttacatcccaacctgacgttcaaatccagtcacgcgtggctcgcttgagctatggcatgcgttacgacgcctattggcaaggaggtgttcatgatatgagggacaggcacttcgatcaagtcgatggacgctggaaagccaaaggccagatgcgatggttcgtgaagagaggacaagtgatgtctgctttggagccagaattgcatgagtttgtacgccaatggtctatcgccatgcgaggctatgtggatgttaccgagactatttacaccagcagtgatcagtatcctactactcgacatgactctaccgtttctgaaggccgcagcttcagtctacgcattccacgacgcatcgagcaaatggaaaagcgcggctctgatggcgttgaatttttccaatggaagttccagtacaaagtcgtcgcttctggggctgccattgacgtagcggtccttgatactgaaacgggcacagagcttgtctctgagaacatcgctgtccagacagagtaa

SEQ ID NO: 969 - protein, 565 aa, Muscodor strobelii
  misc_feature: SGI Peptide ID NO. 559908
  misc_feature (5)..(460): NCBI GI: 85085287 Blast Desc: NCU04396 [Neurospora crassa OR74A] gi|28918565|gb|EAA28237.1| [Neurospora crassa OR74A] gi|40882227|emb|CAF06052.1| conserved [Neurospora crassa]
  misc_feature (10)..(563): NCBI GI: 238485322 Blast Desc: conserved [Aspergillus flavus NRRL3357] gi|220698778|gb|EED55117.1| conserved [Aspergillus flavus NRRL3357]
  misc_feature (10)..(546): NCBI GI: 256732648 Blast Desc: NECHADRAFT_79049 [Nectria haematococca mpVI 77-13-4]
  misc_feature (2)..(498): NCBI GI: 46107934 Blast Desc: FG00850.1 [Gibberella zeae PH-1]
  misc_feature (50)..(565): NCBI GI: 171683119 Blast Desc: protein product [Podospora anserina] gi|170941519|emb|CAP67171.1| protein product [Podospora anserina]
  misc_feature (2)..(546): NCBI GI: 256735296 Blast Desc: NECHADRAFT_90172 [Nectria haematococca mpVI 77-13-4]
  misc_feature (10)..(500): NCBI GI: 67900766 Blast Desc: AN7370.2 [Aspergillus nidulans FGSC A4] gi|40742551|gb|EAA61741.1| AN7370.2 [Aspergillus nidulans FGSC A4] gi|259483271|tpe|CBF78521.1| TPA: conserved [Aspergillus FGSC
  misc_feature (10)..(546): NCBI GI: 149209127 Blast Desc: MGCH7_ch7g56 [Magnaporthe grisea 70-15] gi|86196011|gb|EAQ70649.1| MGCH7_ch7g56 [Magnaporthe grisea 70-15]
  misc_feature (10)..(547): NCBI GI: 256728559 Blast Desc: NECHADRAFT_50859 [Nectria haematococca mpVI 77-13-4]
  misc_feature (10)..(546): NCBI GI: 67539858 Blast Desc: AN6099.2 [Aspergillus nidulans FGSC A4] gi|40738884|gb|EAA58074.1| AN6099.2 [Aspergillus nidulans FGSC A4] gi|259479713|tpe|CBF70187.1| TPA: conserved [Aspergillus FGSC
MSAQAAKTTLLVGIDFGTTFSGVSWLLHKDGSEPGKPEVIDIWPALLARDSSQVKVPSKLYYDGESKEVVFGYNIPADAHPIEWFKLLLLEPEDLQDHVQDSTNIKLAKIRMQELGKSPVDLVGDYLKALATPIHVVLTVPAIWKGYARQRMQEAATKAGILAYRPAGKTTLSFISEPEAATLATLSELDVRQDLSVGETFVVLDAGGGTVDIISYKVEKTDPLVVSECVEGDGALCGATFLDEEFENFMKVRVGAQAWAVMDKEAIKKMMSSEWEHGIKSEFNGKKATYTIDIPKRRARGQEKVTADEIRKIFESVMPQIRDLLAQQTSAIMDKLRCYPKFVILVGGFGRCPYLFEDLKKSFSNRVSVLKARGDKPWSAVCRGATLSGITGRGLTSQPDVQIQSRVARLSYGMRYDAYWQGGVHDMRDRHFDQVDGRWKAKGQMRWFVKRGQVMSALEPELHEFVRQWSIAMRGYVDVTETIYTSSDQYPTTRHDSTVSEGRSFSLRIPRRIEQMEKRGSDGVEFFQWKFQYKVVASGAAIDVAVLDTETGTELVSENIAVQTE

SEQ ID NO: 970 - DNA, 1434 bp, Muscodor strobelii
  misc_feature: SGI cDNA ID NO. 559909
  misc_feature: Encodes the peptide sequence at SEQ ID NO 971
atgggttcggggcccttcgatcccaggctcatgtctgtggaggccgtgccaaactcagaactcgattcggacgttcatcctgctgttgaacagcacatagaccatgaagtgcaaggaaccaggcccatcatcgaggcaacactccctcctggcatccccatgtcggaaaagaacatcaccgaatcaacggagttctgcacgacatggcccgtagatgagacgggacactatactacgactgacaatcggagtcaactgcagcttgacacacatgcgcctccaggtggctggaagaagccggccggcgtgaaaatcgtcgcgatgatttttttcggtcgacggcgcgcagtggacattcttgactgctatttgagacaaaacgctgtctcgaacgggggatatctagacgaggtctggttcctggtcaacacggacgtcgaagaggatgtcgcttggctccgagaattggaagcgcagcagaaagagtatatcttcatggacatgagcttgtgcaaccacaactatggctgcatatgggagtattcggtagaggacaatacaatatacatcaagatcgatgacgacattatatacattcatcacgacgcgattccgcagctcgttcacactcggatcagtgagcctcacccctacgcagtgtcagcacagatcgtgaacagtcctgtgatgggtcttgaatcttatcactacggagcaattcatcctttcttgccagatccacgaaggcgtaattggaggaaagcctccgagacctggaagatttcagaactgccgctatacccgccagggactacgaatgcggctctggataatattcttgagatcgagatgccttataaagggcatccatggctgttactagccaattcgaccagcgagccctcttcctcaataacgcgtactccaatatcgctctggaatgccaatcagggtcccgatgctattgcatggggcccgggttggaaatcttggggtgtggcggctcagcagctgtacagcttgttgtggaatctggaaaacaatgagatggaccggtatcacttcgggcgcgcaattggctatagcaaaaagaaaagacatcattccaacaaagatccaggcggagaacagctctatgatctgcagtatcagcgatataacctcaacttcttggcaatctggggatcagatgtgcgtctggcattgccgattgctgacgatgagaacgagatcacatcactcattcccgcccggctcggccgcccgtttgtggtcgacacgcgtgcaatcgtcgcacaccatagcttctacatacagaaagatggcatcgtcggcacagaccttatggatcgcttccgtgccttcgcaaatgagaatgtctgcaaatcaaacaatcagaagacgccgtgggactttcggtgtgagaatttttga

SEQ ID NO: 971 - protein, 477 aa, Muscodor strobelii
  misc_feature: SGI Peptide ID NO. 559909
  misc_feature (92)..(461): NCBI GI: 225556125 Blast Desc: conserved [Ajellomyces capsulatus G186AR]
  misc_feature (93)..(461): NCBI GI: 226280107 Blast Desc: conserved [Paracoccidioides brasiliensis Pb01]
  misc_feature (99)..(466): NCBI GI: 261195821 Blast Desc: conserved [Ajellomyces dermatitidis SLH14081] gi|239587447|gb|EEQ70090.1| conserved [Ajellomyces dermatitidis SLH14081] gi|239614399|gb|EEQ91386.1| conserved [Ajellomyces
  misc_feature (77)..(463): NCBI GI: 256724840 Blast Desc: NECHADRAFT_34621 [Nectria haematococca mpVI 77-13-4]
  misc_feature (99)..(461): NCBI GI: 212527402 Blast Desc: conserved [Penicillium marneffei ATCC 18224] gi|210073256|gb|EEA27343.1| conserved [Penicillium marneffei ATCC 18224]
  misc_feature (104)..(461): NCBI GI: 261188315 Blast Desc: conserved [Ajellomyces dermatitidis SLH14081] gi|239593252|gb|EEQ75833.1| conserved [Ajellomyces dermatitidis SLH14081]
  misc_feature (87)..(461): NCBI GI: 239614928 Blast Desc: conserved [Ajellomyces dermatitidis ER-3]
  misc_feature (93)..(461): NCBI GI: 225681332 Blast Desc: conserved [Paracoccidioides brasiliensis Pb03]
  misc_feature (93)..(461): NCBI GI: 226290833 Blast Desc: conserved [Paracoccidioides brasiliensis Pb18]
  misc_feature (92)..(461): NCBI GI: 154275810 Blast Desc: [Ajellomyces capsulatus NAm1] gi|150413823|gb|EDN09188.1| [Ajellomyces capsulatus NAm1]
MGSGPFDPRLMSVEAVPNSELDSDVHPAVEQHIDHEVQGTRPIIEATLPPGIPMSEKNITESTEFCTTWPVDETGHYTTTDNRSQLQLDTHAPPGGWKKPAGVKIVAMIFFGRRRAVDILDCYLRQNAVSNGGYLDEVWFLVNTDVEEDVAWLRELEAQQKEYIFMDMSLCNHNYGCIWEYSVEDNTIYIKIDDDIIYIHHDAIPQLVHTRISEPHPYAVSAQIVNSPVMGLESYHYGAIHPFLPDPRRRNWRKASETWKISELPLYPPGTTNAALDNILEIEMPYKGHPWLLLANSTSEPSSSITRTPISLWNANQGPDAIAWGPGWKSWGVAAQQLYSLLWNLENNEMDRYHFGRAIGYSKKKRHHSNKDPGGEQLYDLQYQRYNLNFLAIWGSDVRLALPIADDENEITSLIPARLGRPFVVDTRAIVAHHSFYIQKDGIVGTDLMDRFRAFANENVCKSNNQKTPWDFRCENF

SEQ ID NO: 972 - DNA, 608 bp, Muscodor strobelii
  misc_feature: SGI EST ID NO. CUFF.2715.0
  misc_feature: Variant of the nucleotide sequence at SEQ ID NO 970
atagaccatgaagtgcaaggaaccaggcccatcatcgaggcaacactccctcctggcatccccatgtcggaaaagaacatcaccgaatcaacggagttctgcacgacatggcccgtagatgagacgggacactatactacgactgacaatcggagtcaactgcagcttgacacacatgcgcctccaggtggctggaagaagccggccggcgtgaaaatcgtcgcgatgatttttttcggtcgacggcgcgcagtggacattcttgactgctatttgagacaaaacgctgtctcgaacgggggatatctagacgaggtctggttcctggtcaacacggacgtcgaagaggatgtcgcttggctccgagaattggaagcgcagcagaaagagtatatcttcatggacatgagcttgtgcaaccacaactatggctgcatatgggagtattcggtagaggacaatacaatatacatcaagatcgatgacgacattatatacattcatcacgacgcgattccgcagctcgttcacactcggatcagtgagcctcacccctacgcagtgtcagcacagatcgtgaacagtcctgtgatgggtcttgaatctta

SEQ ID NO: 973 - DNA, 867 bp, Muscodor strobelii
  misc_feature: SGI cDNA ID NO. 559910
  misc_feature: Encodes the peptide sequence at SEQ ID NO 974
atgcctatcgaagatcttgcccgcgatcgtgagctctttacgttgggagctggatcaaacatcaccatccgttgcggtgacagagaatggaaactacatcaatacgtcttgaccactcgcaatgactggttccatgctactatcttcgaccctcacactttcaaacagcaaatgtggggagacactttgtacattcaagaccaagatcctgaggcagtaggccgcatcctagagtggatctacactgaagatgttattagtgttcgtcgacgtggacgatacaccggcggacccctcgccttctacactcgactattcttatgcgctaaattcttcggaattttcaatctctgcaacttgagcttcgccagcatcctagctaccctaaaaagtacgtctatcaaggttcagagtctgtcttctggcgattcagaaggcgttcgacggctttctgacagtcgtatcgccgatatgatggtcggcatctccgctgcatacaagggagatgagcctcgtcttaggtcgctgttcaagcgatttctggcggactgccacttcattgtcgtccacgacaacaacttcgttcacgcggcccgtaaaatcaccccattctggcaacacctgcaagaagggctcactgatgctgtcatcgacgaccgttacggatccccagagcgctgtaacatttgcagcgagacgcccttccagattcggttccgatgggccagcatttacgccgatcaagagggtgtcgctgttggagtttgtgatacgtgcgtccctcgacctttcggccagatcattgcagttgatgaggtcgaccagcacgtagatctttgggagtctttttgcgtccgcctcctctaa

SEQ ID NO: 974 - protein, 288 aa, Muscodor strobelii
  misc_feature: SGI Peptide ID NO. 559910
  misc_feature (6)..(160): NCBI GI: 171680598 Blast Desc: protein product [Podospora anserina] gi|170939926|emb|CAP65152.1| protein product [Podospora anserina]
  misc_feature (9)..(153): NCBI GI: 116179034 Blast Desc: CHGG_00145 [Chaetomium globosum CBS 148.51] gi|88184442|gb|EAQ91910.1| CHGG_00145 [Chaetomium globosum CBS 148.51]
  misc_feature (10)..(90): NCBI GI: 262096157 Blast Desc: conserved [Phytophthora infestans T30-4]
  misc_feature (6)..(262): NCBI GI: 85079439 Blast Desc: NCU05044 [Neurospora crassa OR74A] gi|28917412|gb|EAA27116.1| [Neurospora crassa OR74A]
  misc_feature (1)..(90): NCBI GI: 242033583 Blast Desc: SORBIDRAFT_01g013780 [Sorghum bicolor] gi|241918040|gb|EER91184.1| SORBIDRAFT_01g013780 [Sorghum bicolor]
  misc_feature (2)..(83): NCBI GI: 125602068 Blast Desc: OsJ_25914 [Oryza sativa Japonica Group]
  misc_feature (2)..(134): NCBI GI: 115474633 Blast Desc: Os08g0128700 [Oryza sativa (japonica cultivar-group)] gi|29467516|dbj|BAC66705.1| spop [Oryza sativa Japonica Group] gi|113622882|dbj|BAF22827.1| Os08g0128700 [Oryza sativa Japonica
  misc_feature (2)..(85): NCBI GI: 125560020 Blast Desc: OsI_27684 [Oryza sativa Indica Group]
MPIEDLARDRELFTLGAGSNITIRCGDREWKLHQYVLTTRNDWFHATIFDPHTFKQQMWGDTLYIQDQDPEAVGRILEWIYTEDVISVRRRGRYTGGPLAFYTRLFLCAKFFGIFNLCNLSFASILATLKSTSIKVQSLSSGDSEGVRRLSDSRIADMMVGISAAYKGDEPRLRSLFKRFLADCHFIVVHDNNFVHAARKITPFWQHLQEGLTDAVIDDRYGSPERCNICSETPFQIRFRWASIYADQEGVAVGVCDTCVPRPFGQIIAVDEVDQHVDLWESFCVRLL

SEQ ID NO: 975 - DNA, 702 bp, Muscodor strobelii
  misc_feature: SGI cDNA ID NO. 559911
  misc_feature: Encodes the peptide sequence at SEQ ID NO 976
atggatgtctctacccgcgattacgagttgttcaccagtggggcattctcagatgtcacaatcctttgtggcgataaagaatggaagcttcacaaggctgttctctcctcccgctccgactggttcaaacgagccatcttggaagcggccactgacgaagtgcgcattcgagatcaagatcctgaggctgttggatgggtactcgagtggatctacactggaaaatgctcgatgtgggcccagtatttcgtgcactgcgatgcttacgctggcgtggatatcttcttgcctgatgacctggagggtttcatgagcgccgtcagaagagcatacgacgttgacggcgaccctcgtctccgatcggcgttcaccaagtttctcgtcgattgccactactgggtagtccgcgaccccgaattccgcacgaaggccaaaggaatacccgcgttctgggaggacgtacgcgatggccatttcgaagcggacattgacctcagatatggattccctgagaaatgctttcgatgcggggcaaactcagaaacgaaggagcggggcatccgatggtcgtcaattctatcagatgtttacggtgtcgacggactctgcgacgtttgccaacctcgagacttcggacagatcatcaagtcgcagattggagacatcaccggaggcagtgactctgattcatcggccaactga

SEQ ID NO: 976 - protein, 233 aa, Muscodor strobelii
  misc_feature: SGI Peptide ID NO. 559911
  misc_feature (7)..(100): Pfam Id: PF00651 Pfam Desc: BTB/POZ domain
  misc_feature (8)..(78): Pfam Id: PF00651 Pfam Desc: BTB/POZ domain
  misc_feature (5)..(78): NCBI GI: 171680598 Blast Desc: protein product [Podospora anserina] gi|170939926|emb|CAP65152.1| protein product [Podospora anserina]
  misc_feature (5)..(206): NCBI GI: 85079439 Blast Desc: NCU05044 [Neurospora crassa OR74A] gi|28917412|gb|EAA27116.1| [Neurospora crassa OR74A]
  misc_feature (7)..(206): NCBI GI: 116179034 Blast Desc: CHGG_00145 [Chaetomium globosum CBS 148.51] gi|88184442|gb|EAQ91910.1| CHGG_00145 [Chaetomium globosum CBS 148.51]
  misc_feature (9)..(75): NCBI GI: 169623227 Blast Desc: SNOG_14849 [Phaeosphaeria nodorum SN15] gi|160704939|gb|EAT77701.2| SNOG_14849 [Phaeosphaeria nodorum SN15]
  misc_feature (9)..(107): NCBI GI: 170591965 Blast Desc: BTB/POZ domain containing protein [Brugia malayi] gi|158591892|gb|EDP30495.1| BTB/POZ domain containing protein [Brugia malayi]
  misc_feature (10)..(77): NCBI GI: 256727319 Blast Desc: NECHADRAFT_33838 [Nectria haematococca mpVI 77-13-4]
  misc_feature (10)..(73): NCBI GI: 242826495 Blast Desc: conserved [Talaromyces stipitatus ATCC 10500] gi|218712471|gb|EED11897.1| conserved [Talaromyces stipitatus ATCC 10500]
  misc_feature (10)..(73): NCBI GI: 242759811 Blast Desc: conserved [Talaromyces stipitatus ATCC 10500] gi|218723058|gb|EED22475.1| conserved [Talaromyces stipitatus ATCC 10500]
  misc_feature (5)..(77): NCBI GI: 7495598 Blast Desc: conserved [Talaromyces stipitatus ATCC 10500] gi|218723058|gb|EED22475.1| conserved [Talaromyces stipitatus ATCC 10500]
  misc_feature (9)..(131): NCBI GI: 130492354 Blast Desc: TD and POZ domain containing 4 [Mus musculus]
MDVSTRDYELFTSGAFSDVTILCGDKEWKLHKAVLSSRSDWFKRAILEAATDEVRIRDQDPEAVGWVLEWIYTGKCSMWAQYFVHCDAYAGVDIFLPDDLEGFMSAVRRAYDVDGDPRLRSAFTKFLVDCHYWVVRDPEFRTKAKGIPAFWEDVRDGHFEADIDLRYGFPEKCFRCGANSETKERGIRWSSILSDVYGVDGLCDVCQPRDFGQIIKSQIGDITGGSDSDSSAN

SEQ ID NO: 977 - DNA, 1506 bp, Muscodor strobelii
  misc_feature: SGI cDNA ID NO. 559912
  misc_feature: Encodes the peptide sequence at SEQ ID NO 978
atgagtgacaccttcgcatcaggttcgtgggcatgggctactacagtggcagctctcatggttgccgccgccctcacgagatatctcacaaagtccaaaccattcgatgtgccattggtcggaggagagcagagtgactttaacacgttgaagggacgctatgttcaggaagcagatgttctgttgcgcgagggctatgaaaagtttaaagactctatattccaggtggcgactcccgatggtcctcgcctatttctgccgcgcaggttcgctcatgacttgaagccgttcaatcggcatcaagcgagcggtatgaaggccttagcagatagacatattggtcattacacaaccattgaccatgagagcgacatcatgctcggagcgatcaagatggatctgaatcggaatctagggaactttgtaggagatgtgcaagaagaggtcgctcatgtgttcaatactgacttccctccatgtgatgactggactgccgtcgacgttcatgagaaactattgaaagtagttgcgcaggcctcagccagaatattcgtcggctaccctatgtgtcggaatgaggaatggctcaattgcagcacaaagttcgcaatcgacgtgatgaccggaggcgagaaactgaaacaatggcatccttggcttcgtcctatcgctcaatatttcgtacctgagatgacgcaaatccgcggtgaccaccatcgtgcactcgacctcctccgccccgagctggagaggcgagctaaggacactgaggagcctcaagcacgcaatgatatgattgaatggatgttcgagcgagccaagaagctcggcgacaagtcgtttgatagaaaagagctcgccaacttgcagatgttgactgcgaccgcggctatacacacaactaggctcgccatcatacatgcgctttatgatcttgcggctagacaggaatacgttcaacccctgagacaagaaatcttcgaagtcacgaaagacggcgagggtattctcaagaaacaacatctcactggcctgaagaagctcgacagcttcatgaaagagtctcaacggcacagtcccccatcaatagcaacatatcaacgcaaagcaatggtcccaatcaagctctcaaatggctttcacatcccaacaggcacaattgtacaatgcaacacaaatatcctagacgagacaccagcagaatggggcgatccacacgcttttgatggattccgcttctataagctacgcagcaatccagaccacgccaacagtttccagttcgccagcccttcatacgattctatgcaattcggcttcggtaacgacgcatgtccgggtcgattcttcgcaagcaaccagatcaagatcattcttgcttacattcttgagcactacgacttcaagtttgaggatggtgtcacagagcgtccgaagaacttcttgttcgaggttaatgttatggcggacccgactgcgaagatgttgttcaagaagattaagtga

SEQ ID NO: 978 - protein, 501 aa, Muscodor strobelii
  misc_feature: SGI Peptide ID NO. 559912
  misc_feature (40)..(497): Pfam Id: PF00067 Pfam Desc: Cytochrome P450
  misc_feature (271)..(497): Pfam Id: PF00067 Pfam Desc: Cytochrome P450
  misc_feature (1)..(499): NCBI GI: 242804557 Blast Desc: cytochrome P450, [Talaromyces stipitatus ATCC 10500] gi|218717744|gb|EED17165.1| cytochrome P450, [Talaromyces stipitatus ATCC 10500]
  misc_feature (18)..(499): NCBI GI: 212539424 Blast Desc: cytochrome P450, [Penicillium marneffei ATCC 18224] gi|210067166|gb|EEA21258.1| cytochrome P450, [Penicillium marneffei ATCC 18224]
  misc_feature (9)..(499): NCBI GI: 169635726 Blast Desc: cytochrome P450 monooxygenase [Botryotinia fuckeliana]
  misc_feature (16)..(499): NCBI GI: 259486929 Blast Desc: TPA: cytochrome P450, (Eurofung) [Aspergillus nidulans FGSC A4]
  misc_feature (6)..(501): NCBI GI: 212542745 Blast Desc: cytochrome P450, [Penicillium marneffei ATCC 18224] gi|210066434|gb|EEA20527.1| cytochrome P450, [Penicillium marneffei ATCC 18224]
  misc_feature (16)..(499): NCBI GI: 67522282 Blast Desc: AN1598.2 [Aspergillus nidulans FGSC A4] gi|40745149|gb|EAA64305.1| AN1598.2 [Aspergillus nidulans FGSC A4]
  misc_feature (9)..(499): NCBI GI: 119494789 Blast Desc: cytochrome P450 monooxygenase, [Neosartorya fischeri NRRL 181] gi|119412362|gb|EAW22303.1| cytochrome P450 monooxygenase, [Neosartorya fischeri NRRL 181]
  misc_feature (14)..(499): NCBI GI: 156045918 Blast Desc: SS1G_09235 [Sclerotinia sclerotiorum 1980] gi|154693631|gb|EDN93369.1| SS1G_09235 [Sclerotinia sclerotiorum 1980]
  misc_feature (35)..(499): NCBI GI: 261360907 Blast Desc: ent-kaurene oxidase [Verticillium albo-atrum VaMs.102]
  misc_feature (11)..(499): NCBI GI: 256728668 Blast Desc: NECHADRAFT_50522 [Nectria haematococca mpVI 77-13-4]
  misc_feature (29)..(499): SWISSPROT Homolog: EC 1.14.13.78 Ent-kaurene oxidase
MSDTFASGSWAWATTVAALMVAAALTRYLTKSKPFDVPLVGGEQSDFNTLKGRYVQEADVLLREGYEKFKDSIFQVATPDGPRLFLPRRFAHDLKPFNRHQASGMKALADRHIGHYTTIDHESDIMLGAIKMDLNRNLGNFVGDVQEEVAHVFNTDFPPCDDWTAVDVHEKLLKVVAQASARIFVGYPMCRNEEWLNCSTKFAIDVMTGGEKLKQWHPWLRPIAQYFVPEMTQIRGDHHRALDLLRPELERRAKDTEEPQARNDMIEWMFERAKKLGDKSFDRKELANLQMLTATAAIHTTRLAIIHALYDLAARQEYVQPLRQEIFEVTKDGEGILKKQHLTGLKKLDSFMKESQRHSPPSIATYQRKAMVPIKLSNGFHIPTGTIVQCNTNILDETPAEWGDPHAFDGFRFYKLRSNPDHANSFQFASPSYDSMQFGFGNDACPGRFFASNQIKIILAYILEHYDFKFEDGVTERPKNFLFEVNVMADPTAKMLFKKIK

SEQ ID NO: 979 - DNA, 627 bp, Muscodor strobelii
  misc_feature: SGI EST ID NO. CUFF.2739.0
  misc_feature: Variant of the nucleotide sequence at SEQ ID NO 977
gaaatcttcgaagtcacgaaagacggcgagggtattctcaagaaacaacatctcactggcctgaagaagctcgacagcttcatgaaagagtctcaacggcacagtcccccatcaatagcaacatatcaacgcaaagcaatggtcccaatcaagctctcaaatggctttcacatcccaacaggcacaattgtacaatgcaacacaaatatcctagacgagacaccagcagaatggggcgatccacacgcttttgatggattccgcttctataagctacgcagcaatccagaccacgccaacagtttccagttcgccagcccttcatacgattctatgcaattcggcttcggtaacgacgcatgtccgggtcgattcttcgcaagcaaccagatcaagatcattcttgcttacattcttgagcactacgacttcaagtttgaggatggtgtcacagagcgtccgaagaacttcttgttcgaggttaatgttatggcggacccgactgcgaagatgttgttcaagaagattaagtgagtgggtgtatatagatcggaacagcagaaagtacgcagacgtgtagaatattggaagctatctagctaggtacacaattgagcacagtttgcc

SEQ ID NO: 980 - DNA, 1266 bp, Muscodor strobelii
  misc_feature: SGI cDNA ID NO. 559913
  misc_feature: Encodes the peptide sequence at SEQ ID NO 981
atggcgcctgcacttgttgatgtggttcctcagccggatatcgcttcagcggacacaaaggtcggcgtaccaaaagggctgaagctcattgatcctgctaagcttgaccttcgtactgacgatgagattgctgcctggttacaacaacgccatgccatcacatcggagaagaatatctgggcatactggcatgctggctacagcaagatgacgccgtgggttcagcgcaacatcatcaactgggttcgacgcttaggtcctgagtggacagtccatctagtcgacaaagtcgagggctcggagactcacatcagccattatgtcgagagctcattctttcccgatgccttcaacaacgacacaatggatggcccgacctacggtgctcactcaggcgatctcgttcgcttgccactcatctggaagtacggtggcatctggattgatgcgggtactttcttgtttcgtcacgtcgatgacatctgttggaagcagattgaggacgcgaacacgccgtttgagatggcgggattcgcgattgagatgcgccctggtatcgattgcatgctcaacggcttcatcgctgccaaagccggcaacccgttcatcaagcggtggcatgagatctattgcgcattgtgggaaaacggagtcaccaatgctcgtggcttccacaagcaccctttgctgcgccatctgccgctcctaaatcccccagtggacaagttgaattgccctgacatgcaagtcatgatggaagctttcagcgattatctagctgcatttatgtgcttcgagcgtttgcgcaagctcatcgaccccttggatggcttcaacgggcccgattattactccaatcacatgctgctattcccagccctgcaggagacatactacttccagcagcaaaccggctggtccggaacacgtcagttcgatatgctcactgccaagcgtacaggggacgacgctatccaggatgagaagtggcaagcagcagaggacttcgtcatcgatgcgcttgctaacacttctactatgaagctgtctcatggtccaccgggcgccctcgattccttcttggcagatctctgggactcaaaggagcatgagcagaaggacaatgtcgagggtacatttgcggcttacctacgatacggaagcgtgcattttgaccagacacgagagatgacacgaattgtaatgggctatccgacggaagaagtcttgacatgcggctatctcgagccgaagaagatagactag

SEQ ID NO: 981 - protein, 421 aa, Muscodor strobelii
  misc_feature: SGI Peptide ID NO. 559913
  misc_feature (14)..(419): NCBI GI: 242804552 Blast Desc: capsule polysaccharide biosynthesis protein, [Talaromyces stipitatus ATCC 10500] gi|218717743|gb|EED17164.1| capsule polysaccharide biosynthesis protein, [Talaromyces ATCC
  misc_feature (16)..(417): NCBI GI: 212539426 Blast Desc: conserved [Penicillium marneffei ATCC 18224] gi|210067167|gb|EEA21259.1| conserved [Penicillium marneffei ATCC 18224]
  misc_feature (39)..(416): NCBI GI: 70985642 Blast Desc: capsule polysaccharide biosynthesis protein [Aspergillus fumigatus Af293] gi|66845955|gb|EAL86289.1| capsule polysaccharide biosynthesis protein, [Aspergillus fumigatus
  misc_feature (39)..(416): NCBI GI: 121701753 Blast Desc: conserved [Aspergillus clavatus NRRL 1] gi|119397284|gb|EAW07715.1| conserved [Aspergillus clavatus NRRL 1]
  misc_feature (36)..(416): NCBI GI: 212538985 Blast Desc: capsule polysaccharide biosynthesis protein, [Penicillium marneffei ATCC 18224] gi|210069390|gb|EEA23481.1| capsule polysaccharide biosynthesis protein, [Penicillium ATCC
  misc_feature (35)..(417): NCBI GI: 67538582 Blast Desc: AN5461.2 [Aspergillus nidulans FGSC A4] gi|40743431|gb|EAA62621.1| [Aspergillus nidulans FGSC A4] gi|259485092|tpe|CBF81870.1| TPA: capsule polysaccharide protein,
  misc_feature (26)..(400): NCBI GI: 46127047 Blast Desc: FG07901.1 [Gibberella zeae PH-1]
  misc_feature (27)..(417): NCBI GI: 255952538 Blast Desc: Pc17g00710 [Penicillium chrysogenum Wisconsin 54-1255] gi|211586525|emb|CAP79358.1| Pc17g00710 [Penicillium chrysogenum Wisconsin 54-1255]
  misc_feature (27)..(417): NCBI GI: 225683496 Blast Desc: conserved [Paracoccidioides brasiliensis Pb03]
  misc_feature (33)..(299): NCBI GI: 240104775 Blast Desc: CPC735_019980 [Coccidioides posadasii C735 delta SOWgp]
MAPALVDVVPQPDIASADTKVGVPKGLKLIDPAKLDLRTDDEIAAWLQQRHAITSEKNIWAYWHAGYSKMTPWVQRNIINWVRRLGPEWTVHLVDKVEGSETHISHYVESSFFPDAFNNDTMDGPTYGAHSGDLVRLPLIWKYGGIWIDAGTFLFRHVDDICWKQIEDANTPFEMAGFAIEMRPGIDCMLNGFIAAKAGNPFIKRWHEIYCALWENGVTNARGFHKHPLLRHLPLLNPPVDKLNCPDMQVMMEAFSDYLAAFMCFERLRKLIDPLDGFNGPDYYSNHMLLFPALQETYYFQQQTGWSGTRQFDMLTAKRTGDDAIQDEKWQAAEDFVIDALANTSTMKLSHGPPGALDSFLADLWDSKEHEQKDNVEGTFAAYLRYGSVHFDQTREMTRIVMGYPTEEVLTCGYLEPKKID

SEQ ID NO: 982 - DNA, 671 bp, Muscodor strobelii
  misc_feature: SGI EST ID NO. CUFF.2753.0
  misc_feature: Variant of the nucleotide sequence at SEQ ID NO 980
tggttacaacaacgccatgccatcacatcggagaagaatatctgggcatactggcatgctggctacagcaagatgacgccgtgggttcagcgcaacatcatcaactgggttcgacgcttaggtcctgagtggacagtccatctagtcgacaaagtcgagggctcggagactcacatcagccattatgtcgagagctcattctttcccgatgccttcaacaacgacacaatggatggcccgacctacggtgctcactcaggcgatctcgttcgcttgccactcatctggaagtacggtggcatctggattgatgcgggtactttcttgtttcgtcacgtcgatgacatctgttggaagcagattgaggacgcgaacacgccgtttgagatggcgggattcgcgattgagatgcgccctggtatcgattgcatgctcaacggcttcatcgctgccaaagccggcaacccgttcatcaagcggtggcatgagatctattgcgcattgtgggaaaacggagtcaccaatgctcgtggcttccacaagcaccctttgctgcgccatctgccgctcctaaatcccccagtggacaagttgaattgccctgacatgcaagtcatgatggaagctttcagcgattatctagctgcatttatgtgcttcgagcgtttgcg

SEQ ID NO: 983 - DNA, 903 bp, Muscodor strobelii
  misc_feature: SGI cDNA ID NO. 559914
  misc_feature: Encodes the peptide sequence at SEQ ID NO 984
atggatggcccgacctacggtgctcactcaggcgatctcgttcgcttgccactcatctggaagtacggtggcatctggattgatgcgggtactttcttgtttcgtcacgtcgatgacatctgttggaagcagattgaggacgcgaacacgccgtttgagatggcgggattcgcgattgagatgcgccctggtatcgattgcatgctcaacggcttcatcgctgccaaagccggcaacccgttcatcaagcggtggcatgagatctattgcgcattgtgggaaaacggagtcaccaatgctcgtggcttccacaagcaccctttgctgcgccatctgccgctcctaaatcccccagtggacaagttgaattgccctgacatgcaagtcatgatggaagctttcagcgattatctagctgcatttatgtgcttcgagcgtttgcgcaagctcatcgaccccttggatggcttcaacgggcccgattattactccaatcacatgctgctattcccagccctgcaggagacatactacttccagcagcaaaccggctggtccggaacacgtcagttcgatatgctcactgccaagcgtacaggggacgacgctatccaggatgagaagtggcaagcagcagaggacttcgtcatcgatgcgcttgctaacacttctactatgaagctgtctcatggtccaccgggcgccctcgattccttcttggcagatctctgggactcaaaggagcatgagcagaaggacaatgtcgagggtacatttgcggcttacctacgatacggaagcgtgcattttgaccagacacgagagatgacacgaattgtaatgggctatccgacggaagaagtcttgacatgcggctatctcgagccgaagaagatagactag

SEQ ID NO: 984 - protein, 300 aa, Muscodor strobelii
  misc_feature: SGI Peptide ID NO. 559914
  misc_feature (1)..(298): NCBI GI: 242804552 Blast Desc: capsule polysaccharide biosynthesis protein, [Talaromyces stipitatus ATCC 10500] gi|218717743|gb|EED17164.1| capsule polysaccharide biosynthesis protein, [Talaromyces ATCC
  misc_feature (1)..(296): NCBI GI: 212539426 Blast Desc: conserved [Penicillium marneffei ATCC 18224] gi|210067167|gb|EEA21259.1| conserved [Penicillium marneffei ATCC 18224]
  misc_feature (1)..(295): NCBI GI: 70985642 Blast Desc: capsule polysaccharide biosynthesis protein [Aspergillus fumigatus Af293] gi|66845955|gb|EAL86289.1| capsule polysaccharide biosynthesis protein, [Aspergillus fumigatus
  misc_feature (1)..(295): NCBI GI: 121701753 Blast Desc: conserved [Aspergillus clavatus NRRL 1] gi|119397284|gb|EAW07715.1| conserved [Aspergillus clavatus NRRL 1]
  misc_feature (1)..(295): NCBI GI: 212538985 Blast Desc: capsule polysaccharide biosynthesis protein, [Penicillium marneffei ATCC 18224] gi|210069390|gb|EEA23481.1| capsule polysaccharide biosynthesis protein, [Penicillium ATCC
  misc_feature (1)..(295): NCBI GI: 261189661 Blast Desc: capsule polysaccharide biosynthesis protein [Ajellomyces dermatitidis SLH14081] gi|239591477|gb|EEQ74058.1| capsule polysaccharide biosynthesis protein [Ajellomyces
  misc_feature (1)..(296): NCBI GI: 67538582 Blast Desc: AN5461.2 [Aspergillus nidulans FGSC A4] gi|40743431|gb|EAA62621.1| [Aspergillus nidulans FGSC A4] gi|259485092|tpe|CBF81870.1| TPA: capsule polysaccharide protein,
  misc_feature (1)..(296): NCBI GI: 255952538 Blast Desc: Pc17g00710 [Penicillium chrysogenum Wisconsin 54-1255] gi|211586525|emb|CAP79358.1| Pc17g00710 [Penicillium chrysogenum Wisconsin 54-1255]
  misc_feature (1)..(296): NCBI GI: 261188905 Blast Desc: capsule polysaccharide biosynthesis protein [Ajellomyces dermatitidis SLH14081] gi|239591869|gb|EEQ74450.1| capsule polysaccharide biosynthesis protein [Ajellomyces
  misc_feature (1)..(296): NCBI GI: 225683496 Blast Desc: conserved [Paracoccidioides brasiliensis Pb03]
MDGPTYGAHSGDLVRLPLIWKYGGIWIDAGTFLFRHVDDICWKQIEDANTPFEMAGFAIEMRPGIDCMLNGFIAAKAGNPFIKRWHEIYCALWENGVTNARGFHKHPLLRHLPLLNPPVDKLNCPDMQVMMEAFSDYLAAFMCFERLRKLIDPLDGFNGPDYYSNHMLLFPALQETYYFQQQTGWSGTRQFDMLTAKRTGDDAIQDEKWQAAEDFVIDALANTSTMKLSHGPPGALDSFLADLWDSKEHEQKDNVEGTFAAYLRYGSVHFDQTREMTRIVMGYPTEEVLTCGYLEPKKID

SEQ ID NO: 985 - DNA, 671 bp, Muscodor strobelii; identical to SEQ ID NO: 982
  misc_feature: SGI EST ID NO. CUFF.2753.0
  misc_feature: Variant of the nucleotide sequence at SEQ ID NO 983

SEQ ID NO: 986 - DNA, 1131 bp, Muscodor strobelii
  misc_feature: SGI cDNA ID NO. 559915
  misc_feature: Elevated expression when VOC is produced
  misc_feature: Encodes the peptide sequence at SEQ ID NO 987
atggcaccagatattgatagaatatggacggaacaccaaccggccgcacaagacgatgtcgctgctgatgagagaaaagctctcgtcaagagagctctgggtcagaaaatcctggttcctgacatcttgtctttgatgccagcttggcctagtgatgttcaaccagatatcgacgagatcaacaaagaaattgatgcctggctgccgagtgtcaacgtcgcggaacacaagaaggctaaacacagagctcgcggcaactatacactgctgactgccgtatactacccccattgtaacaaagacaagatgctggtactcacacagtttctctattggatattcttctgggacgacgaaatcgacactggtggtgaactcaccgaagacgacgaaggcacaaaaaaatgctgcgaggagaccaacaaatgcattgatgattgcctgggacccaatccgaactacgagccaccaccaaactctcgtgggacggtagagatgttctatcccatcttggagactcttcgggctggtctagggcccgttgcaacagagcgtctacgattagagcttcatgactacgtcaatggcgtcagcagacaacagggtgttcgtcaggcggaacatcttccgaacccatggtatcacttccagatccgctcggatgacgttggcgtcatcccaagtatcacacagaacgaattcgcgatggactttgagctgcccgagtatgtccggcggcacgaggccatggaggtcatcgtattagaatgcaccaaactcactattcttcttaatgagatcttatctctgcagaaggaattccgagtttcgcaacttgagaacttagttctcctctttatgaacacagataagctgtcgcttcaaggcgcagtcgaaaaagtattaggcttgatccgtgagcactacgcgatttgtgttgcggccgaggagaagctgccgtggagcaagacagatgataaactgaatgccgatattcgagagtatattcgagggtgccaacgattggccactggtacggcctactggagctattactgcgaacgctacttcaaacatactcaagtcaatgaaaagcgtgaggtgcttcttgatctgtcgtatgtggagtaa

SEQ ID NO: 987 - protein, 376 aa, Muscodor strobelii
  misc_feature: SGI Peptide ID NO. 559915
  misc_feature (56)..(313): Pfam Id: PF03936 Pfam Desc: Terpene synthase family, metal binding domain
  misc_feature (1)..(373): NCBI GI: 212539422 Blast Desc: pentalenene synthase, [Penicillium marneffei ATCC 18224] gi|210067165|gb|EEA21257.1| pentalenene synthase, [Penicillium marneffei ATCC 18224]
  misc_feature (181)..(353): NCBI GI: 242804562 Blast Desc: conserved [Talaromyces stipitatus ATCC 10500] gi|218717745|gb|EED17166.1| conserved [Talaromyces stipitatus ATCC 10500]
  misc_feature (25)..(367): NCBI GI: 145604190 Blast Desc: MGG_10671 [Magnaporthe grisea 70-15] gi|145012237|gb|EDJ96893.1| MGG_10671 [Magnaporthe grisea 70-15]
  misc_feature (18)..(365): NCBI GI: 226279144 Blast Desc: PAAG_05756 [Paracoccidioides brasiliensis Pb01]
  misc_feature (34)..(360): NCBI GI: 238843316 Blast Desc: [Microsporum canis CBS 113480]
  misc_feature (37)..(357): NCBI GI: 33357703 Blast Desc: CND15p [Botryotinia fuckeliana]
  misc_feature (18)..(365): NCBI GI: 225677953 Blast Desc: [Paracoccidioides brasiliensis Pb03]
  misc_feature (113)..(365): NCBI GI: 189209888 Blast Desc: [Pyrenophora tritici-repentis Pt-1C-BFP] gi|187977369|gb|EDU43995.1| [Pyrenophora tritici-repentis Pt-1C-BFP]
  misc_feature (35)..(376): NCBI GI: 170113338 Blast Desc: mycorrhiza-upregulated terpene synthase metal binding domain protein [Laccaria bicolor S238N-H82] gi|164637230|gb|EDR01517.1| mycorrhiza-upregulated terpene metal
  misc_feature (40)..(357): NCBI GI: 242223106 Blast Desc: [Postia placenta Mad-698-R] gi|220723371|gb|EED77577.1| [Postia placenta Mad-698-R]
  misc_feature (50)..(320): SWISSPROT Homolog: EC 4.2.3.7 Pentalenene synthase
  misc_feature: Useful for introducing or modulating the production of volatile compounds
MAPDIDRIWTEHQPAAQDDVAADERKALVKRALGQKILVPDILSLMPAWPSDVQPDIDEINKEIDAWLPSVNVAEHKKAKHRARGNYTLLTAVYYPHCNKDKMLVLTQFLYWIFFWDDEIDTGGELTEDDEGTKKCCEETNKCIDDCLGPNPNYEPPPNSRGTVEMFYPILETLRAGLGPVATERLRLELHDYVNGVSRQQGVRQAEHLPNPWYHFQIRSDDVGVIPSITQNEFAMDFELPEYVRRHEAMEVIVLECTKLTILLNEILSLQKEFRVSQLENLVLLFMNTDKLSLQGAVEKVLGLIREHYAICVAAEEKLPWSKTDDKLNADIREYIRGCQRLATGTAYWSYYCERYFKHTQVNEKREVLLDLSYVE

SEQ ID NO: 988 - DNA, 1498 bp, Muscodor strobelii
  misc_feature: SGI EST ID NO. CUFF.2760.0
  misc_feature: Variant of the nucleotide sequence at SEQ ID NO 986
gttgactctgcctataactacctaggtactgaccagcgattcgtttaatattcacgaaatatcgaactacgtctcctaatacaactcgtttcaaccctttcagcattcggctttctagtctcataaaccccacatatccagaattaattcagtatggcaccagatattgatagaatatggacggaacaccaaccggccgcacaagacgatgtcgctgctgatgagagaaaagctctcgtcaagagagctctgggtcagaaaatcctggttcctgacatcttgtctttgatgccagcttggcctagtgatgttcaaccagatatcgacgagatcaacaaagaaattgatgcctggctgccgagtgtcaacgtcgcggaacacaagaaggctaaacacagagctcgcggcaactatacactgctgactgccgtatactacccccattgtaacaaagacaagatgctggtactcacacagtttctctattggatattcttctgggacgacgaaatcgacactggtggtgaactcaccgaagacgacgaaggcacaaaaaaatgctgcgaggagaccaacaaatgcattgatgattgcctgggacccaatccgaactacgagccaccaccaaactctcgtgggacggtagagatgttctatcccatcttggagactcttcgggctggtctagggcccgttgcaacagagcgtctacgattagagcttcatgactacgtcaatggcgtcagcagacaacagggtgttcgtcaggcggaacatcttccgaacccatggtatcacttccagatccgctcggatgacgttggcgtcatcccaagtatcacacagaacgaattcgcgatggactttgagctgcccgagtatgtccggcggcacgaggccatggaggtcatcgtattagaatgcaccaaactcactattcttcttaatgagatcttatctctgcagaaggaattccgagtttcgcaacttgagaacttagttctcctctttatgaacacagataagctgtcgcttcaaggcgcagtcgaaaaagtattaggcttgatccgtgagcactacgcgatttgtgttgcggccgaggagaagctgccgtggagcaagacagatgataaactgaatgccgatattcgagagtatattcgagggtgccaacgattggccactggtacggcctactggagctattactgcgaacgctacttcaaacatactcaagtcaatgaaaagcgtgaggtgcttcttgatctgtcgtatgtggagtaacatggagaatagcggggcgagtttctccgtttgatactgatatagtgtgttggaacttaaaaagatcatttctttctgtacacgtgtaaaagtgtcgcagtattcggtgtggtacatttgtcttgtagttactgggcacctatgagaatatatggaaggtgtacagttcgtcgactagttcgcaactatagctaaaaaacaatttcaatcattt

SEQ ID NO: 989 - DNA, 1647 bp, Muscodor strobelii
  misc_feature: SGI cDNA ID NO. 559916
  misc_feature: Encodes the peptide sequence at SEQ ID NO 990
atggcggaaaagtcgggcatcgacgcagtgacaccgacggtgacggaggccatcgtcgtgagcgagggaactggaaagacggctaatatcgagggcgccgtagccaaagaggtgcacaatgctgagttgtatgctgccttgcaagagtcgaagatcaacgcatggagcaaggaatcgcgaatgatctacctgtctattttcacggcttttctctgtgcttgtgccaacggctacgatggctctcttttgactggtatcatcgctatgaaacagttccaggatgtcttccatacaggcgacgacggacccacggtctcccttttgttctctctctacacggttggctcgatcgtcggtgctccattcgctgccattatctcggacaagaaaggacgtagaatctctatgttcattggtgcctgtatcatcattgtcggcgttgtcatcattagtagcagttctaccgtcccgcagtttgttgtggggagattcatacttgggtttggtattgccaacatgacagtgggcgcacctgcatacgccatcgaaattgctcctccacactggcgcgggcgagctacaggtttctataactgcggatggttcggcggatcgattccagcagcagcgattgttttcggaacgaattacatccaaagcaactggtcttggagactaccgctgctcctccaagcgtttgcttgcgtcattgtcattttcaccgtctggtttattcccgaaagtccacgatggttgattgccaacgggagaatcgacgaagctacagacttccttgtcaagtaccacggcaatggagatccaaactctcgccttgtgcttcttgaggtcgaagagatgcgggagcagattcgcatcgacggcgtagacaagaggccatttgactatcgccctctgcttctcacacacaacggtcgctggcgcttcgctcaagtcatcatgatttcggtttttggtcaattctctggtaatggactcggctatttcaacacggtaatcttcaagaacatcggtgttacctcagtctcacaacagctcggatacaatcttctcaactccgtcatttcagctgttggtgcgctcagtgccgtgtcgcaaacagacaagatgaatcgacgccctgttctgatctatggtaccctactttgtgctgcagcccttgccgtcaattcgggcctttctgctgaggtgaacaactctggcaacttctcaggatcgttcgccaagggagctcttgcttcatatttcctcttcaacgtcatcttctcttttacctacactcctctccaaggtgttataccagtggaggcaatggaaacgaccctgcgagcgaagggtttggccgcctcgggcgtattcgtcagtcttaccgggtttatcaaccaattcgctggaccgattgcgcttaaaaatattggatacaagtacatctatgtcttcgttggctgggacgttgtcgagtccattgcatggtacttcttcggtgtggagtctcagggccgtactctggaggagcttgactgggtctacaaccaaccaaaccctgtgaaggcttcgcagcaggtcgataagattattgttcaagccgacggaaaggtctcggagaaggtggttgaggactctgcttga

SEQ ID NO: 990 - protein, 548 aa, Muscodor strobelii
  misc_feature: SGI Peptide ID NO. 559916
  misc_feature (69)..(475): Pfam Id: PF07690 Pfam Desc: Major Facilitator Superfamily
  misc_feature (64)..(516): Pfam Id: PF00083 Pfam Desc: Sugar (and other) transporter
  misc_feature (10)..(544): NCBI GI: 85111152 Blast Desc: NCU00801 [Neurospora crassa OR74A] gi|28925537|gb|EAA34565.1| NCU00801 [Neurospora crassa OR74A]
  misc_feature (8)..(548): NCBI GI: 39963305 Blast Desc: MGG_09728 [Magnaporthe grisea 70-15] gi|145015491|gb|EDK00028.1| MGG_09728 [Magnaporthe grisea 70-15]
  misc_feature (8)..(544): NCBI GI: 116181240 Blast Desc: CHGG_01248 [Chaetomium globosum CBS 148.51] gi|88185545|gb|EAQ93013.1| CHGG_01248 [Chaetomium globosum CBS 148.51]
  misc_feature (38)..(541): NCBI GI: 171695684 Blast Desc: protein product [Podospora anserina] gi|170948084|emb|CAP60248.1| protein product [Podospora anserina]
  misc_feature (20)..(545): NCBI GI: 121700553 Blast Desc: MFS lactose permease, [Aspergillus clavatus NRRL 1] gi|119396684|gb|EAW07115.1| MFS lactose permease, [Aspergillus clavatus NRRL 1]
  misc_feature (10)..(547): NCBI GI: 255936523 Blast Desc: Pc13g08630 [Penicillium chrysogenum Wisconsin 54-1255] gi|211583908|emb|CAP91932.1| Pc13g08630 [Penicillium chrysogenum Wisconsin 54-1255]
  misc_feature (2)..(547): NCBI GI: 115387849 Blast Desc: conserved [Aspergillus terreus NIH2624] gi|114195514|gb|EAU37214.1| conserved [Aspergillus terreus NIH2624]
  misc_feature (13)..(548): NCBI GI: 67524713 Blast Desc: AN2814.2 [Aspergillus nidulans FGSC A4] gi|40743733|gb|EAA62920.1| AN2814.2 [Aspergillus nidulans FGSC A4] gi|259486261|tpe|CBF83959.1| TPA: MFS lactose permease, FGSC
  misc_feature (20)..(547): NCBI GI: 119494257 Blast Desc: MFS lactose permease, [Neosartorya fischeri NRRL 181] gi|119412186|gb|EAW22127.1| MFS lactose permease, [Neosartorya fischeri NRRL 181]
  misc_feature (23)..(547): NCBI GI: 70996688 Blast Desc: MFS lactose permease [Aspergillus fumigatus Af293] gi|66850734|gb|EAL91061.1| MFS lactose permease, [Aspergillus fumigatus Af293] gi|159131834|gb|EDP56947.1| MFS lactose A1163]
MAEKSGIDAVTPTVTEAIVVSEGTGKTANIEGAVAKEVHNAELYAALQESKINAWSKESRMIYLSIFTAFLCACANGYDGSLLTGIIAMKQFQDVFHTGDDGPTVSLLFSLYTVGSIVGAPFAAIISDKKGRRISMFIGACIIIVGVVIISSSSTVPQFVVGRFILGFGIANMTVGAPAYAIEIAPPHWRGRATGFYNCGWFGGSIPAAAIVFGTNYIQSNWSWRLPLLLQAFACVIVIFTVWFIPESPRWLIANGRIDEATDFLVKYHGNGDPNSRLVLLEVEEMREQIRIDGVDKRPFDYRPLLLTHNGRWRFAQVIMISVFGQFSGNGLGYFNTVIFKNIGVTSVSQQLGYNLLNSVISAVGALSAVSQTDKMNRRPVLIYGTLLCAAALAVNSGLSAEVNNSGNFSGSFAKGALASYFLFNVIFSFTYTPLQGVIPVEAMETTLRAKGLAASGVFVSLTGFINQFAGPIALKNIGYKYIYVFVGWDVVESIAWYFFGVESQGRTLEELDWVYNQPNPVKASQQVDKIIVQADGKVSEKVVEDSA

SEQ ID NO: 991 - DNA, 3272 bp, Muscodor strobelii
  misc_feature: SGI EST ID NO. CUFF.2902.0
  misc_feature: Variant of the nucleotide sequence at SEQ ID NO 989
ccgtgtgatatgcaggcactttgtcggtcgcaggaccattggaccaagacttgacaccagtagcgcggactacattcgtgttctcgattgacacttaccaaactggatgcgcggaggcgatcggcccgtccacccattttgggacccctagtcgtggggaaggttggggtagtggaggacgacacgagcattgttaaaaagcatctcaccaccgcgttgagttgaccctcgtacttgaggagtcatcgcggtgtgctctcaggacatatcgcgacattccgggtcattctatcgtgtttcttcgagggtatctatatccgacaaaatggcggaaaagtcgggcatcgacgcagtgacaccgacggtgacggaggccatcgtcgtgagcgagggaactggaaagacggctaatatcgagggcgccgtagccaaagaggtgcacaatgctgagttgtatgctgccttgcaagagtcgaagatcaacgcatggagcaaggaatcgcgaatgatctacctgtctattttcacggcttttctctgtgcttgtgccaacggctacgatggctctcttttgactggtatcatcgctatgaaacagttccaggatgtcttccatacaggcgacgacggacccacggtctcccttttgttctctctctacacggttggctcgatcgtcggtgctccattcgctgccattatctcggacaagaaaggacgtagaatctctatgttcattggtgcctgtatcatcattgtcggcgttgtcatcattagtagcagttctaccgtcccgcagtttgttgtggggagattcatacttgggtttggtattgccaacatgacagtgggcgcacctgcatacgccatcgaaattgctcctccacactggcgcgggcgagctacaggtttctataactgcggatggttcggcggatcgattccagcagcagcgattgttttcggaacgaattacatccaaagcaactggtcttggagactaccgctgctcctccaagcgtttgcttgcgtcattgtcattttcaccgtctggtttattcccgaaagtccacgatggttgattgccaacgggagaatcgacgaagctacagacttccttgtcaagtaccacggcaatggagatccaaactctcgccttgtgcttcttgaggtcgaagagatgcgggagcagattcgcatcgacggcgtagacaagaggccatttgactatcgccctctgcttctcacacacaacggtcgctggcgcttcgctcaagtcatcatgatttcggtttttggtcaattctctggtaatggactcggctatttcaacacggtaatcttcaagaacatcggtgttacctcagtctcacaacagctcggatacaatcttctcaactccgtcatttcagctgttggtgcgctcagtgccgtgtcgcaaacagacaagatgaatcgacgccctgttctgatctatggtaccctactttgtgctgcagcccttgccgtcaattcgggcctttctgctgaggtgaacaactctggcaacttctcaggatcgttcgccaagggagctcttgcttcatatttcctcttcaacgtcatcttctcttttacctacactcctctccaaggtgttataccagtggaggcaatggaaacgaccctgcgagcgaagggtttggccgcctcgggcgtattcgtcagtcttaccgggtttatcaaccaattcgctggaccgattgcgcttaaaaatattggatacaagtacatctatgtcttcgttggctgggacgttgtcgagtccattgcatggtacttcttcgggtgagcttatgcattcaccatacttgcatatcgcatactgacacatcttgcagtgtggagtctcagggccgtactctggaggagcttgactgggtctacaaccaaccaaaccctgtgaaggcttcgcagcaggtcgataagattattgttcaagccgacggaaaggtctcggagaaggtggttgaggactctgcttgaggtaaggctcaagcaagctcagggaatgcgagtgtagtcgtgttggctgcaagtcttaggcttcaggccagctgacgcaacttagtgtaggactcagtcgcgctatattatgatcttgcaaacaggatactcgtatcgttgaaactcaagcttagaccatctcgctcgcattgtcagttcgtaacttttcatgtttgtgacagatttgcgcctggacgcgtcggaccctaaacttagtaccaccaacaacattttataccgacgccacaagctctcgggccgatatagtatcggtgtcatgcaataaagcagacaggccggaccttgacaccatcggcaaatctgtcgaaactggaagagttgcatgattggtaaagcttcttatccgaaactaagcggtatgaccttgtacttcatctttcgcactagtccagaagcctcaggaagccttcgacactttcaccggtcgaaaggctcatttgctatgcatgggcagagccaacagcgactttgccgcagatgttgttgtctcagtacaacccacgcagtaacatagaattggacaggactccgtaatctatcaccaacgcctaggacatggccgccatgagtgcggctgaaagtgggggtgtggtcgtatgaagtaccgttcttaagtcgttaccgagaggctggtaccacctccgacggcatccttcaagccgtcagggccgttttagagcatgtgcatttcgaccaacacattgtcagcagttcgaccaacacattgtcagcatttctgcagcgcggagctcttccgcaaatcgatcgacttcgcgttcgagaaatctgtaccgatcatggctgcgacttgccaatcagatcagacaccttcgagcgttattgatatcataaatgcgcgatatatgcgcgatatatgcgagagggagcgccacggtgcggcccgcgagcgacatacgggcgtggcttgcacgttacgctgtccggacatggtaatccgcgacctcaacgtttctgaaatcgacgaaccgctgtagccgagcaagccgcagctcgcgcggctgtcatttgattattattctgcagatttcaccagttagtcgacgcgccgcatgcgtctttcagcttgctacctttttccgaggattatcgcagtcatttcgatgttgcctcgaacatcaggtaacgtgatcgacgaaggaagcagtgaggccatggcactggtcctagaatcctggcaaggcttt

SEQ ID NO: 992 - DNA, 894 bp, Muscodor strobelii
  misc_feature: SGI cDNA ID NO. 559917
  misc_feature: Encodes the peptide sequence at SEQ ID NO 993
atggcatatgataaaatccgtccttccgaagacgacagcagcttcaacgaggacttcgagtctcaacctctcactgccgctaaacttgctgactacgatccgccgacgtaccggagccgactagcgaagatcttcaccctgacacgagtatatgtcggatttcttcatctagtaatagtaggactactcttcagcaactattaccattacaagagcaacagactagccgacgaggtatcctggtcaccttatgacggccgcgtcaaatacgaggttcgaccgctagtcgtgggttcccatggttacaaccacgtatacggcggacccccgaatgaagcgcaagaaaaggcctgggacgacctaatcagaccggttttcttcaatgcatcacgcgaagacctggagagggccggcgagtcacttgagagcggtgtagagctccaagggggtggctatctcgcaactacatacgcccaccactaccttcactgcgtgcgcaatctccgcctcttcctctacaaggagcgttactaccccaacataagcgacgtgaactacccccatcttcaagcacatcttgaccattgtctcgaagcgctccgtaattctgtccagtgcaacgccaacatgggtgtttacacgttcaagtggccagaggtatggaccggtttacccgccccgaaatcgaactcggaagccgtttgcgccaattgggacagtgtccatgatttcgctatgcagcgccacctacctatgttacctggtgatgtccagcgtgcgaagtatgattgggacggcgaggacacccaggagggctccctgcccctcatcgtgaaagagatgcctgacaaggttgacgtctcggtcgggctgaaggtcccaccgccaccttag

SEQ ID NO: 993 - protein, 297 aa, Muscodor strobelii
  misc_feature: SGI Peptide ID NO. 559917
  misc_feature (78)..(248): NCBI GI: 169602899 Blast Desc: SNOG_04454 [Phaeosphaeria nodorum SN15] gi|160706284|gb|EAT88214.2| SNOG_04454 [Phaeosphaeria nodorum SN15]
  misc_feature (78)..(252): NCBI GI: 238501772 Blast Desc: conserved [Aspergillus flavus NRRL3357] gi|220692357|gb|EED48704.1| conserved [Aspergillus flavus NRRL3357]
  misc_feature (51)..(252): NCBI GI: 67900556 Blast Desc: AN7265.2 [Aspergillus nidulans FGSC A4] gi|40741946|gb|EAA61136.1| AN7265.2 [Aspergillus nidulans FGSC A4] gi|259483389|tpe|CBF78739.1| TPA: conserved [Aspergillus FGSC
  misc_feature (30)..(245): NCBI GI: 242804865 Blast Desc: conserved [Talaromyces stipitatus ATCC 10500] gi|218717807|gb|EED17228.1| conserved [Talaromyces stipitatus ATCC 10500]
  misc_feature (82)..(255): NCBI GI: 28881151 Blast Desc: [Neurospora crassa]
  misc_feature (13)..(253): NCBI GI: 116204067 Blast Desc: CHGG_09917 [Chaetomium globosum CBS 148.51] gi|88176045|gb|EAQ83513.1| CHGG_09917 [Chaetomium globosum CBS 148.51]
  misc_feature (103)..(252): NCBI GI: 169769306 Blast Desc: [Aspergillus oryzae RIB40] gi|83766981|dbj|BAE57121.1| protein product [Aspergillus oryzae]
  misc_feature (82)..(255): NCBI GI: 85079216 Blast Desc: NCU03374 [Neurospora crassa OR74A] gi|28917367|gb|EAA27073.1| [Neurospora crassa OR74A]
  misc_feature (108)..(271): NCBI GI: 115401678 Blast Desc: [Aspergillus terreus NIH2624] gi|114190368|gb|EAU32068.1| [Aspergillus terreus NIH2624]
  misc_feature (33)..(248): NCBI GI: 189204938 Blast Desc: conserved [Pyrenophora tritici-repentis Pt-1C-BFP] gi|187985903|gb|EDU51391.1| conserved [Pyrenophora tritici-repentis Pt-1C-BFP]
MAYDKIRPSEDDSSFNEDFESQPLTAAKLADYDPPTYRSRLAKIFTLTRVYVGFLHLVIVGLLFSNYYHYKSNRLADEVSWSPYDGRVKYEVRPLVVGSHGYNHVYGGPPNEAQEKAWDDLIRPVFFNASREDLERAGESLESGVELQGGGYLATTYAHHYLHCVRNLRLFLYKERYYPNISDVNYPHLQAHLDHCLEALRNSVQCNANMGVYTFKWPEVWTGLPAPKSNSEAVCANWDSVHDFAMQRHLPMLPGDVQRAKYDWDGEDTQEGSLPLIVKEMPDKVDVSVGLKVPPPP

SEQ ID NO: 994 - DNA, 1245 bp, Muscodor strobelii
  misc_feature: SGI EST ID NO. CUFF.2792.0
  misc_feature: Variant of the nucleotide sequence at SEQ ID NO 992
cttatttgccatttacacttaagaaccttttgacctggcagaaaagactatactcttaaaacacaaaggaagagcgccttgcacatcggtgcaacaacttggcaaacatggcatatgataaaatccgtccttccgaagacgacagcagcttcaacgaggacttcgagtctcaacctctcactgccgctaaacttgctgactacgatccgccgacgtaccggagccgactagcgaagatcttcaccctgacacgagtatatgtcggatttcttcatctagtaatagtaggactactcttcagcaactattaccattacaagagcaacagactagccgacgaggtatcctggtcaccttatgacggccgcgtcaaatacgaggttcgaccgctagtcgtgggttcccatggttacaaccacgtatacggcggacccccgaatgaagcgcaagaaaaggcctgggacgacctaatcagaccggttttcttcaatgcatcacgcgaagacctggagagggccggcgagtcacttgagagcggtgtagagctccaagggggtggctatctcgcaactacatacgcccaccactaccttcactgcgtgcgcaatctccgcctcttcctctacaaggagcgttactaccccaacataagcgacgtgaactacccccatcttcaagcacatcttgaccattgtctcgaagcgctccgtaattctgtccagtgcaacgccaacatgggtgtttacacgttcaagtggccagaggtatggaccggtttacccgccccgaaatcgaactcggaagccgtttgcgccaattgggacagtgtccatgatttcgctatgcagcgccacctacctatgttacctggtgatgtccagcgtgcgaagtatgattgggacggcgaggacacccaggagggctccctgcccctcatcgtgaaagagatgcctgacaaggttgacgtctcggtcgggctgaaggtcccaccgccaccttagatggaaacaacagactgtgaatccatggattctcgagacctccaggaagggcatgtgggccttttgaatactggcatggcagcgttatagtaagcaggttattggagcagtgcgcgaggaacgaactggctaagtgattgatatattcaatcgagtgcctaatgatgggacatttatgttacttgatgattagtactgggtagtagacctcacataaccacacaagatgattgcttattgaaag

SEQ ID NO: 995 - DNA, 861 bp, Muscodor strobelii
  misc_feature: SGI cDNA ID NO. 559918
  misc_feature: Reduced expression when VOC is produced
  misc_feature: Encodes the peptide sequence at SEQ ID NO 996
atggccgcaaagcaccatttcgactcaacgcccttctcccgaggagccatgtatgaaaaagttgtcggtgagacaagtacacgtgctgctgctgctgcactgtcacatttgcccctttcaacatacaactccggtaccaaaatccttgactcagcgtgcggacctggaatagtcacgaagcttcttctctctccatctcccgactacatatcaactccaggtctcccaattagccctccgcctgctgtagtaggcattgatctgtcgcagccaatgatcgaccagtacaatgccaatgctacctcgctcaaatggcacacagcagaatcgtatacacagtccgcgcaagatctcagccgattccctgataaccactttgacgctgtcattatgaattttggaattttcactctcctagacgcaacggctggaatgaaggagatacatcgcgtgcttaagcctggtggtcatgtattgatcacaacgtggaagacccggcgaccgcaagatctgatggccgatgtatacgcaatcattcgcccaggtgccgacaaaatcatggacctagatccaaagtggatgacagtgcaacatgtggtaaacattatgaaagagggcgggtttaatggggataagctgaagattgacgaggtcgcaccgatgtggtctcttggctcggcaaaagggattgtggacggacttagttcaccaatgttcactgcgcagtatcacaagggatggagcgacgaggaaataagcagatggggcattgaaattgagaagcagcttacggagaaggagaaacagactggggagatggagatggttgcttatatatatgttgctcagaaggaaatttag

SEQ ID NO: 996 - protein, 286 aa, Muscodor strobelii
  misc_feature: SGI Peptide ID NO. 559918
  misc_feature (49)..(160): Pfam Id: PF08241 Pfam Desc: Methyltransferase domain
  misc_feature (49)..(158): Pfam Id: PF08242 Pfam Desc: Methyltransferase domain
  misc_feature (121)..(159): Pfam Id: PF01209 Pfam Desc: ubiE/COQ5 methyltransferase family
  misc_feature (12)..(285): NCBI GI: 256728116 Blast Desc: NECHADRAFT_87589 [Nectria haematococca mpVI 77-13-4]
  misc_feature (3)..(284): NCBI GI: 256731860 Blast Desc: NECHADRAFT_40894 [Nectria haematococca mpVI 77-13-4]
  misc_feature (11)..(283): NCBI GI: 46137641 Blast Desc: FG10336.1 [Gibberella zeae PH-1]
  misc_feature (13)..(286): NCBI GI: 156052535 Blast Desc: SS1G_06433 [Sclerotinia sclerotiorum 1980] gi|154704213|gb|EDO03952.1| SS1G_06433 [Sclerotinia sclerotiorum 1980]
  misc_feature (13)..(271): NCBI GI: 156057603 Blast Desc: SS1G_04533 [Sclerotinia sclerotiorum 1980] gi|154702318|gb|EDO02057.1| SS1G_04533 [Sclerotinia sclerotiorum 1980]
  misc_feature (5)..(251): NCBI GI: 256723977 Blast Desc: NECHADRAFT_86261 [Nectria haematococca mpVI 77-13-4]
  misc_feature (6)..(284): NCBI GI: 256725322 Blast Desc: NECHADRAFT_45683 [Nectria haematococca mpVI 77-13-4]
  misc_feature (1)..(266): NCBI GI: 46117997 Blast Desc: FG04675.1 [Gibberella zeae PH-1]
  misc_feature (15)..(266): NCBI GI: 169610868 Blast Desc: SNOG_08542 [Phaeosphaeria nodorum SN15] gi|111062590|gb|EAT83710.1| SNOG_08542 [Phaeosphaeria nodorum SN15]
  misc_feature (47)..(162): NCBI GI: 281203727 Blast Desc: PPL_08567 [Polysphondylium pallidum PN500]
  misc_feature (18)..(208): SWISSPROT Homolog: EC 2.1.1.103 Phosphoethanolamine N-methyltransferase
  misc_feature: Useful for introducing or modulating the production of volatile compounds
MAAKHHFDSTPFSRGAMYEKVVGETSTRAAAAALSHLPLSTYNSGTKILDSACGPGIVTKLLLSPSPDYISTPGLPISPPPAVVGIDLSQPMIDQYNANATSLKWHTAESYTQSAQDLSRFPDNHFDAVIMNFGIFTLLDATAGMKEIHRVLKPGGHVLITTWKTRRPQDLMADVYAIIRPGADKIMDLDPKWMTVQHVVNIMKEGGFNGDKLKIDEVAPMWSLGSAKGIVDGLSSPMFTAQYHKGWSDEEISRWGIEIEKQLTEKEKQTGEMEMVAYIYVAQKEI

SEQ ID NO: 997 - DNA, 1068 bp, Muscodor strobelii
  misc_feature: SGI EST ID NO. CUFF.2798.0
  misc_feature: Variant of the nucleotide sequence at SEQ ID NO 995
cacaaatgtcattaaagccagctcatttgttcacaaccaccacacattgccgacgcatcttcgcaagccaatcttatctgcccagtgctcttcacaaaatggccgcaaagcaccatttcgactcaacgcccttctcccgaggagccatgtatgaaaaagttgtcggtgagacaagtacacgtgctgctgctgctgcactgtcacatttgcccctttcaacatacaactccggtaccaaaatccttgactcagcgtgcggacctggaatagtcacgaagcttcttctctctccatctcccgactacatatcaactccaggtctcccaattagccctccgcctgctgtagtaggcattgatctgtcgcagccaatgatcgaccagtacaatgccaatgctacctcgctcaaatggcacacagcagaatcgtatacacagtccgcgcaagatctcagccgattccctgataaccactttgacgctgtcattatgaattttggaattttcactctcctagacgcaacggctggaatgaaggagatacatcgcgtgcttaagcctggtggtcatgtattgatcacaacgtggaagacccggcgaccgcaagatctgatggccgatgtatacgcaatcattcgcccaggtgccgacaaaatcatggacctagatccaaagtggatgacagtgcaacatgtggtaaacattatgaaagagggcgggtttaatggggataagctgaagattgacgaggtcgcaccgatgtggtctcttggctcggcaaaagggattgtggacggacttagttcaccaatgttcactgcgcagtatcacaagggatggagcgacgaggaaataagcagatggggcattgaaattgagaagcagcttacggagaaggagaaacagactggggagatggagatggttgcttatatatatgttgctcagaaggaaatttagacagattgataagccaaatcacaataccatgatcacaattcctgtgcattagttgttatgtaacatattatcatctgtattgttagaacggtgttgcgtctagatgcca

SEQ ID NO: 998 - DNA, 657 bp, Muscodor strobelii
  misc_feature: SGI cDNA ID NO. 559919
  misc_feature: Encodes the peptide sequence at SEQ ID NO 999
atgtggagtaaaataaccaaagacaccgcagaaggccggggcgaacctattgtcaagactgacgcgcttgacggcaatgactctaaatatgagaaagccaagaagattgcagacgaggacgatgaagacggtaagccaaccggcacaaccaatattccattgcaaacgccctctcagaacgcgtcccagtctttccctaaccctctgattgctacacctgcaggatatgcgcacgacatagacaatatcgcttcgcaccccgtgagcactcttgctgcttctagcagctttcccgtccacccagccagcaacaactcggctcctgaacactcagccccctcgacttcatctgggccggactcttctttctccctccctccgaattgctatctctattcaggcagggcatacgatataaatactaatacgttgatgccggaagtcttccccccgactggatcaactgttgtgactgagcctatcaatagagcaagcgcctacgatcatttcccacaggacaacaatgctggtgtaggcaataatacaatggcaggagggcagcgattgcttcattcatggaacaacccgcaaacttcggcgctcgggacggacttgctgtacccgcccttagctatcaccaagacggcagtcagttag

SEQ ID NO: 999 - protein, 218 aa, Muscodor strobelii
  misc_feature: SGI Peptide ID NO. 559919
MWSKITKDTAEGRGEPIVKTDALDGNDSKYEKAKKIADEDDEDGKPTGTTNIPLQTPSQNASQSFPNPLIATPAGYAHDIDNIASHPVSTLAASSSFPVHPASNNSAPEHSAPSTSSGPDSSFSLPPNCYLYSGRAYDINTNTLMPEVFPPTGSTVVTEPINRASAYDHFPQDNNAGVGNNTMAGGQRLLHSWNNPQTSALGTDLLYPPLAITKTAVS

SEQ ID NO: 1000 - DNA, 280 bp, Muscodor strobelii
  misc_feature: SGI EST ID NO. CUFF.2804.0
  misc_feature: Variant of the nucleotide sequence at SEQ ID NO 998
gcgcctacgatcatttcccacaggacaacaatgctggtgtaggcaataatacaatggcaggagggcagcgattgcttcattcatggaacaacccgcaaacttcggcgctcgggacggacttgctgtacccgcccttagctatcaccaagacggcagtcagttagagggctaggaagacagcctcgacgacgacaaccacgcattggactacagcctcctcgacctccgactgtttgccaattgaagccagcgcagatagctcatggcaggagaactttat

SEQ ID NO: 1001 - DNA, 987 bp, Muscodor strobelii
  misc_feature: SGI cDNA ID NO. 559920
  misc_feature: Encodes the peptide sequence at SEQ ID NO 1002
atggtgcttcgcaagacaacttccagcaagaactcaacaggcaagtggcccatggttctgcctactgcaatcaaactttggaaagatttcaatcttgacatactcaacgagagctacggtcatgttctcgattacgagattccagttgagcggcttgcgggactgccacgcgcggaagatgtccttcaaggaattcggattaatagaccagatgacatcctgcgtatgatcgagtggaatgaccagatactgcgcccgactctagagtttgcaaaacagcacatggccctggaacctggtgtgcgcctccagcatgttgtctctagagtcggcaattctccctattcgcgcccttccgatggtggaacctgggtacggattgaccaccgcgtcgcactcgatacctacccgctacctcaactactggttggcatcggccggccaagctccaagttccaaggccgcgcgctactcaatagaccgaagcccacgtcgggaaatttatggccgctacgacaggtcgcaaacttgtgcgagaggcacgacacgcgttatggatacatagtgacggacgaagacctcgtagtctgttgcttccaaaagattgaagattcagatccagatcaaacgtacatggaagtggcgatgatgccagttccatggacgcgacacagcgaggcacaattgacaactgacctcgcgctatggtggcttgccatgttggccctatcggcgccgcatcaccgctctctcttgaatggcgccgacgtggtagctattagcgactgggaattgcgtcgaactgaggagggcgactggacaccatcaccggggaaccctgccgccttcacagctggggctggactgaatatggacctaaactttaatttcaacgaggcacttgactggactctcgacactgcgcttcaggcttcagacgttgtcaataacgcgaacgtacatcccgtgaatcgtgaacaagaataa

SEQ ID NO: 1002 - protein, 328 aa, Muscodor strobelii
  misc_feature: SGI Peptide ID NO. 559920
MVLRKTTSSKNSTGKWPMVLPTAIKLWKDFNLDILNESYGHVLDYEIPVERLAGLPRAEDVLQGIRINRPDDILRMIEWNDQILRPTLEFAKQHMALEPGVRLQHVVSRVGNSPYSRPSDGGTWVRIDHRVALDTYPLPQLLVGIGRPSSKFQGRALLNRPKPTSGNLWPLRQVANLCERHDTRYGYIVTDEDLVVCCFQKIEDSDPDQTYMEVAMMPVPWTRHSEAQLTTDLALWWLAMLALSAPHHRSLLNGADVVAISDWELRRTEEGDWTPSPGNPAAFTAGAGLNMDLNFNFNEALDWTLDTALQASDVVNNANVHPVNREQE

SEQ ID NO: 1003 - DNA, 1212 bp, Muscodor strobelii
  misc_feature: SGI cDNA ID NO. 559921
  misc_feature: Elevated expression when VOC is produced
  misc_feature: Encodes the peptide sequence at SEQ ID NO 1004
atgcagcctccacaaggaagattctatcccgcactccttcttactgttgagaacactatgtacccggattggccgcgatctgacgcagacctagtgccgctgccactatgtgctggccctaagctgagaccgtttaacttccagggcccgcaaaacatcgagtttcttgagcacgccggcgaagggcgccactcccatgtgttcaaagtgaaaatccacgagcagatctatgcactcaagctttttcgattcgtgtgggatcatgattgggtaggtccatgtcgttatgagggagacgcaacagatgacctcgacagtgtgcgcgcctgctacgaatactccgaaccattctgctgcgaatgtcgcgccttcggtcgtcttcaagaagccggacatgaggagctcgccatccaatgttttggctatgtgctgctaggggaagaccacgagcgcgctatacacgaaaagttccctgacgtcagctttttaggcaacatcgaggttggcggggactgtgacgagttcaggaaattgcggggacgctttccaggccgcgatggccgagaaccaccgattcgaggcattataaagacgttcatagcccctaaagaagaagaactcgagttgaatactgctgttgctagaaaggtacttggagatattggtcgatttcagcagcttgggatcttccgccttgacatgggcgttcggcagattctgggtggcaagcttgctgatctgagccaggccatcactacaccgcactttgtatcaacacctgagctcaacccgcgtctctcgcgtgcaatgcagcgaaaaatggaacgcgaaacacatataatcgctggggatgactatttatactttgatgaaatgatagaggaatggaatgcagaacatggggacgaaaagggcacaattgacgtatccgcattcccgagcggtacgggcttaccagtacttcgacactacgaactgaggaacaagaaatttagtgagcgtgtatttaccttcgttgatccgaggagatataattggaagtggaagcccagaggcatacatcaagatcggcgtcgccgactacgagccaagcctccgctctggatctacctttgcggcgaggaaaagggctgggacttagagcgtgatgtcgtgtatggtccatcgatgagatgggaatgcagagagggatttatttttccggcggactga

SEQ ID NO: 1004 - protein, 403 aa, Muscodor strobelii
  misc_feature: SGI Peptide ID NO. 559921
  misc_feature (20)..(403): NCBI GI: 256725568 Blast Desc: NECHADRAFT_81415 [Nectria haematococca mpVI 77-13-4]
  misc_feature (41)..(255): NCBI GI: 116194212 Blast Desc: [Chaetomium globosum CBS 148.51] gi|88179617|gb|EAQ87085.1| [Chaetomium globosum CBS 148.51]
  misc_feature (33)..(255): NCBI GI: 116200502 Blast Desc: [Chaetomium globosum CBS 148.51] gi|88175510|gb|EAQ82978.1| [Chaetomium globosum CBS 148.51]
  misc_feature (41)..(255): NCBI GI: 116194294 Blast Desc: [Chaetomium globosum CBS 148.51] gi|88179658|gb|EAQ87126.1| [Chaetomium globosum CBS 148.51]
  misc_feature (31)..(297): NCBI GI: 256732290 Blast Desc: NECHADRAFT_93838 [Nectria haematococca mpVI 77-13-4]
  misc_feature (29)..(277): NCBI GI: 171677145 Blast Desc: protein product [Podospora anserina] gi|170936640|emb|CAP61299.1| protein product [Podospora anserina]
  misc_feature (30)..(298): NCBI GI: 256724494 Blast Desc: NECHADRAFT_88133 [Nectria haematococca mpVI 77-13-4]
  misc_feature (31)..(297): NCBI GI: 256722232 Blast Desc: NECHADRAFT_52380 [Nectria haematococca mpVI 77-13-4]
  misc_feature (37)..(257): NCBI GI: 256730012 Blast Desc: NECHADRAFT_82569 [Nectria haematococca mpVI 77-13-4]
  misc_feature (29)..(327): NCBI GI: 46134137 Blast Desc: FG09208.1 [Gibberella zeae PH-1]
  misc_feature: Useful for introducing or modulating the production of volatile compounds
MQPPQGRFYPALLLTVENTMYPDWPRSDADLVPLPLCAGPKLRPFNFQGPQNIEFLEHAGEGRHSHVFKVKIHEQIYALKLFRFVWDHDWVGPCRYEGDATDDLDSVRACYEYSEPFCCECRAFGRLQEAGHEELAIQCFGYVLLGEDHERAIHEKFPDVSFLGNIEVGGDCDEFRKLRGRFPGRDGREPPIRGIIKTFIAPKEEELELNTAVARKVLGDIGRFQQLGIFRLDMGVRQILGGKLADLSQAITTPHFVSTPELNPRLSRAMQRKMERETHIIAGDDYLYFDEMIEEWNAEHGDEKGTIDVSAFPSGTGLPVLRHYELRNKKFSERVFTFVDPRRYNWKWKPRGIHQDRRRRLRAKPPLWIYLCGEEKGWDLERDVVYGPSMRWECREGFIFPAD

SEQ ID NO: 1005 - DNA, 1528 bp, Muscodor strobelii
  misc_feature: SGI EST ID NO. CUFF.2811.0
  misc_feature: Variant of the nucleotide sequence at SEQ ID NO 1003
gcaggtcaaggcattcacgtgatctacatgccgccgcgtaacagcagtgagcatgcttgatgactaataaattcctcccaccttcttcgtcgtgttcacattccattctgtttccactcccacatcatcctcattcctttcaatattaattggcatccgaccatatccactcatttaaaccacatgcagcctccacaaggaagtgccgctgccactatgtgctggccctaagctgagaccgtttaacttccagggcccgcaaaacatcgagtttcttgagcacgccggcgaagggcgccactcccatgtgttcaaagtgaaaatccacgagcagatctatgcactcaagctttttcgattcgtgtgggatcatgattgggtaggtccatgtcgttatgagggagacgcaacagatgacctcgacagtgtgcgcgcctgctacgaatactccgaaccattctgctgcgaatgtcgcgccttcggtcgtcttcaagaagccggacatgaggagctcgccatccaatgttttggctatgtgctgctaggggaagaccacgagcgcgctatacacgaaaagttccctgacgtcagctttttaggcaacatcgaggttggcggggactgtgacgagttcaggaaattgcggggacgctttccaggccgcgatggccgagaaccaccgattcgaggcattataaagacgttcatagcccctaaagaagaagaactcgagttgaatactgctgttgctagaaaggtacttggagatattggtcgatttcagcagcttgggatcttccgccttgacatgggcgttcggcagattctgggtggcaagcttgctgatctgagccaggccatcactacaccgcactttgtatcaacacctgagctcaacccgcgtctctcgcgtgcaatgcagcgaaaaatggaacgcgaaacacatataatcgctggggatgactatttatactttgatgaaatgatagaggaatggaatgcagaacatggggacgaaaagggcacaattgacgtatccgcattcccgagcggtacgggcttaccagtacttcgacactacgaactgaggaacaagaaatttagtgagcgtgtatttaccttcgttgatccgaggagatataattggaagtggaagcccagaggcatacatcaagatcggcgtcgccgactacgagccaagcctccgctctggatctacctttgcggcgaggaaaagggctgggacttagagcgtgatgtcgtgtatggtccatcgatgagatgggaatgcagagagggatttatttttccggcggactgacacatggcgtcttgtagactattctagcgaagcgatataatgggtaggggtgaaaaggggaaactctacctttgcccaaattgctatggcggagtacaagacaaagcaaatacatcactcaccgcttctcgctatgatcatctcagccttcatctggccttctaagaacctccattacctagaattaaataattcgtgagacagcgg

SEQ ID NO: 1006 - DNA, 1506 bp, Muscodor strobelii
  misc_feature: SGI cDNA ID NO. 559922
  misc_feature: Elevated expression when VOC is produced
  misc_feature: Encodes the peptide sequence at SEQ ID NO 1007
atggctgcggcaatccgggttaccccaagcgctgcgacacgcgcagtgagtctgctcaagacagtgcagtacactcatccacccaattgcccgtgtcactcgaatccgggatatcatcagcgccatgctcggccccagctcgatgcctatgcccggcgaacccagagcatcggaagacgtgggttcgcctcgccacttgatgcctcccagcagaaggaatatgccttcgaaatggctgcatcgtcaattcgatttggtcctggtgtcactcaagaggtcggcatggaccttgcgaacatgggtgccaggaaagtctgtgtcgtgacggaccccactgtcaggaaactcaccgctcttaagcaagtggaggaagctctgtcgagagagggcattcagtacgagatcttcgataaagtccgagtcgagcccaaggatagctccatcaaggaagccatcgctttcgccaagccctatggcgcagacgccttcttggccgttggtggtggctcggtcatggacacagccaagctcatgaacttatacaccgagtacccagatgctgactttctagacttcgtgaatgcgcctcttggaaaaggccgaccgattgataagaagttgaagcctctcattgccattcctacaaccgccggtaccggaagcgagactactggaacagccatcttcgacctcgttgcgaagaaagctaagacaggtattgcgcacaggaatttgaagccgacgctaggcatatgcgatcctcttaacaccaagactatgcccgccgcagttaaggcgagttccggcttagatgtcttgtgccactccttggagtcctggacagccatcccattcaatgagcgaacaccgcgaccctccaatcccatcatgaggcctgcgtatcagggcgcaaaccccatcagcgacatcttctccttgaacgcattgcgtgcaacagtcaaataccttccacgatcggtcaaggaccccgaggattcagaggctcaaagcgagatgcttctcgctgccactcttgcaggggtcggctttggcaacgcaggcgtccacttgtgccacggcatgtcctaccctatctcgggtcaaaacaaggaatacaaacacgcaggctacgatgtcacaacgccaatcatcccccacggcgtttcggtagcggtcacagcaccagccgtcttccgattcaccgcagcctcaaacccagagcgccatcttgctgccgctgaagcttttggagttgatatcacgaacgtcaagcgggaagacgctggcgctgccctcgcggatgccgtcacgaagctcctcgctgaccttggtgatcagcccgctggtctgaaggctcttggatttggtagtgagcatatcgaggatctcgtcgaaggtaccatcccccaggctcgcgtccttatgttggctccgggattggcgaaggaacttgagcaggagagggatcagttgaggaggctcttcgaggagtctatgacgcattga

SEQ ID NO: 1007 - protein, 501 aa, Muscodor strobelii
  misc_feature: SGI Peptide ID NO. 559922
  misc_feature (80)..(484): Pfam Id: PF00465 Pfam Desc: Iron-containing alcohol dehydrogenase
  misc_feature (81)..(278): Pfam Id: PF00465 Pfam Desc: Iron-containing alcohol dehydrogenase
  misc_feature (303)..(454): Pfam Id: PF00465 Pfam Desc: Iron-containing alcohol dehydrogenase
  misc_feature (1)..(501): NCBI GI: 46134211 Blast Desc: FG09245.1 [Gibberella zeae PH-1]
  misc_feature (1)..(501): NCBI GI: 256727748 Blast Desc: [Nectria haematococca mpVI 77-13-4]
  misc_feature (2)..(501): NCBI GI: 116202743 Blast Desc: CHGG_09256 [Chaetomium globosum CBS 148.51] gi|88177774|gb|EAQ85242.1| CHGG_09256 [Chaetomium globosum CBS 148.51]
  misc_feature (1)..(501): NCBI GI: 164426737 Blast Desc: NCU04078 [Neurospora crassa OR74A] gi|157071455|gb|EAA28457.2| NCU04078 [Neurospora crassa OR74A]
  misc_feature (1)..(501): NCBI GI: 39943626 Blast Desc: MGG_03824 [Magnaporthe grisea 70-15] gi|145014511|gb|EDJ99079.1| MGG_03824 [Magnaporthe grisea 70-15]
  misc_feature (4)..(501): NCBI GI: 70989467 Blast Desc: Fe-containing alcohol dehydrogenase [Aspergillus fumigatus Af293] gi|66847214|gb|EAL87545.1| Fe-containing alcohol dehydrogenase, [Aspergillus fumigatus Af293] Fe-containing A1163]
  misc_feature (1)..(501): NCBI GI: 238487696 Blast Desc: Fe-containing alcohol dehydrogenase, [Aspergillus flavus NRRL3357] gi|220699965|gb|EED56304.1| Fe-containing alcohol dehydrogenase, [Aspergillus flavus NRRL3357]
  misc_feature (1)..(501): NCBI GI: 169769967 Blast Desc: [Aspergillus oryzae RIB40] gi|83767312|dbj|BAE57451.1| protein product [Aspergillus oryzae]
  misc_feature (1)..(501): NCBI GI: 171682524 Blast Desc: protein product [Podospora anserina] gi|170941221|emb|CAP66871.1| protein product [Podospora anserina]
  misc_feature (5)..(501): NCBI GI: 242764227 Blast Desc: Fe-containing alcohol dehydrogenase, [Talaromyces stipitatus ATCC 10500] gi|218723923|gb|EED23340.1| Fe-containing alcohol dehydrogenase, [Talaromyces stipitatus ATCC 10500]
  misc_feature (1)..(499): SWISSPROT Homolog: EC 1.1.99.24 Hydroxyacid-oxoacid transhydrogenase
  misc_feature: Useful for introducing or modulating the production of volatile compounds
MAAAIRVTPSAATRAVSLLKTVQYTHPPNCPCHSNPGYHQRHARPQLDAYARRTQSIGRRGFASPLDASQQKEYAFEMAASSIRFGPGVTQEVGMDLANMGARKVCVVTDPTVRKLTALKQVEEALSREGIQYEIFDKVRVEPKDSSIKEAIAFAKPYGADAFLAVGGGSVMDTAKLMNLYTEYPDADFLDFVNAPLGKGRPIDKKLKPLIAIPTTAGTGSETTGTAIFDLVAKKAKTGIAHRNLKPTLGICDPLNTKTMPAAVKASSGLDVLCHSLESWTAIPFNERTPRPSNPIMRPAYQGANPISDIFSLNALRATVKYLPRSVKDPEDSEAQSEMLLAATLAGVGFGNAGVHLCHGMSYPISGQNKEYKHAGYDVTTPIIPHGVSVAVTAPAVFRFTAASNPERHLAAAEAFGVDITNVKREDAGAALADAVTKLLADLGDQPAGLKALGFGSEHIEDLVEGTIPQARVLMLAPGLAKELEQERDQLRRLFEESMTH

SEQ ID NO: 1008 - DNA, 2010 bp, Muscodor strobelii
  misc_feature: SGI EST ID NO. CUFF.2817.0
  misc_feature: Variant of the nucleotide sequence at SEQ ID NO 1006
ctttattcacacgcctcggtgcttgcaggacctgattagacccaattgcttcattctggcaaatactgtcaccgatcctgtccgaaactatagacgagatctgaattcttgaagctttgtccgtaagatggctgcggcaatccgggttaccccaagcgctgcgacacgcgcagtgagtctgctcaagacagtgcagtacactcatccacccaattgcccgtgtcactcgaatccgggatatcatcagcgccatgctcggccccagctcgatgcctatgcccggcgaacccagagcatcggaagacgtgggttcgcctcgccacttgatgcctcccagcagaaggaatatgccttcgaaatggctgcatcgtcaattcgatttggtcctggtgtcactcaagaggtcggcatggaccttgcgaacatgggtgccaggaaagtctgtgtcgtgacggaccccactgtcaggaaactcaccgctcttaagcaagtggaggaagctctgtcgagagagggcattcagtacgagatcttcgataaagtccgagtcgagcccaaggatagctccatcaaggaagccatcgctttcgccaagccctatggcgcagacgccttcttggccgttggtggtggctcggtcatggacacagccaagctcatgaacttatacaccgagtacccagatgctgactttctagacttcgtgaatgcgcctcttggaaaaggccgaccgattgataagaagttgaagcctctcattgccattcctacaaccgccggtaccggaagcgagactactggaacagccatcttcgacctcgttgcgaagaaagctaagacaggtattgcgcacaggaatttgaagccgacgctaggcatatgcgatcctcttaacaccaagactatgcccgccgcagttaaggcgagttccggcttagatgtcttgtgccactccttggagtcctggacagccatcccattcaatgagcgaacaccgcgaccctccaatcccatcatgaggcctgcgtatcagggcgcaaaccccatcagcgacatcttctccttgaacgcattgcgtgcaacagtcaaataccttccacgatcggtcaaggaccccgaggattcagaggctcaaagcgagatgcttctcgctgccactcttgcaggggtcggctttggcaacgcaggcgtccacttgtgccacggcatgtcctaccctatctcgggtcaaaacaaggaatacaaacacgcaggctacgatgtcacaacgccaatcatcccccacggcgtttcggtagcggtcacagcaccagccgtcttccgattcaccgcagcctcaaacccagagcgccatcttgctgccgctgaagcttttggagttgatatcacgaacgtcaagcgggaagacgctggcgctgccctcgcggatgccgtcacgaagctcctcgctgaccttggtgatcagcccgctggtctgaaggctcttggatttggtagtgagcatatcgaggatctcgtcgaaggtaccatcccccaggctcgcgtccttatgttggctccgggattggcgaaggaacttgagcaggagagggatcagttgaggaggctcttcgaggagtctatgacgcattgataggtaacttcattctcggcattgtcccaatgtgatttgacgaaaacacaagcgttgcatccgcggctctgatctcgggacgtatatatgtatagccggccgcctttcagtgtaaatacgtcatcgtcgactttatttcgtatgttctctgtcgcatgctgaatgacacgagtcttaatgaatgaaatgatgcttccactcgagaattattccggggatagctggtctcagatagtgatcggcaccgtaaagtgggagagtggatgtcaatcagctggtgtactcaaaataacctaatgaaagtgaggttagctgcgatgcttggacagcgccaagtttgtgatattgagagcaggaatgaataccgtgcattgcta

SEQ ID NO: 1009 - DNA, 1140 bp, Muscodor strobelii
  misc_feature: SGI cDNA ID NO. 559923
  misc_feature: Encodes the peptide sequence at SEQ ID NO 1010
atgattaagaaaacgtgctacggcgtcgagtgcgacaaggaggctggcacattgcagtgcccaacatgcctcaaacttggcgtcaaaggcagttacttctgctctcaagagtgctttcagagaagctgggctacgcacaaaacggcgcataaggcacaaaacacgactggatcttacaacccgttcccgtcttacccgtacaccggctcggtgcgaccgttctacccactttcaccgcgaagacccgttccgaagactattagacaccctgattggtccgagactggtatcccagcgcgtgagaaccgcttgaacagaaccaaatgggagatactggacacagaaggccaagaagccatgcggaaggtctgtcggttggcccgagaggtacttgacatcacggccgcagcggtaagaccaggcgtgacaacggattatctggatgagatatgtcacaatgcttgcgtggaacgagagtcttatccgtcccccctgaactacaatcgcttccccaagtcgatctgtacgtctccgaacgaggtcgtttgccatggcatccccgaccagcgcattctccttgacggcgacattctcaacctcgacgtgtcgctgtaccacggcggataccacgcagatctgaacgagacatactatgtcggggacaaagcaatggcagacgcggatgccgtcagactcgtcgagacgacacgagaagctcttgacaaggccatcgccttagtgaagccaggcttaccgatccgcgactttggaaaggtaatcgagaagcatgcgacttcacgcaacctattcgtgctcaagaattggggcggccatggaatcaactccgagtttcatcctcctccgtggatccctcactatgcgaagaacaagacacctggcgtctgcaagcctggtatgacattcacaatcgagcctatcttggcgttgggtgctagtcgagaagtgtactggccagataactggacgaatgtcactgttgatggcaaatggactgcgcagttcgagcacactcttcttgtcaccgagacaggagtcgaggttttgaccgctcgactggagaattctccgggtggaccaatactcataccagaagcgaccgatcaaaatgcaactacatga

SEQ ID NO: 1010 - protein, 379 aa, Muscodor strobelii
  misc_feature: SGI Peptide ID NO. 559923
  misc_feature (118)..(357): Pfam Id: PF00557 Pfam Desc: metallopeptidase family M24
  misc_feature (3)..(377): NCBI GI: 70983263 Blast Desc: methionine aminopeptidase, type I [Aspergillus fumigatus Af293] gi|66844784|gb|EAL85121.1| methionine aminopeptidase, type I, [Aspergillus fumigatus Af293] methionine
  misc_feature (6)..(377): NCBI GI: 255930753 Blast Desc: Pc12g00290 [Penicillium chrysogenum Wisconsin 54-1255] gi|211581552|emb|CAP79656.1| Pc12g00290 [Penicillium chrysogenum Wisconsin 54-1255]
  misc_feature (3)..(377): NCBI GI: 238500213 Blast Desc: methionine aminopeptidase, type I, [Aspergillus flavus NRRL3357] gi|220693094|gb|EED49440.1| methionine aminopeptidase, type I, [Aspergillus flavus NRRL3357]
  misc_feature (3)..(377): NCBI GI: 169779551 Blast Desc: [Aspergillus oryzae RIB40] gi|83772979|dbj|BAE63107.1| protein product [Aspergillus oryzae]
  misc_feature (34)..(377): NCBI GI: 119483540 Blast Desc: methionine aminopeptidase [Neosartorya fischeri NRRL 181] gi|119409829|gb|EAW19776.1| methionine aminopeptidase [Neosartorya fischeri NRRL 181]
  misc_feature (3)..(374): NCBI GI: 239613122 Blast Desc: methionine aminopeptidase 1 [Ajellomyces dermatitidis ER-3]
  misc_feature (3)..(374): NCBI GI: 261191039 Blast Desc: methionine aminopeptidase 1 [Ajellomyces dermatitidis SLH14081] gi|239590972|gb|EEQ73553.1| methionine aminopeptidase 1 [Ajellomyces dermatitidis SLH14081]
  misc_feature (56)..(377): NCBI GI: 115491769 Blast Desc: methionine aminopeptidase 1 precursor [Aspergillus terreus NIH2624] gi|114197372|gb|EAU39072.1| methionine aminopeptidase 1 precursor [Aspergillus terreus NIH2624]
  misc_feature (3)..(371): NCBI GI: 261355368 Blast Desc: methionine aminopeptidase [Verticillium albo-atrum VaMs.102]
  misc_feature (57)..(374): NCBI GI: 67537770 Blast Desc: AN5055.2 [Aspergillus nidulans FGSC A4] gi|40740859|gb|EAA60049.1| AN5055.2 [Aspergillus nidulans FGSC A4]
  misc_feature (1)..(367): SWISSPROT Homolog: EC 3.4.11.18 Methionyl aminopeptidase
MIKKTCYGVECDKEAGTLQCPTCLKLGVKGSYFCSQECFQRSWATHKTAHKAQNTTGSYNPFPSYPYTGSVRPFYPLSPRRPVPKTIRHPDWSETGIPARENRLNRTKWEILDTEGQEAMRKVCRLAREVLDITAAAVRPGVTTDYLDEICHNACVERESYPSPLNYNRFPKSICTSPNEVVCHGIPDQRILLDGDILNLDVSLYHGGYHADLNETYYVGDKAMADADAVRLVETTREALDKAIALVKPGLPIRDFGKVIEKHATSRNLFVLKNWGGHGINSEFHPPPWIPHYAKNKTPGVCKPGMTFTIEPILALGASREVYWPDNWTNVTVDGKWTAQFEHTLLVTETGVEVLTARLENSPGGPILIPEATDQNATT

SEQ ID NO: 1011 - DNA, 1778 bp, Muscodor strobelii
  misc_feature: SGI EST ID NO. CUFF.2820.0
  misc_feature: Variant of the nucleotide sequence at SEQ ID NO 1009
caacagctctctattctcatgctaccatcttcatggcatcgcagcacgccgtgtattgaaaaaaaaaaacaaattcatcttctccgggcattggagtttcactgaatcaccgaacccatatcgcacaattctttcgcagtttgtccatgattaagaaaacgtgctacggcgtcgagtgcgacaaggaggctggcacattgcagtgcccaacatgcctcaaacttggcgtcaaaggcagttacttctgctctcaagagtgctttcagagaagctgggtatactgcgaatttattcgaaacccaggtctatcatcgatcgcgagaactgacttcgactgtatctaggctacgcacaaaacggcgcataaggcacaaaacagtaagaagtgaaatatggcagtccatttgatgacagaagtgagtgctgagagtggtttcaacagcgactggatcttacaacccgttcccgtcttacccgtacaccggctcggtgcgaccgttctacccactttcaccgcgaagacccgttccgaagactattagacaccctgattggtccgagactggtatcccagcgcgtgagaaccgcttgaacagaaccaaatgggagatactggacacagaaggccaagaagccatgcggaaggtctgtcggttggcccgagaggtacttgacatcacggccgcagcggtaagaccaggcgtgacaacggattatctggatgagatatgtcacaatgcttgcgtggaacgagagtcttatccgtcccccctgaactacaatcgcttccccaagtcgatctgtacgtctccgaacgaggtcgtttgccatggcatccccgaccagcgcattctccttgacggcgacattctcaacctcgacgtgtcgctgtaccacggcggataccacgcagatctgaacgagacatactatgtcggggacaaagcaatggcagacgcggatgccgtcagactcgtcgagacgacacgagaagctcttgacaaggccatcgccttagtgaagccaggcttaccgatccgcgactttggaaaggtaatcgagaagcatgcgacttcacgcaacctattcgtgctcaagaattggggcggccatggaatcaactccgagtttcatcctcctccgtggatccctcactatgcgaagaacaagacacctggcgtctgcaagcctggtatgacattcacaatcgagcctatcttggcgttgggtgctagtcgagaagtgtactggccagataactggacgaatgtcactgttgatggcaaatggactgcgcagttcgagcacactcttcttgtcaccgagacaggagtcgaggttttgaccgctcgactggagaattctccgggtggaccaatactcataccagaagcgaccgatcaaaatgcaactacatgatggtgaggcggagcgctgccccagcctgttaggtttcgagctagcttgatataaagaataagggtataatgtggattgtgtgtgtcgagtttccctaacccgaaagtatataaatgatggataggtgagggggatcggtaaaaatcttcggccgtatttttctgcacgagacagccggagatacagaccactgagatcggggttaagggatgattcactaatggggtaccgaaagagtgagagttacctaggtatcaagagagtttattgtcacgtgggtttcttaacagcagtcctcgagtcgagccttattatataatgtctgaagttaatgcagatacacaaggactattcattcc

SEQ ID NO: 1012 - DNA, 969 bp, Muscodor strobelii
  misc_feature: SGI cDNA ID NO. 559924
  misc_feature: Encodes the peptide sequence at SEQ ID NO 1013
atggagcaaaactccaagaatgatgtcactagtgacaccatccattgcgtccaccaacccgagaacggcgttgacaccatctcccacatcattatcgacaacatttcaacatgggatgagctgtctaagttcattacggcattttgccctacagctaagggcctgcgtggccagaaggttgcgatcaacgtcaattgctggatctgttgtggagagcttgatctgccatcttgggtcagcccggaacatgtcactaatgggaaatacaatctccccatcgaaatggaaaagcttgcagtactaccttgcggccatttctttggcgcggaatgcctgcgaatctggtgcaagaagtcaacggagagcggcaagaaaccgtgttgccccttgtgccgaatgacactcgtgcacaacatgtgcgaccacctcctctcattcagaacactgaacaacaaacgaattaaaacatctgaagacgtaataaagaaagtaccgaacaccaaggttcacttcttggttcccatcaacccgctcgatatcattgctaccacggaccatgacaactgcccgcctactcctaagtccattcactacgcttccgccgacgacaaccagattttctcgcatgcttctgttaatcatgacgatgagccatctaccatcgcacacattcatcaggcagagcttgcttccatcatttccgacgatgatgcgcctgcccctaattactatcatgaaaagcatcctccaaccattaatgacagtcatccgcacgccaacattgagtttgtggatgtgacagagcaatggtcggcacgcaatgcatcttatcgtgctaatgatatccccggcatggatcctctatgcctccgatgcagattccgggaagcagagattatttccaaagtctccggatacaaccaagaccaagccaacgccttgcttgacactgagcgagcacattggtag

SEQ ID NO: 1013 - protein, 322 aa, Muscodor strobelii
  misc_feature: SGI Peptide ID NO. 559924
MEQNSKNDVTSDTIHCVHQPENGVDTISHIIIDNISTWDELSKFITAFCPTAKGLRGQKVAINVNCWICCGELDLPSWVSPEHVTNGKYNLPIEMEKLAVLPCGHFFGAECLRIWCKKSTESGKKPCCPLCRMTLVHNMCDHLLSFRTLNNKRIKTSEDVIKKVPNTKVHFLVPINPLDIIATTDHDNCPPTPKSIHYASADDNQIFSHASVNHDDEPSTIAHIHQAELASIISDDDAPAPNYYHEKHPPTINDSHPHANIEFVDVTEQWSARNASYRANDIPGMDPLCLRCRFREAEIISKVSGYNQDQANALLDTERAHW

SEQ ID NO: 1014 - DNA, 155 bp, Muscodor strobelii
  misc_feature: SGI EST ID NO. CUFF.2826.0
  misc_feature: Variant of the nucleotide sequence at SEQ ID NO 1012
caactgcccgcctactcctaagtccattcactacgcttccgccgacgacaaccagattttctcgcatgcttctgttaatcatgacgatgagccatctaccatcgcacacattcatcaggcagagcttgcttccatcatttccgacgatgatgcgc

SEQ ID NO: 1015 - DNA, 987 bp, Muscodor strobelii
  misc_feature: SGI cDNA ID NO. 559925
  misc_feature: Encodes the peptide sequence at SEQ ID NO 1016
atgcattcttttcttgtcggtcttgcctttgctgcttcggtccttgccgaaggtcgaacttcggccccggatggctgcttgaatgtagcgcagagcggtggcgactacagctctatccaggatgccgtcgactcactttcgacatccgacagtactgctcagtgcatcttcattaacccgggcacctatgaggagcaggtacttgtgagctcgcgcagcgcccaattgactttctacgggtacaccgaagatacttccagctactctgggaaccaagccacgataagctcgagtctaagccaagcggacggcttatccaatgacgagacgggcacaattcgtatcaaagcaaccaatttcaaaatgtacaacgtaaatgtgaacaatggatacggggaagggagccaagctgtggcactaagtgcttacgcagacagtggctactacggctgcgccttcactggattccaggacaccctacttgccaatgaagggtatcaactgtatagcaagtctttgattcagggcgccaccgactatatattcggtcaggtagccgccgcctggtttgaacagtgtgatcttcgagtgcttgataggtcgatcggttatatcaccgccaacgggcggcagtcgtcggacggcatctccttctacgtcttcaacaactgcgacatcgctgctgccggtgggaactccgttccggatggcgcatactacctagggcgtccctggagcgaatatgcccaggttgtcttccaaaatactgctatgtctgccgtcatcaatgaggacggatggcacatttggaacgtcggcgatgagagaacggatgacgtcctcttcggagagtacgataactctggtgaaggtgcggcaggtccccgtgttgactttgcgaccatgctggactcttcgtacgatatcgcagacatcctcactagtagctattcaagcgccggttattacgatgctagctacatgtga

SEQ ID NO: 1016 - protein, 328 aa, Muscodor strobelii
  misc_feature: SGI Peptide ID NO. 559925
  misc_feature (29)..(326): Pfam Id: PF01095 Pfam Desc: Pectinesterase
  misc_feature (133)..(293): Pfam Id: PF01095 Pfam Desc: Pectinesterase
  misc_feature (4)..(328): NCBI GI: 256723593 Blast Desc: carbohydrate esterase family 8 [Nectria haematococca mpVI 77-13-4]
  misc_feature (1)..(328): NCBI GI: 261358199 Blast Desc: pectinesterase [Verticillium albo-atrum VaMs.102]
  misc_feature (5)..(328): NCBI GI: 39974471 Blast Desc: MGG_00618 [Magnaporthe grisea 70-15] gi|145018473|gb|EDK02752.1| MGG_00618 [Magnaporthe grisea 70-15]
  misc_feature (8)..(328): NCBI GI: 46115128 Blast Desc: FG03406.1 [Gibberella zeae PH-1]
  misc_feature (19)..(328): NCBI GI: 164428261 Blast Desc: pectinesterase precursor [Neurospora crassa OR74A] gi|157072077|gb|EAA28716.2| pectinesterase precursor [Neurospora crassa OR74A]
  misc_feature (18)..(328): NCBI GI: 169618900 Blast Desc: SNOG_12642 [Phaeosphaeria nodorum SN15] gi|111058820|gb|EAT79940.1| SNOG_12642 [Phaeosphaeria nodorum SN15]
  misc_feature (18)..(328): NCBI GI: 5802953 Blast Desc: AF178989_1 pectin methylesterase [Vitis riparia]
  misc_feature (19)..(328): NCBI GI: 5442422 Blast Desc: AF159252_1 pectin methylesterase [Cochliobolus carbonum]
  misc_feature (1)..(328): NCBI GI: 242805779 Blast Desc: pectin methylesterase, [Talaromyces stipitatus ATCC 10500] gi|218715228|gb|EED14650.1| pectin methylesterase, [Talaromyces stipitatus ATCC 10500]
  misc_feature (2)..(328): NCBI GI: 189210423 Blast Desc: pectinesterase precursor [Pyrenophora tritici-repentis Pt-1C-BFP] gi|187977636|gb|EDU44262.1| pectinesterase precursor [Pyrenophora tritici-repentis Pt-1C-BFP]
  misc_feature (1)..(313): SWISSPROT Homolog: EC 3.1.1.11 Pectinesterase
MHSFLVGLAFAASVLAEGRTSAPDGCLNVAQSGGDYSSIQDAVDSLSTSDSTAQCIFINPGTYEEQVLVSSRSAQLTFYGYTEDTSSYSGNQATISSSLSQADGLSNDETGTIRIKATNFKMYNVNVNNGYGEGSQAVALSAYADSGYYGCAFTGFQDTLLANEGYQLYSKSLIQGATDYIFGQVAAAWFEQCDLRVLDRSIGYITANGRQSSDGISFYVFNNCDIAAAGGNSVPDGAYYLGRPWSEYAQVVFQNTAMSAVINEDGWHIWNVGDERTDDVLFGEYDNSGEGAAGPRVDFATMLDSSYDIADILTSSYSSAGYYDASYM

SEQ ID NO: 1017 - DNA, 858 bp, Muscodor strobelii
  misc_feature: SGI cDNA ID NO. 559926
  misc_feature: Encodes the peptide sequence at SEQ ID NO 1018
atggaggacgacaacatcattaaagtcaccgatattgggacattctcggagcttgccaagtacctgactgcttgctgtccaacagtggcgaaacccggcgaccccaaagtgcatgttgagttggcatgcgagatctgctccgaccccctagttggcctgccatactgggtacgatccaacgacgagaaggaagaacagactcgggagagcaagaacgacactcgctccgaacaccctgatcaagggaaatctgagactccgctagaggtgcaacctgaaatcttgattacagaggaagacgcagacaaatccaatgcttatggaaactcaatatcagtatctttcgatgaaggcccgtccgaggcatccgtaggcgccactgttgacaatatcaagaaaggcattgcagtgctcccctgcaaccatttcttccatggagagtgctggggaaaatgggcaagagccgtgattaacaatggagagacaccgacatgtcccaaatgtcggttcaagatgaagcattccggctgcggccacaaaatatctacacgacgcataggcgcaaacttacggaacgccgtcttggccatccctcgtttcgtacctaacgtgcgtatccaccgctggaagactgagcaagagaaggacgggcatgatcaatttgtcgatgtcaccccgccgaaagaccctgatcaagtccagggaacgaaccatcaggatgtcgccatcaagtgcttgacgtgtctcatgtcagaaatcttagacggtgcgaatgacgaagaacgaagggaacagctcgttcgcgtcgtggtccaacaacgggaacgattgatagccctaaccagtgttgcctggtga

SEQ ID NO: 1018 - protein, 285 aa, Muscodor strobelii
  misc_feature: SGI Peptide ID NO. 559926
MEDDNIIKVTDIGTFSELAKYLTACCPTVAKPGDPKVHVELACEICSDPLVGLPYWVRSNDEKEEQTRESKNDTRSEHPDQGKSETPLEVQPEILITEEDADKSNAYGNSISVSFDEGPSEASVGATVDNIKKGIAVLPCNHFFHGECWGKWARAVINNGETPTCPKCRFKMKHSGCGHKISTRRIGANLRNAVLAIPRFVPNVRIHRWKTEQEKDGHDQFVDVTPPKDPDQVQGTNHQDVAIKCLTCLMSEILDGANDEERREQLVRVVVQQRERLIALTSVAW

SEQ ID NO: 1019 - DNA, 313 bp, Muscodor strobelii
  misc_feature: SGI EST ID NO. CUFF.2859.0
  misc_feature: Variant of the nucleotide sequence at SEQ ID NO 1017
ctcacatctcgagcactgtttactcatccgcattaactccattgcgttgcccttgaacacctttcccttagcgaaggcacaaaggcttttgcgccctcggccacattactgccattttcagacccaagattcgcagaactttcgtaagattcccgccgtcttaaaagcagcaatggaggacgacaacatcattaaagtcaccgatattgggacattctcggagcttgccaagtacctgactgcttgctgtccaacagtggcgaaacccggcgaccccaaagtgcatgttgagttggcatgcgagatctgctcc

SEQ ID NO: 1020 - DNA, 1218 bp, Muscodor strobelii
  misc_feature: SGI cDNA ID NO. 559927
  misc_feature: Encodes the peptide sequence at SEQ ID NO 1021
atgtctcacaccgtccctcaacaagccacaactggcgatgatctcccgcggatgcggattcgagaacttctccccaacctccatctgggcgattataagccgggtcccctgaattccctaacagacgtacccggagtcctagtccacacacaagaaatcatcgccgacaacggaaacgtaaacacaggcctgacctccatcctgccacgcagtgactggttccacaaagcctgctacgccggtctattctccttcaacgggtccggtgaactgaccggatcacactggataaacgagaccggccttctacactcacccatcatcgtcaccaattcatttgccgtcggcgctgcatatcaggggatctacgaatatgctatcaagagtttgggcgctaaaaagggccaagttgattggtttctattgcctgttgttgcggaaacttttgacgggtatctaaacgatcttacgcagtttgcggtcacgcccgcgcatatcgtcaaagggctcgagagtgtcagtagtgaaagagtcagggaggggaatgtgggcggtgggacaggtatgatctgtcactacttcaaaggcggcaccggcagctcctcccgcatcgtgccaggactcgacacaaagggcgagccaaagaactacacagtcggcgtcctaacacaatgcaactacggcaaaaagccgcattttcgcatcggcggcgcacccgtaggacgcatcctcttcgctgaggaaaccaaagcagccgagaccgacgcagcgaagaaaaaagagcaggacgacctaatccgcgagaaagagcgcaaagacggctcaatcatcataatcatctcgaccgacgcgcccttgcacccaacacagctccaaagactcgcaaagcgagcaaccgtgggtctagcgcgcgttggtggaaatgggcataatcctagtggtgatatcttcctcgccttctctacgggaaatgggataccggtgcagagcatcagtatggagagacgggctgttgacccgtggaaacctacgccgtttgatgcgcaattggtggatgatagcagtatcaatggattgtttgaggcagtggctgatgcgactgaggaggcgatttataatgcggtctgtatggcggagagtatgacggggaatttgggacataggattgaggcgcttccgctgcagagggttaggggcattatggagaagtatttgtag

SEQ ID NO: 1021 - protein, 405 aa, Muscodor strobelii
  misc_feature: SGI Peptide ID NO. 559927
  misc_feature (37)..(399): Pfam Id: PF03576 Pfam Desc: Peptidase family S58
  misc_feature (37)..(241): Pfam Id: PF03576 Pfam Desc: Peptidase family S58
  misc_feature (275)..(399): Pfam Id: PF03576 Pfam Desc: Peptidase family S58
  misc_feature (17)..(405): NCBI GI: 189193181 Blast Desc: peptidase family T4 protein [Pyrenophora tritici-repentis Pt-1C-BFP] gi|187978493|gb|EDU45119.1| peptidase family T4 protein [Pyrenophora tritici-repentis Pt-1C-BFP]
  misc_feature (14)..(404): NCBI GI: 238842655 Blast Desc: peptidase family T4 protein [Microsporum canis CBS 113480]
  misc_feature (1)..(404): NCBI GI: 46139117 Blast Desc: FG11073.1 [Gibberella zeae PH-1]
  misc_feature (17)..(405): NCBI GI: 169605225 Blast Desc: SNOG_05634 [Phaeosphaeria nodorum SN15] gi|111065578|gb|EAT86698.1| SNOG_05634 [Phaeosphaeria nodorum SN15]
  misc_feature (17)..(405): NCBI GI: 46115440 Blast Desc: FG03562.1 [Gibberella zeae PH-1]
  misc_feature (16)..(405): NCBI GI: 39943622 Blast Desc: MGG_03822 [Magnaporthe grisea 70-15] gi|145014509|gb|EDJ99077.1| MGG_03822 [Magnaporthe grisea 70-15]
  misc_feature (17)..(404): NCBI GI: 169782247 Blast Desc: [Aspergillus oryzae RIB40] gi|83774329|dbj|BAE64453.1| protein product [Aspergillus oryzae]
  misc_feature (17)..(404): NCBI GI: 238500694 Blast Desc: D-aminopeptidase, [Aspergillus flavus NRRL3357] gi|220691818|gb|EED48165.1| D-aminopeptidase, [Aspergillus flavus NRRL3357]
  misc_feature (17)..(405): NCBI GI: 256727165 Blast Desc: NECHADRAFT_33112 [Nectria haematococca mpVI 77-13-4]
  misc_feature (9)..(405): NCBI GI: 225556776 Blast Desc: peptidase family T4 [Ajellomyces capsulatus G186AR]
MSHTVPQQATTGDDLPRMRIRELLPNLHLGDYKPGPLNSLTDVPGVLVHTQEIIADNGNVNTGLTSILPRSDWFHKACYAGLFSFNGSGELTGSHWINETGLLHSPIIVTNSFAVGAAYQGIYEYAIKSLGAKKGQVDWFLLPVVAETFDGYLNDLTQFAVTPAHIVKGLESVSSERVREGNVGGGTGMICHYFKGGTGSSSRIVPGLDTKGEPKNYTVGVLTQCNYGKKPHFRIGGAPVGRILFAEETKAAETDAAKKKEQDDLIREKERKDGSIIIIISTDAPLHPTQLQRLAKRATVGLARVGGNGHNPSGDIFLAFSTGNGIPVQSISMERRAVDPWKPTPFDAQLVDDSSINGLFEAVADATEEAIYNAVCMAESMTGNLGHRIEALPLQRVRGIMEKYL

SEQ ID NO: 1022 - DNA, 1616 bp, Muscodor strobelii
  misc_feature: SGI EST ID NO. CUFF.2865.0
  misc_feature: Variant of the nucleotide sequence at SEQ ID NO 1020
cgggagtgcacgatttccgagtgcgagtgagaagatggcgaggagagaccgagatgtatttaaaggcttatatcgctgtatgatgcaaaatgaatcataatcatcagaaacctaattacgacctcctcatacctaccgcaaatctacatcacacaccatgtctcacaccgtccctcaacaagccacaactggcgatgatctcccgcggatgcggattcgagaacttctccccaacctccatctgggcgattataagccgggtcccctgaattccctaacagacgtacccggagtcctagtccacacacaagaaatcatcgccgacaacggaaacgtaaacacaggcctgacctccatcctgccacgcagtgactggttccacaaagcctgctacgccggtctattctccttcaacgggtccggtgaactgaccggatcacactggataaacgagaccggccttctacactcacccatcatcgtcaccaattcatttgccgtcggcgctgcatatcaggggatctacgaatatgctatcaagagtttgggcgctaaaaagggccaagttgattggtttctattgcctgttgttgcggaaacttttgacgggtatctaaacgatcttacgcagtttgcggtcacgcccgcgcatatcgtcaaagggctcgagagtgtcagtagtgaaagagtcagggaggggaatgtgggcggtgggacaggtatgatctgtcactacttcaaaggcggcaccggcagctcctcccgcatcgtgccaggactcgacacaaagggcgagccaaagaactacacagtcggcgtcctaacacaatgcaactacggcaaaaagccgcattttcgcatcggcggcgcacccgtaggacgcatcctcttcgctgaggaaaccaaagcagccgagaccgacgcagcgaagaaaaaagagcaggacgacctaatccgcgagaaagagcgcaaagacggctcaatcatcataatcatctcgaccgacgcgcccttgcacccaacacagctccaaagactcgcaaagcgagcaaccgtgggtctagcgcgcgttggtggaaatgggcataatcctagtggtgatatcttcctcgccttctctacgggaaatgggataccggtgcagagcatcagtatggagagacgggctgttgacccgtggaaacctacgccgtttgatgcgcaattggtggatgatagcagtatcaatggattgtttgaggcagtggctgatgcgactgaggaggcgatttataatgcggtctgtatggcggagagtatgacggggaatttgggacataggattgaggcgcttccgctgcagagggttaggggcattatggagaagtatttgtagatgcgagggttgtgttggggttcaatgggggagatgtgtgttggggggatctggaattgaaatctgggaagtcgttcaatgcatgttgccttataagaatcagtgtagaagtgttcacgttcttcttccaatcatgagacaaaatgagaatctgcaagttggcattgtctcggaaagagctctttcatctgcagtgtacctctggtcgcaactgctcgaggcagatgagaatgtggcgtag

SEQ ID NO: 1023 - DNA, 814 bp, Muscodor strobelii
  misc_feature: SGI cDNA ID NO. 559928
  misc_feature: Reduced expression when VOC is produced
  misc_feature: Encodes the peptide sequence at SEQ ID NO 1024
atggagccgtaccgccctcccaacggctccgggccgccgaaacgcgagccgtcgcgagccgagatgttcgaggacgagaagcggcgcatcatcgagagctgcttcagcaagaaggacgccgacggctcccagaccgagacctacatcacccacatcaagatcaccgagttcgccacccaccagaccggccctccgccccccgacgccagacgtgaagccgagaagccccgcgtcattatcgtcgccgtccgcaggtcgggcaaggtgcgcatgcacaagtccaaggagaacggcaacggcacattctccatcggcaagacatgggacctcaacgacctgacgggcatcgagtccttcacgggccccaccgtcgacagccagaagcggtcgtgggcgggcgacacgggcttcatcgtccacatcggcaagccctactactggcaggcccaggccgagaaggagaagaagttcttcgtcgcctccctcatcaagatctacggcaagtacaccggcggcagcgtgcccaccctgaccggcttcgacccccgcgagctcgaccaggtcatgggctcgcgacgccctcctccacagcagagcaatcgcccttctcccttccccgaatccggtactcctcctcctccacccccgatccgagccccccgccggcatgccccctcctcgcccgtctcctgcgccgccctcacgaccaccagaacagagacaaccgccaccagttgcgctacgtcaacaggacgctgctcctcccgccagggcagcctctcgtccgggctcgagttcgagatccaattcgagg

SEQ ID NO: 1024 - protein, 271 aa, Muscodor strobelii
  misc_feature: SGI Peptide ID NO. 559928
  misc_feature (6)..(215): NCBI GI: 171682556 Blast Desc: protein product [Podospora anserina] gi|170941237|emb|CAP66887.1| protein product [Podospora anserina]
  misc_feature (18)..(260): NCBI GI: 261359389 Blast Desc: conserved [Verticillium albo-atrum VaMs.102]
  misc_feature (1)..(222): NCBI GI: 145608172 Blast Desc: MGG_03323 [Magnaporthe grisea 70-15] gi|145015668|gb|EDK00158.1| MGG_03323 [Magnaporthe grisea 70-15]
  misc_feature (21)..(202): NCBI GI: 256727166 Blast Desc: NECHADRAFT_76880 [Nectria haematococca mpVI 77-13-4]
  misc_feature (18)..(198): NCBI GI: 156064685 Blast Desc: SS1G_00350 [Sclerotinia sclerotiorum 1980] gi|154691212|gb|EDN90950.1| SS1G_00350 [Sclerotinia sclerotiorum 1980]
  misc_feature (18)..(213): NCBI GI: 85095799 Blast Desc: NCU09869 [Neurospora crassa OR74A] gi|28921628|gb|EAA30915.1| conserved [Neurospora crassa OR74A]
  misc_feature (18)..(201): NCBI GI: 154322879 Blast Desc: BC1G_00782 [Botryotinia fuckeliana B05.10] gi|150848116|gb|EDN23309.1| BC1G_00782 [Botryotinia fuckeliana B05.10]
  misc_feature (21)..(228): NCBI GI: 46134209 Blast Desc: FG09244.1 [Gibberella zeae PH-1]
  misc_feature (2)..(225): NCBI GI: 146322438 Blast Desc: Exocyst complex component Sec3 [Aspergillus fumigatus Af293] gi|129557017|gb|EAL88146.2| Exocyst complex component Sec3, [Aspergillus fumigatus Af293] gi|159130661|gb|EDP55774.1|
  misc_feature (2)..(225): NCBI GI: 119496913 Blast Desc: Exocyst complex component Sec3, [Neosartorya fischeri NRRL 181] gi|119413391|gb|EAW23332.1| Exocyst complex component Sec3, [Neosartorya fischeri NRRL 181]
  misc_feature: Useful for introducing or modulating the production of volatile compounds
MEPYRPPNGSGPPKREPSRAEMFEDEKRRIIESCFSKKDADGSQTETYITHIKITEFATHQTGPPPPDARREAEKPRVIIVAVRRSGKVRMHKSKENGNGTFSIGKTWDLNDLTGIESFTGPTVDSQKRSWAGDTGFIVHIGKPYYWQAQAEKEKKFFVASLIKIYGKYTGGSVPTLTGFDPRELDQVMGSRRPPPQQSNRPSPFPESGTPPPPPPIRAPRRHAPSSPVSCAALTTTRTETTATSCATSTGRCSSRQGSLSSGLEFEIQFE

SEQ ID NO: 1025 - DNA, 1185 bp, Muscodor strobelii
  misc_feature: SGI EST ID NO. CUFF.2868.0
  misc_feature: Variant of the nucleotide sequence at SEQ ID NO 1023
aacgcaccttccatccccaaacacctagttagacctgcaggcatcatcacctcggattcgacctacctgaggagtgacctcgacaacccaccttcgacttcgagatacccgatacccaataccctccattgtacaccacccctttcgcctcgagggcgcaccacactctctttcaacagcgcccgctccttgctccctaatcctatagactttctcagcgttcaagatttccatgttgccgccatccgcatccgcatcctcctaattgcctgccgccctcctcgatcccgtatccatcctctgccccaaagatgatcaagaaacccccgaccatcgccatctcttgccgacacacctgagtcttcaccagccatggagccgtaccgccctcccaacggctccgggccgccgaaacgcgagccgtcgcgagccgagatgttcgaggacgagaagcggcgcatcatcgagagctgcttcagcaagaaggacgccgacggctcccagaccgagacctacatcacccacatcaagatcaccgagttcgccacccaccagaccggccctccgccccccgacgccagacgtgaagccgagaagccccgcgtcattatcgtcgccgtccgcaggtcgggcaaggtgcgcatgcacaagtccaaggagaacggcaacggcacattctccatcggcaagacatgggacctcaacgacctgacgggcatcgagtccttcacgggccccaccgtcgacagccagaagcggtcgtgggcgggcgacacgggcttcatcgtccacatcggcaagccctactactggcaggcccaggccgagaaggagaagaagttcttcgtcgcctccctcatcaagatctacggcaagtacaccggcggcagcgtgcccaccctgaccggcttcgacccccgcgagctcgaccaggtcatgggctcgcgacgccctcctccacagcagagcaatcgcccttctcccttccccgaatccggtactcctcctcctccacccccgatccgagccccccgccggcatgccccctcctcgcccgtctcctgcgccgccctcacgaccaccagaacagagacaaccgccaccagttgcgctacgtcaacaggacgctgctcctcccgccagggcagcctctcgtccgggctcgagttcgagatccaattcgag

SEQ ID NO: 1026 - DNA, 1926 bp, Muscodor strobelii
  misc_feature: SGI cDNA ID NO. 559929
  misc_feature: Elevated expression when VOC is produced
  misc_feature: Encodes the peptide sequence at SEQ ID NO 1027
atgcgctctactctgttgctcggcctcgtcgggtcttccatccctgtgttcgccgcccctcatgatctgacaccacaaaagcctgggatacgaaaacgaggtgctgtcgacctcaacgcctatcgcatcaatcaagtcccagagtacacaagccaaagtgccgccagggataacttgaccctccgcgcagtcaaacgcaattcatatgtcgacacggctacggatcttgtgaagagcgtagctcctggtgctacattccgtttggtcaatgatcactacgttggcagcaatggcgttgcgcacatcaatttcaagcagacggcgaatggcctcgatattgacaatgcggactttaatgtgaacatcgctcgcgatggaactgtcttttcgtacggcaactcattctaccatggaaaaatccccgagaaacggagtattggcaagcgtggtctgtctgatgctgtgaaggctctcacggcgatcacctcgactctacagctgcctctcaaggacacttcccaggcggtcgccgaagtcgtcgaaggcatcgaggcttacgtgctcaagggtatgtctggcgcactcaaggaccctgaagcccagctagtgtactttgtaaaaaacaatggcaagcttgctatggcttggcgtgttgaaaccgatttgctcgacaactggttgctgtcttacgtggatacggacaacatgaaggatatacacggtgttgtggactgggtggccgacgcaaccttcaaggtcttcccctggggtgtcaatgaccctgacgagggctcacgcgttaccttgactgatccatgggatacgacggcttctgagtttggttggttgtcagatggtacaaccgagtacgacgttactcgtggcaacaacgccattgctcagaccaatcttgatggcggtgatgactaccttaataactaccgcccaacagaggttaacgatgagttcttgtacgactggaatgtcaaatgggacccggcctcaacgtatcagaatgcttctgtcactcagcttttctatacagccaatgtctatcatgacgtattgtacgatttgggcttcactgagactgctgggaacttcgaggcgaacaacgacggccagggtggcaaaggcggcgatttcgttatcttgaatgctcaagacggttccggtactaacaacgccaacttcgccaccccaaaagatggccagaacggccgtatgcgcatgtatctctggaccgagtcgaccccttatagagattgcgcgttcgaggctggtgtcataatccacgagtacacccacggtctttcaaatcgtccgactggtggtcccgacaatgccaactgcttacagacaactgaagccggcggcatgggcgagggatggggtgactttatggcaacagcaatcaggctaaaggagacggacacacgtgagacggactacagcctcggagcctgggtttacaataaccctgctggaattcggaactacctatactcgacaaatctcgagacgaacccgtacatgtacgtgactgctaacacatataatgaagtgcacgatatcagcgagatctgggcaacgatgctgtacgatgttatgtggaatttgattgacaagcacggattgagcaccgcacagaagccggagttcaaagacggtattcctactgatggaaagtttctcaccatgaagctggtcatcgatggcatggctctgcaaccctgcaaccccaacttcgtccaggctcgagatgctatcctcgacgctgatgttgcgctcactggtggcgagaatcagtgcgagatttggactgggttcgccaagcgcggtcttggtgacggtgctaaggctggtcttctcctcaacatcatcccgaggaaggggagcaataacatcccggccggtgtctgctag

SEQ ID NO: 1027 - protein, 641 aa, Muscodor strobelii
  misc_feature: SGI Peptide ID NO. 559929
  misc_feature (85)..(136): Pfam Id: PF07504 Pfam Desc: Fungalysin/Thermolysin Propeptide Motif
  misc_feature (249)..(641): Pfam Id: PF02128 Pfam Desc: Fungalysin metallopeptidase (M36)
  misc_feature (5)..(641): NCBI GI: 32400285 Blast Desc: neutral protease III [Aspergillus oryzae]
  misc_feature (21)..(640): NCBI GI: 74620729 Blast Desc: MEP4_TRIRU RecName: Full=Extracellular metalloproteinase 4; AltName: Full=Fungalysin MEP4; Flags: Precursor gi|22652157|gb|AAN03642.1|AF407191_1 secreted 4 rubrum]
  misc_feature (1)..(641): NCBI GI: 169595508 Blast Desc: SNOG_00493 [Phaeosphaeria nodorum SN15] gi|111070868|gb|EAT91988.1| SNOG_00493 [Phaeosphaeria nodorum SN15]
  misc_feature (21)..(620): NCBI GI: 238845207 Blast Desc: metalloprotease MEP5 [Microsporum canis CBS 113480]
  misc_feature (16)..(641): NCBI GI: 542375 Blast Desc: metalloprotease MEP5 [Microsporum canis CBS 113480]
  misc_feature (5)..(637): NCBI GI: 238844934 Blast Desc: metalloprotease MEP1 [Microsporum canis CBS 113480]
  misc_feature (26)..(622): NCBI GI: 254810399 Blast Desc: MEP2_TRITO RecName: Full=Extracellular metalloproteinase 2; AltName: Full=Fungalysin MEP2; Flags: Precursor gi|210076629|gb|ACJ06664.1| metalloprotease 2
  misc_feature (26)..(622): NCBI GI: 74612195 Blast Desc: MEP2_ARTBE RecName: Full=Extracellular metalloproteinase 2; AltName: Full=Fungalysin MEP2; Flags: Precursor gi|33520315|gb|AAQ21100.1| metalloprotease MEP2
  misc_feature (26)..(622): NCBI GI: 74620712 Blast Desc: MEP2_TRIRU RecName: Full=Extracellular metalloproteinase 2; AltName: Full=Fungalysin MEP2; Flags: Precursor gi|22652149|gb|AAN03638.1|AF407187_1 secreted 2 rubrum]
  misc_feature (36)..(637): NCBI GI: 74620722 Blast Desc: MEP5_TRIRU RecName: Full=Extracellular metalloproteinase 5; AltName: Full=Fungalysin MEP5; Flags: Precursor gi|22652153|gb|AAN03640.1|AF407189_1 secreted 5 rubrum]
  misc_feature: Useful for introducing or modulating the production of volatile compounds
MRSTLLLGLVGSSIPVFAAPHDLTPQKPGIRKRGAVDLNAYRINQVPEYTSQSAARDNLTLRAVKRNSYVDTATDLVKSVAPGATFRLVNDHYVGSNGVAHINFKQTANGLDIDNADFNVNIARDGTVFSYGNSFYHGKIPEKRSIGKRGLSDAVKALTAITSTLQLPLKDTSQAVAEVVEGIEAYVLKGMSGALKDPEAQLVYFVKNNGKLAMAWRVETDLLDNWLLSYVDTDNMKDIHGVVDWVADATFKVFPWGVNDPDEGSRVTLTDPWDTTASEFGWLSDGTTEYDVTRGNNAIAQTNLDGGDDYLNNYRPTEVNDEFLYDWNVKWDPASTYQNASVTQLFYTANVYHDVLYDLGFTETAGNFEANNDGQGGKGGDFVILNAQDGSGTNNANFATPKDGQNGRMRMYLWTESTPYRDCAFEAGVIIHEYTHGLSNRPTGGPDNANCLQTTEAGGMGEGWGDFMATAIRLKETDTRETDYSLGAWVYNNPAGIRNYLYSTNLETNPYMYVTANTYNEVHDISEIWATMLYDVMWNLIDKHGLSTAQKPEFKDGIPTDGKFLTMKLVIDGMALQPCNPNFVQARDAILDADVALTGGENQCEIWTGFAKRGLGDGAKAGLLLNIIPRKGSNNIPAGVC

SEQ ID NO: 1028 - DNA, 3748 bp, Muscodor strobelii
  misc_feature: SGI EST ID NO. CUFF.2872.0
  misc_feature: Variant of the nucleotide sequence at SEQ ID NO 1026
gtggggctagtcttagtcacggtaatgactgactagtctagtcattagtcattaataagtcactaatatcacaaccctgtgtacaataataatatatacaacaatagtgatctcactcaattctgacagcaaatgcatcctggtggggcacgggcgatcgtctttcagggccaacaatcttcttacctgtagatagacttcaaagcgttcacctggtcggtccagactctcgacagtctccaatggtacagttcatcaaggtcgaccttggctgctgtgtcaggagcaattgttgctctgacggtcatatctgctcgcggtgacatcgcagagttcacctgacatccaatagtgctctcggttgcggcattgcggaaccggctgatacgcagcatcttcaccaagccatcgcagtcctgctttccatctcgctttggatggatcatgttgccaatatttctctgtcgccgtgtgaattgccatagctgtgctagaagagcctggagaggacgctcggcaaatcggcgccgtggcagtacatttgtcaattggccttttcgcgacacggaacttcatcgctgtatcgccaaggctgaaggggctcggcagacgaccaaatagcgctctatgcggggcgttcgtcgtcaagctagaccgcctggggaatgtggcatgaagctcagaatcaagcgacgcttggcagaaccccgttcgcccacgcgttgtccaatgcctgcgacagatcccggaactagcaagctgaagctttaccgtgtgtgccaatcgaagatgatccatcgtactgcggtcatcagaatgcacgtgaggcggaacgacaaccaacacttctcacctagtgatttggcgatccctcatacatgccgttgcttcggtgctcaagtacggtgacaataatggggacgctggagccctacctccaactaaggcaatatgatacgtcgctattgatctcgctggagtcatgtgcacgaaacaggcagttccaatgtcgatactgatagcagctgcttgcatggactattgagatagtctcaaaagttcatgtaagttcgattctagtcctcgctaagacggacagaccggtcttgttttagtagagcgcaatacagaagatagatatatagtcccgatggccggtcggtcaactcatgaactaccagactcgtcttccaagtcgacagttctctgtggaccagttggatctcaagcatcctctcacggtgccttcccttgaagcgcacagtcacgatgcgctctactctgttgctcggcctcgtcgggtcttccatccctgtgttcgccgcccctcatgatctgacaccacaaaagcctgggatacgaaaacgaggtgctgtcgacctcaacgcctatcgcatcaatcaagtcccagagtacacaagccaaagtgccgccagggataacttgaccctccgcgcagtcaaacgcaattcatatgtcgacacggctacggatcttgtgaagagcgtagctcctggtgctacattccgtttggtcaatgatcactacgttggcagcaatggcgttgcgcacatcaatttcaagcagacggcgaatggcctcgatattgacaatgcggactttaatgtgaacatcgctcgcgatggaactgtcttttcgtacggcaactcattctaccatggaaaaatccccgagaaacggagtattggcaagcgtggtctgtctgatgctgtgaaggctctcacggcgatcacctcgactctacagctgcctctcaaggacacttcccaggcggtcgccgaagtcgtcgaaggcatcgaggcttacgtgctcaagggtatgtctggcgcactcaaggaccctgaagcccagctagtgtactttgtaaaaaacaatggcaagcttgctatggcttggcgtgttgaaaccgatttgctcgacaactggttgctgtcttacgtggatacggacaacatgaaggatatacacggtgttgtggactgggtggccgacgcaaccttcaaggtcttcccctggggtgtcaatgaccctgacgagggctcacgcgttaccttgactgatccatgggatacgacggcttctgagtttggttggttgtcagatggtacaaccgagtacgacgttactcgtggcaacaacgccattgctcagaccaatcttgatggcggtgatgactaccttaataactaccgcccaacagaggttaacgatgagttcttgtacgactggaatgtcaaatgggacccggcctcaacgtatcagaatgcttctgtcactcagcttttctatacagccaatgtctatcatgacgtattgtacgatttgggcttcactgagactgctgggaacttcgaggcgaacaacgacggccagggtggcaaaggcggcgatttcgttatcttgaatgctcaagacggttccggtactaacaacgccaacttcgccaccccaaaagatggccagaacggccgtatgcgcatgtatctctggaccgagtcgaccccttatagagattgcgcgttcgaggctggtgtcataatccacgagtacacccacggtctttcaaatcgtccgactggtggtcccgacaatgccaactgcttacagacaactgaagccggcggcatgggcgagggatggggtgactttatggcaacagcaatcaggctaaaggagacggacacacgtgagacggactacagcctcggagcctgggtttacaataaccctgctggaattcggaactacctatactcgacaaatctcgagacgaacccgtacatgtacgtgactgctaacacatataatgaagtgcacgatatcagcgagatctgggcaacgatgctgtacgatgttatgtggaatttgattgacaagcacggattgagcaccgcacagaagccggagttcaaagacggtattcctactgatggaaagtttctcaccatgaagctggtcatcgatggcatggctctgcaaccctgcaaccccaacttcgtccaggctcgagatgctatcctcgacgctgatgttgcgctcactggtggcgagaatcagtgcgagatttggactgggttcgccaagcgcggtcttggtgacggtgctaaggctggtcttctcctcaacatcatcccgaggaaggggagcaataacatcccggccggtgtctgctagatgataaataaagcttcaggaaattttaggtaatgagatacaagtagtgctcgagaaaggaataatgagacccgaaagaaccctattacatggtctctatcgaaggctcttgggctagtcgaaaagtcacttgctcaagttttgagaccgccagcgaaatattcgtgccacctaaattgacctagacctatgagcaatgtttggaagctttcatcggggacggaggaccctattttatgattccaaacgatagcttcgcgtaatcagcgtttaccagtacctctaccatgactttctaggcgacgtaatgggatagctcttatattagcctcataatcatatagaaaagggcatgatccttcttgagttctagaagatggctggtggcacataagcactctcggcttcagggagactcgtgatagcagtaccacgaaaggttcctgagatatacaccattttaataccaatcacatcgggcataccctttgggtcaagatggcaatggtgttggcactcatagtttttacgtgaatgtatgcggacgttagct

SEQ ID NO: 1029 - DNA, 1410 bp, Muscodor strobelii
  misc_feature: SGI cDNA ID NO. 559930
  misc_feature: Encodes the peptide sequence at SEQ ID NO 1030
atggatcacagggatagcagcagcgatgtcgagggcggcaccagcacccacaaagcgcaggagatcaacctccacgacccaaaagggtggcctacaggacgcaagtggaggatactgctgctcgtcagttggttgagccttgtcagccccttagcatcgtccatcgtcgccccggccacacctctcctgaacgccgagttcgagaacgactcggagatcctggcaacctttaccgtctccttcttcatattgggctacgtagttggttcgctcctcgccgccccgcttagcgagcgatacggaaggaagattgtcctcgatttcgcgacggcgctcttcgccgtctggcagttggcttgcgccctagcccccgacatcacgtcccttctcatcttccgcatcttcgccgggctcgcgggttcagcttgcttctcgatcggaggtggtatcgtgtccgatctgttcgagtcgaacgagagggggactgccacggccgtctttgccctcggtcctctgcttggtcccgtcatcggtcctatcgggggcgcattcctctccgagagggatggttggagatgggtcttttgggtattgctcatcctcggagttgtatccctcctgctacaggtctttggtagtcgcgagacgaatctgagagttatcctggccagggagaaagccttttctaacagagcgagaagatggtggcaccgtctcgactggtatgctgctgtccctatgctcgagatccaaggtgaggcccggcccaccttgatgcagtccatgttacgcccctggcagtttatattcacgtcgcccgtcagcgggcttctctgcctctactcaggcttcatctacggcctgctgtatctgctcctgaccaccatctcgaccgtcttcgtggccaggtaccacttctcggtcggtgtctcgggcctggcctacatcggcatcggcgtcggcttcatcctcggagtcgccatcatcggcagctcgagcgaccgcatcatgacccggcgcgcccgacagcgccttgacggcaccatggtgcccgagatccggctcgacgtgtgcatctacttctcctttctgatccccgtttccctcttcctgtacggctggtcggccgacaagggcgtcttctggctcgtgcccctcatcgggctggcgctcttcgggctcggcctcatcggcatcctcctgccgatccagacgtacatgatcgatgcgttccctgcctatgcagcttcgtcaacggctgccttggcgtcttcgaggaatctggttggcactttcctaccccttgccgggccgtatctataccgagcgatcggcatcggctggggtaacacactcctcggcttcgttgcactagttctgataccggcgccgtacttcattgccaagtaa

SEQ ID NO: 1030 - protein, 469 aa, Muscodor strobelii
  misc_feature: SGI Peptide ID NO. 559930
  misc_feature (42)..(434): Pfam Id: PF07690 Pfam Desc: Major Facilitator Superfamily
  misc_feature (71)..(139): Pfam Id: PF00083 Pfam Desc: Sugar (and other) transporter
  misc_feature (1)..(469): NCBI GI: 115388733 Blast Desc: conserved [Aspergillus terreus NIH2624] gi|114195956|gb|EAU37656.1| conserved [Aspergillus terreus NIH2624]
  misc_feature (25)..(469): NCBI GI: 255940460 Blast Desc: Pc16g06630 [Penicillium chrysogenum Wisconsin 54-1255] gi|211585622|emb|CAP93333.1| Pc16g06630 [Penicillium chrysogenum Wisconsin 54-1255]
  misc_feature (8)..(469): NCBI GI: 212545412 Blast Desc: MFS multidrug transporter, [Penicillium marneffei ATCC 18224] gi|210065829|gb|EEA19923.1| MFS multidrug transporter, [Penicillium marneffei ATCC 18224]
  misc_feature (3)..(469): NCBI GI: 119497403 Blast Desc: MFS multidrug transporter, [Neosartorya fischeri NRRL 181] gi|119413622|gb|EAW23563.1| MFS multidrug transporter, [Neosartorya fischeri NRRL 181]
  misc_feature (1)..(469): NCBI GI: 255953649 Blast Desc: Pc21g05310 [Penicillium chrysogenum Wisconsin 54-1255] gi|211589288|emb|CAP95428.1| Pc21g05310 [Penicillium chrysogenum Wisconsin 54-1255]
  misc_feature (7)..(464): NCBI GI: 145258814 Blast Desc: An04g08250 [Aspergillus niger] gi|134074796|emb|CAK44791.1| protein product [Aspergillus niger]
  misc_feature (26)..(469): NCBI GI: 159130423 Blast Desc: MFS multidrug transporter, [Aspergillus fumigatus A1163]
  misc_feature (27)..(469): NCBI GI: 154294592 Blast Desc: BC1G_13766 [Botryotinia fuckeliana B05.10] gi|150844645|gb|EDN19838.1| BC1G_13766 [Botryotinia fuckeliana B05.10]
  misc_feature (21)..(469): NCBI GI: 145241107 Blast Desc: An08g10970 [Aspergillus niger] gi|134077729|emb|CAK45769.1| protein product [Aspergillus niger]
  misc_feature (26)..(469): NCBI GI: 242815678 Blast Desc: MFS multidrug transporter, [Talaromyces stipitatus ATCC 10500] gi|218714956|gb|EED14379.1| MFS multidrug transporter, [Talaromyces stipitatus ATCC 10500]
MDHRDSSSDVEGGTSTHKAQEINLHDPKGWPTGRKWRILLLVSWLSLVSPLASSIVAPATPLLNAEFENDSEILATFTVSFFILGYVVGSLLAAPLSERYGRKIVLDFATALFAVWQLACALAPDITSLLIFRIFAGLAGSACFSIGGGIVSDLFESNERGTATAVFALGPLLGPVIGPIGGAFLSERDGWRWVFWVLLILGVVSLLLQVFGSRETNLRVILAREKAFSNRARRWWHRLDWYAAVPMLEIQGEARPTLMQSMLRPWQFIFTSPVSGLLCLYSGFIYGLLYLLLTTISTVFVARYHFSVGVSGLAYIGIGVGFILGVAIIGSSSDRIMTRRARQRLDGTMVPEIRLDVCIYFSFLIPVSLFLYGWSADKGVFWLVPLIGLALFGLGLIGILLPIQTYMIDAFPAYAASSTAALASSRNLVGTFLPLAGPYLYRAIGIGWGNTLLGFVALVLIPAPYFIAK

SEQ ID NO: 1031 - DNA, 843 bp, Muscodor strobelii
  misc_feature: SGI cDNA ID NO. 559931
  misc_feature: Encodes the peptide sequence at SEQ ID NO 1032
atgagtcctacaaagaagagtgtcctgatcacgggctgcagtcccgggtccatcggcgaagcactagttaaggaactcttgcacaaccacaaagatgttacggtcatcgcgacatcactgccgggagaggaactcaaggagctggagggcctcggggccgtgtgcctgaaggtggatgtcacatccgacgagagcgtcgccgacttgaaggaatctgtgacccagacgctggatgagaagctggacgtgctgatcaactgcgcatccccagactacgtaatgcccgccctggacgtcgacatatccgagctcaagctcatcttcgacgtcaacttcttcggcaccgtgcgcgtgacccgggccttctcgtcgtcgctaattaacaccggaggtctcgtcgtcaacgtcggctctctagccgcctatgcgccttacgtcttcggctcgtcgtataatgcgaccaaggccgcgctgatggcgtatgggaacacgctgcggattgagctgagtccttggaccgtaagagtaatgaccatcctagctggtcccgtagtcagcggcctcatgacgcgcaagacgcgcacgttaccggccaactccatctaccagcccatcgtagcctcattcgaggcccgcacgacgcacgacaagcacggcgtcgccgccatgcccgtcgaggagttctctcgttctgtcgtgagtcagatcttcaagacgagtcccccgaggacgtattggatcggccccttcgccaggagcgtctggtggctggagacgctggggctggcgtccgtctggaattggttctttaggaagaggtttgacctttggaaattgggatag

SEQ ID NO: 1032 - protein, 280 aa, Muscodor strobelii
  misc_feature: SGI Peptide ID NO. 559931
  misc_feature (6)..(170): Pfam Id: PF00106 Pfam Desc: short chain dehydrogenase
  misc_feature (6)..(88): Pfam Id: PF00106 Pfam Desc: short chain dehydrogenase
  misc_feature (5)..(279): NCBI GI: 212535886 Blast Desc: short chain dehydrogenase/reductase (Ayr1), [Penicillium marneffei ATCC 18224] gi|210070498|gb|EEA24588.1| short chain dehydrogenase/reductase (Ayr1), [Penicillium ATCC
  misc_feature (5)..(279): NCBI GI: 242794311 Blast Desc: short chain dehydrogenase/reductase (Ayr1), [Talaromyces stipitatus ATCC 10500] gi|218718932|gb|EED18352.1| short chain dehydrogenase/reductase (Ayr1), [Talaromyces ATCC
  misc_feature (3)..(255): NCBI GI: 85107683 Blast Desc: NCU07904 [Neurospora crassa OR74A] gi|28924026|gb|EAA33184.1| conserved [Neurospora crassa OR74A]
  misc_feature (1)..(279): NCBI GI: 85119254 Blast Desc: NCU02922 [Neurospora crassa OR74A] gi|28927415|gb|EAA36368.1| [Neurospora crassa OR74A]
  misc_feature (4)..(279): NCBI GI: 240110172 Blast Desc: oxidoreductase,short chain dehydrogenase, [Coccidioides posadasii C735 delta SOWgp]
  misc_feature (2)..(252): NCBI GI: 259483699 Blast Desc: TPA: short chain dehydrogenase/reductase (Ayr1), (AFU_orthologue; AFUA_4G04530) [Aspergillus nidulans FGSC A4]
  misc_feature (2)..(255): NCBI GI: 170940076 Blast Desc: protein product [Podospora anserina]
  misc_feature (5)..(277): NCBI GI: 67541655 Blast Desc: AN6991.2 [Aspergillus nidulans FGSC A4] gi|40742447|gb|EAA61637.1| AN6991.2 [Aspergillus nidulans FGSC A4]
  misc_feature (4)..(279): NCBI GI: 258577821 Blast Desc: conserved [Uncinocarpus reesii 1704] gi|237903358|gb|EEP77759.1| conserved [Uncinocarpus reesii 1704]
  misc_feature (4)..(279): NCBI GI: 255936141 Blast Desc: Pc13g06640 [Penicillium chrysogenum Wisconsin 54-1255] gi|211583717|emb|CAP91733.1| Pc13g06640 [Penicillium chrysogenum Wisconsin 54-1255]
  misc_feature (1)..(279): SWISSPROT Homolog: EC 1.1.1.101 Acylglycerone-phosphate reductase
MSPTKKSVLITGCSPGSIGEALVKELLHNHKDVTVIATSLPGEELKELEGLGAVCLKVDVTSDESVADLKESVTQTLDEKLDVLINCASPDYVMPALDVDISELKLIFDVNFFGTVRVTRAFSSSLINTGGLVVNVGSLAAYAPYVFGSSYNATKAALMAYGNTLRIELSPWTVRVMTILAGPVVSGLMTRKTRTLPANSIYQPIVASFEARTTHDKHGVAAMPVEEFSRSVVSQIFKTSPPRTYWIGPFARSVWWLETLGLASVWNWFFRKRFDLWKLG

SEQ ID NO: 1033 - DNA, 407 bp, Muscodor strobelii
  misc_feature: SGI EST ID NO. CUFF.2880.0
  misc_feature: Variant of the nucleotide sequence at SEQ ID NO 1031
tgcacaaccacaaagatgttacggtcatcgcgacatcactgccgggagaggaactcaaggagctggagggcctcggggccgtgtgcctgaaggtggatgtcacatccgacgagagcgtcgccgacttgaaggaatctgtgacccagacgctggatgagaagctggacgtgctgatcaactgcgcgtgagtgctcccccatcctatgcgatctctacaccccatgactgacagaaaacacaggggaatgagtctgtcgaacagctatcagccatcaagagagcaccgctaactcagatccccagactacgtaatgcccgccctggacgtcgacatatccgagctcaagctcatcttcgacgtcaacttcttcggcaccgtgcgcgtgacccgggccttctcgtcgtcg

SEQ ID NO: 1034 - DNA, 1050 bp, Muscodor strobelii
  misc_feature: SGI cDNA ID NO. 559932
  misc_feature: Encodes the peptide sequence at SEQ ID NO 1035
atgacggcccctaaatccgcccgcgtcccaatccggagcgaaatccccttttccggcgcatctacccgggtcatcaagtccgccagagacattggcttcttccgtgtcgatctcagggactctgagatcggccagaagttcctagcggcagcggacaacatgttttccctggccgaagatgtcttcgacctgccatccgagacgaagctcaacgacagcttcctcaagcacggcgatgccttgctgggctacaaaggcctcggcgcctcagtggtcgacaaagaaggtacgcgcgacaacaacgagcaatactggatcggctgcggcgacatcgagggtgttggcaagtccaaggccgtctacaacgacattatccgcgagcggaatgataagctgagggagttcatcgacctcggcaaggccgtctccgatcgtttcctgcacatcttctcggccgtcttgggactcgcgcccgaggaccccgatcacttgaccaagctgcacagccacagcaacaactcgggcagccacgtccgcttgctcaagtgtccgcctccgcctgagggtgcgcagattaacctgcagccgcacactgactggggcaccctcaccgtcctcttcaacagcctaggcggtctccagatctacatgcccgagcaactggtcagcccgggcgagtcagcgggctggaagtacgtgaagcccgagccaggttgcgccatcttcaacctgggcgacgcctttgtcaagtggtcggacggcgagcttaagagcacgatccaccgcgtcgcgccgccgcccggcgaccagatcaagtgcatgcgctacagcctggcgtacttcacgcgccccaaccacgacgtcgtgctcaagccgctgggccggaagatggcccccgtcgcggccggcaaggaggagtatcccactttcaaggagtgggcgctccgaagggctatggccggcagatcggactccttcaagaagggagattgggagaaagggcaggggacggagactgtcatgagtcagcaggctagacttgttgtctga

SEQ ID NO: 1035 - protein, 349 aa, Muscodor strobelii
  misc_feature: SGI Peptide ID NO. 559932
  misc_feature (174)..(284): Pfam Id: PF03171 Pfam Desc: 2OG-Fe(II) oxygenase superfamily
  misc_feature (20)..(346): NCBI GI: 169616208 Blast Desc: SNOG_11276 [Phaeosphaeria nodorum SN15] gi|160703133|gb|EAT80984.2| SNOG_11276 [Phaeosphaeria nodorum SN15]
  misc_feature (23)..(340): NCBI GI: 115401474 Blast Desc: conserved [Aspergillus terreus NIH2624] gi|114190266|gb|EAU31966.1| conserved [Aspergillus terreus NIH2624]
  misc_feature (26)..(340): NCBI GI: 212529716 Blast Desc: oxidoreductase, 2OG-Fe(II) oxygenase family, [Penicillium marneffei ATCC 18224] gi|210074413|gb|EEA28500.1| oxidoreductase, 2OG-Fe(II) oxygenase family, [Penicillium ATCC
  misc_feature (23)..(340): NCBI GI: 239611981 Blast Desc: oxidoreductase [Ajellomyces dermatitidis ER-3]
  misc_feature (23)..(340): NCBI GI: 261201914 Blast Desc: oxidoreductase [Ajellomyces dermatitidis SLH14081] gi|239590268|gb|EEQ72849.1| oxidoreductase [Ajellomyces dermatitidis SLH14081]
  misc_feature (23)..(340): NCBI GI: 226293982 Blast Desc: oxidoreductase [Paracoccidioides brasiliensis Pb18]
  misc_feature (23)..(338): NCBI GI: 240106044 Blast Desc: 1-aminocyclopropane-1-carboxylate oxidase, [Coccidioides posadasii C735 delta SOWgp]
  misc_feature (23)..(340): NCBI GI: 225558377 Blast Desc: oxidoreductase [Ajellomyces capsulatus G186AR]
  misc_feature (23)..(340): NCBI GI: 67515813 Blast Desc: AN0188.2 [Aspergillus nidulans FGSC A4] gi|40746905|gb|EAA66061.1| AN0188.2 [Aspergillus nidulans FGSC A4]
  misc_feature (23)..(340): NCBI GI: 259489603 Blast Desc: TPA: oxidoreductase, 2OG-Fe(II) oxygenase family, (AFU_orthologue; AFUA_5G11160) [Aspergillus nidulans FGSC A4]
  misc_feature (20)..(313): SWISSPROT Homolog: EC 1.14.11.15 Gibberellin 3-beta-dioxygenase
MTAPKSARVPIRSEIPFSGASTRVIKSARDIGFFRVDLRDSEIGQKFLAAADNMFSLAEDVFDLPSETKLNDSFLKHGDALLGYKGLGASVVDKEGTRDNNEQYWIGCGDIEGVGKSKAVYNDIIRERNDKLREFIDLGKAVSDRFLHIFSAVLGLAPEDPDHLTKLHSHSNNSGSHVRLLKCPPPPEGAQINLQPHTDWGTLTVLFNSLGGLQIYMPEQLVSPGESAGWKYVKPEPGCAIFNLGDAFVKWSDGELKSTIHRVAPPPGDQIKCMRYSLAYFTRPNHDVVLKPLGRKMAPVAAGKEEYPTFKEWALRRAMAGRSDSFKKGDWEKGQGTETVMSQQARLVV

SEQ ID NO: 1036 - DNA, 1672 bp, Muscodor strobelii
  misc_feature: SGI EST ID NO. CUFF.2923.1
  misc_feature: Variant of the nucleotide sequence at SEQ ID NO 1034
gatggccgggttgcgtgtacaaggggcagaagcagtgattgcgacgtgtgttgcttcgtcgcatcacatcttgccccctaggtcatacattttatgagttcaaggatcagcgaaacatcagggtaacacaccatatcgaaggcgagccggcgtctcactagtaagcttactcttcgtcgctcgtcggtaccattcccaagtccggctgcaccggttcagaccggattgttgtgcatatataaacttcgatggcccggagcgaggctccacatgttaccgattaccccgaaaccgagaccgaggtcccgactcccgtagccatttcacgtgtccccagtgctgcgtgtcccttcgaacatccgagtttgagattatatctacgtccaagactacgtagcagctgcctgtcgcctaatcaaagtgcgtcgtcatccactcacgttgactgccaatcagtatacaccatgacggcccctaaatccgcccgcgtcccaatccggagcgaaatccccttttccggcgcatctacccgtcgcccacatctccaacatctcacaccagaagatcttggagggcgacatcaatgaaatatcaagggtcatcaagtccgccagagacattggcttcttccgtgtcgatctcagggactctgagatcggccagaagttcctagcggcagcggacaacatgttttccctggccgaagatgtcttcgacctgccatccgagacgaagctcaacgacagcttcctcaagcacggcgatgccttgctgggctacaaaggcctcggcgcctcagtggtcgacaaagaaggtacgcgcgacaacaacgagcaatactggatcggctgcggcgacatcgagggtgttggcaagtccaaggccgtctacaacgacattatccgcgagcggaatgataagctgagggagttcatcgacctcggcaaggccgtctccgatcgtttcctgcacatcttctcggccgtcttgggactcgcgcccgaggaccccgatcacttgaccaagctgcacagccacagcaacaactcgggcagccacgtccgcttgctcaagtgtccgcctccgcctgagggtgcgcagattaacctgcagccgcacactgactggggcaccctcaccgtcctcttcaacagcctaggcggtctccagatctacatgcccgagcaactggtcagcccgggcgagtcagcgggctggaagtacgtgaagcccgagccaggttgcgccatcttcaacctgggcgacgcctttgtcaagtggtcggacggcgagcttaagagcacgatccaccgcgtcgcgccgccgcccggcgaccagatcaagtgcatgcgctacagcctggcgtacttcacgcgccccaaccacgacgtcgtgctcaagccgctgggccggaagatggcccccgtcgcggccggcaaggaggagtatcccactttcaaggagtgggcgctccgaagggctatggccggcagatcggactccttcaagaagggagattgggagaaagggcaggggacggagactgtcatgagtcagcaggctagacttgttgtctgagtcaacacaaacgttgaagacatgattactgtatataagattcaatgattacgggacattttttagatgtgtatatgttaaaatgaaattgctg

SEQ ID NO: 1037 - DNA, 933 bp, Muscodor strobelii
  misc_feature: SGI cDNA ID NO. 559933
  misc_feature: Encodes the peptide sequence at SEQ ID NO 1038
atgtcttcgctagatgcgtctaagctcttctccgtcaacggcctcgtcgccgtcgtgacaggcggcggcaccggtattgggctcatgatcgcccgtgccctcgaacacaacggcgccaaggtctacatcctcggtagacgtgaggacatcttgaagaacgcctgtgagagaaatgccatccacggcaatttcttctatgtggtggctgacgtgacagacaaagtctcgctcgacgcggcagtctcaaaaatcaaggaggagacggggttcatcaacctgctcgtgaacaacgccggcacgctgggccggcgccataatgccctcacgcggcccaagcccttcgacaacctgcccggccaattcgtgcacaatgacccggagcatgacctcagcaccgtcgacggcgtgcgggatttcctctggaaagacgaggtatccgactgggacgccacgatgcgcaccaacgtcagcggcgtctggttcccttccatcgccttcatgtccctcctcaacaagggcaacgagaagaataacgtcgtctcccagtcccagatcgtgaccgtcggcagtgtcggcgccttcatccgcatcctgggcacgtcctttacgtacaaccccagcaaggcggccgcaaatcacctgggcaagatgatggcgaccaacttcatgcagtggggcatccggtctaacatcatcgccccgggagtgtatccttccgagatgtcggtcgggaaggggaacttggatgagcagaacatgaatcacatccctattgcactccccgtcgaggagattcctttgggccgagcgggtgacgaggaggatatggcggcggcgatactgtacctcgctggtgctggaggcaagtacctgaatggtactgtcattgtgacagatggtggaaggactggtatcggtcctgctgtctattag

SEQ ID NO: 1038 - protein, 310 aa, Muscodor strobelii
  misc_feature: SGI Peptide ID NO. 559933
  misc_feature (15)..(223): Pfam Id: PF00106 Pfam Desc: short chain dehydrogenase
  misc_feature (15)..(101): Pfam Id: PF00106 Pfam Desc: short chain dehydrogenase
  misc_feature (2)..(310): NCBI GI: 256722810 Blast Desc: NECHADRAFT_97506 [Nectria haematococca mpVI 77-13-4]
  misc_feature (1)..(310): NCBI GI: 189205264 Blast Desc: short chain dehydrogenase/reductase [Pyrenophora tritici-repentis Pt-1C-BFP] gi|187986066|gb|EDU51554.1| short chain dehydrogenase/reductase [Pyrenophora tritici-repentis
  misc_feature (2)..(308): NCBI GI: 256724230 Blast Desc: NECHADRAFT_64691 [Nectria haematococca mpVI 77-13-4]
  misc_feature (1)..(310): NCBI GI: 212535152 Blast Desc: short chain dehydrogenase/reductase family [Penicillium marneffei ATCC 18224] gi|210070131|gb|EEA24221.1| short chain dehydrogenase/reductase family [Penicillium marneffei
  misc_feature (1)..(310): NCBI GI: 169614674 Blast Desc: SNOG_10483 [Phaeosphaeria nodorum SN15] gi|111060757|gb|EAT81877.1| SNOG_10483 [Phaeosphaeria nodorum SN15]
  misc_feature (1)..(310): NCBI GI: 70997309 Blast Desc: short chain dehydrogenase/reductase family [Aspergillus fumigatus Af293] gi|66851040|gb|EAL91366.1| short chain dehydrogenase/reductase family [Aspergillus fumigatus short
  misc_feature (1)..(310): NCBI GI: 115387385 Blast Desc: conserved [Aspergillus terreus NIH2624] gi|114195282|gb|EAU36982.1| conserved [Aspergillus terreus NIH2624]
  misc_feature (2)..(310): NCBI GI: 154312001 Blast Desc: BC1G_06034 [Botryotinia fuckeliana B05.10] gi|150850684|gb|EDN25877.1| BC1G_06034 [Botryotinia fuckeliana B05.10]
  misc_feature (1)..(310): NCBI GI: 242792187 Blast Desc: short chain dehydrogenase/reductase family [Talaromyces stipitatus ATCC 10500] gi|218718490|gb|EED17910.1| short chain dehydrogenase/reductase family [Talaromyces ATCC
  misc_feature (2)..(307): NCBI GI: 46114952 Blast Desc: FG03318.1 [Gibberella zeae PH-1]
  misc_feature (32)..(301): SWISSPROT Homolog: EC 1.1.1.100 3-oxoacyl-[acyl-carrier-protein] reductase
MSSLDASKLFSVNGLVAVVTGGGTGIGLMIARALEHNGAKVYILGRREDILKNACERNAIHGNFFYVVADVTDKVSLDAAVSKIKEETGFINLLVNNAGTLGRRHNALTRPKPFDNLPGQFVHNDPEHDLSTVDGVRDFLWKDEVSDWDATMRTNVSGVWFPSIAFMSLLNKGNEKNNVVSQSQIVTVGSVGAFIRILGTSFTYNPSKAAANHLGKMMATNFMQWGIRSNIIAPGVYPSEMSVGKGNLDEQNMNHIPIALPVEEIPLGRAGDEEDMAAAILYLAGAGGKYLNGTVIVTDGGRTGIGPAVY

SEQ ID NO: 1039 - DNA, 648 bp, Muscodor strobelii
  misc_feature: SGI cDNA ID NO. 559934
  misc_feature: Encodes the peptide sequence at SEQ ID NO 1040
atgaagctcctctgccttcacggctaccagcagtccgctgccatcatgaagtctgagacaaactttctcaagcccgtcatcgagcgcgccatcggcgagactgtgtccttcttttacgcccagggcccttacgcctctactcccacagcctcgggtgagccgacctacgcctggtggcccagtgaccaaaagactaccgacatcggcacctttgcgtacctcgcgtccgtgctgaacaccgagggccccttcgacggcatcgtcggcttctcgcagggcggcagcgtgggttccctactcgccgccttcctcgagcgcccgccggcccgtgcccgcccgtccaacttccacagcgaccacccgccaatgcagttcgtcgtgtcatatagcgggtaccacgaggacgatgagaggttgcagccgtactacgccgataagatccgcacgccgatcctgcacttcatctgctcgacggaccccatcatggccgaggagcggtgcttccggcttgtgcgccggtgcgccgacactgaggaccgcgtcgtcgtgtacccgggctcgggcttccaccgcgtgccaacgaccaagatgacgggccagtcgctgtcgaggttcttaggggaggtcttagatgttgaagcttattaa

SEQ ID NO: 1040 - protein, 215 aa, Muscodor strobelii
  misc_feature: SGI Peptide ID NO. 559934
  misc_feature (1)..(215): Pfam Id: PF03959 Pfam Desc: Serine hydrolase (FSH1)
  misc_feature (82)..(132): Pfam Id: PF03959 Pfam Desc: Serine hydrolase (FSH1)
  misc_feature (3)..(175): NCBI GI: 169616204 Blast Desc: SNOG_11274 [Phaeosphaeria nodorum SN15] gi|111059862|gb|EAT80982.1| SNOG_11274 [Phaeosphaeria nodorum SN15]
  misc_feature (1)..(210): NCBI GI: 169596000 Blast Desc: SNOG_00747 [Phaeosphaeria nodorum SN15] gi|160701206|gb|EAT92242.2| SNOG_00747 [Phaeosphaeria nodorum SN15]
  misc_feature (1)..(210): NCBI GI: 189202014 Blast Desc: dihydrofolate reductase [Pyrenophora tritici-repentis Pt-1C-BFP] gi|187984442|gb|EDU49930.1| dihydrofolate reductase [Pyrenophora tritici-repentis Pt-1C-BFP]
  misc_feature (1)..(211): NCBI GI: 226279331 Blast Desc: dihydrofolate reductase [Paracoccidioides brasiliensis Pb01]
  misc_feature (1)..(196): NCBI GI: 242813102 Blast Desc: dihydrofolate reductase [Talaromyces stipitatus ATCC 10500] gi|218714437|gb|EED13860.1| dihydrofolate reductase [Talaromyces stipitatus ATCC 10500]
  misc_feature (1)..(196): NCBI GI: 212544648 Blast Desc: dihydrofolate reductase [Penicillium marneffei ATCC 18224] gi|210065447|gb|EEA19541.1| dihydrofolate reductase [Penicillium marneffei ATCC 18224]
  misc_feature (1)..(211): NCBI GI: 261193755 Blast Desc: dihydrofolate reductase [Ajellomyces dermatitidis SLH14081] gi|239588888|gb|EEQ71531.1| dihydrofolate reductase [Ajellomyces dermatitidis SLH14081]
  misc_feature (1)..(211): NCBI GI: 239613791 Blast Desc: dihydrofolate reductase [Ajellomyces dermatitidis ER-3]
  misc_feature (1)..(211): NCBI GI: 159127957 Blast Desc: dihydrofolate reductase [Aspergillus fumigatus A1163]
  misc_feature (1)..(211): NCBI GI: 119493106 Blast Desc: dihydrofolate reductase [Neosartorya fischeri NRRL 181] gi|119411949|gb|EAW21892.1| dihydrofolate reductase [Neosartorya fischeri NRRL 181]
  misc_feature (1)..(206): SWISSPROT Homolog: EC 1.5.1.3 Dihydrofolate reductase
MKLLCLHGYQQSAAIMKSETNFLKPVIERAIGETVSFFYAQGPYASTPTASGEPTYAWWPSDQKTTDIGTFAYLASVLNTEGPFDGIVGFSQGGSVGSLLAAFLERPPARARPSNFHSDHPPMQFVVSYSGYHEDDERLQPYYADKIRTPILHFICSTDPIMAEERCFRLVRRCADTEDRVVVYPGSGFHRVPTTKMTGQSLSRFLGEVLDVEAY

SEQ ID NO: 1041 - DNA, 1789 bp, Muscodor strobelii
  misc_feature: SGI EST ID NO. CUFF.2938.0
  misc_feature: Variant of the nucleotide sequence at SEQ ID NO 1039
aattgacgggcgacggaattatggaatcagtacctattaatagtaggctggggtaagcgtcagcttatctgtatactccacgtggtgcatggtgcggcacagtggtcccctccccagtatatattcggctgcaatcctttgcggctctacctgagattctagacttctgccccttgccgaacgctggggtcgagcacaaagtccatgcatactcaaagcatggcacttagctaatcaaccgatcgccgacatatgccggtctcaggtcgccacgccgtactaggtatgtatagccctggtgagtgcgttcgaggccgaagcaacaagcgtagtgccgagaacagccgaggaccccggcaccccccggactatgtttaagcttgatttaagcttaatttaagcttaatttaagcttgatgatcctccctcgggaggggttgagaagagccaatcccagacttgatcgcgacttgagcctcatactagcgacacgacaccaaaacccaacggcccaagatgaagctcctctgccttcacggctaccagcagtccgctgccatcatgaagtctgagacaaactttctcaagcccgtcatcgagcgcgccatcggcgagactgtgtccttcttttacgcccagggcccttacgcctctactcccacagcctcgggtgagccgacctacgcctggtggcccagtgaccaaaagactaccgacatcggcacctttgcgtacctcgcgtccgtgctgaacaccgagggccccttcgacggcatcgtcggcttctcgcagggcggcagcgtgggttccctactcgccgccttcctcgagcgcccgccggcccgtgcccgcccgtccaacttccacagcgaccacccgccaatgcagttcgtcgtgtcatatagcgggtaccacgaggacgatgagaggttgcagccgtactacgccgataagatccgcacgccgatcctgcacttcatctgctcgacggaccccatcatggccgaggagcggtgcttccggcttgtgcgccggtgcgccgacactgaggaccgcgtcgtcgtgtacccgggctcgggcttccaccgcgtgccaacgaccaagatgacgggccagtcgctgtcgaggttcttaggggaggtcttagatgttgaagcttattaattgttaatctcgagagaatgggtgtgtgacgggaagaaaagtgatgagatattgattaacatgattccgcggtagagcttgactgcagttagagtttggtacgtctctttgtgttctctggtagactctacattcaaaccacatatacaatatagacatacatacatatagtacttccaaatatagttcgaactcactcttccttctctcccattatttccgtgtcggcctcttatattgagcgaattgtctgatccgtcgcaattggccatgttattagcaagccagggcctacatcgtgcaaatacgggaggaaagtgatcgcctaacatttgaagtgtcaagtaggccgttttaagactcggtaggtagagggcgggttcataataggacagtcataaataaccacaatatatctaaaccacggtgcctaattaattcttaatggtttctcaagggccgtgactatctttccattctgttgagaatcaagtgctccttttatacacataattcctcctatatcggagtggatgcctagccgtctcatccggccttctatctcgacacaatgcgcctgttctattccaaccggctctgccttgtttttgggggcttgtgttgt

SEQ ID NO: 1042 - DNA, 2286 bp, Muscodor strobelii
  misc_feature: SGI cDNA ID NO. 559935
  misc_feature: Encodes the peptide sequence at SEQ ID NO 1043
atggcaccctcgcagccgctcaccaagggccgccagcggcacgccgccgatttcatccgtagcttcacacagaaagaagccaagagccgaactgcgaagcgaccggaggccctgacggccgcacagcgcgcagccctccgcgagcagcttagggacacccagctcgtccagcctgcctatgccgacaacaccaaaatcaacattgccggcatcctacggaaatggaaaagatactgcacatctgctaagcttgtgggaacctggcgagacgtgatccagagcgcagaccgggcgatggccatggattttctagaatatttgtgtcaaacatgcaaaatcaagtcatcgggcacgtcatgggagtacttccgccagtttaagcagctacacgtcagtgccaagccgcggcagcgtatagacgaaaacgacacgaaagaagttttgaactttcataataccgtcttgatccctcggtataaattacaagcgcccaacattcggggaaaagacgtcgccgactcggatactttgctagtcctgttaacctataatctcaagttcgacaccggcatcttttcctgggaaagacatcgcttcaatctgagtggggtctaccaggggctcgccttcaccggggcacggccggccgagttcgtagacggggagaaaaagaacaaggacgagtgtttgcatgagatcttccctcgaaatgctatcgcgagcgtcggagatgacgaagaagacaaggcgcccgacgaccattctaggttgcttgaagagatgatctcgcaagagatcgcggaccgtggacgaccaaaggcgctatgttacgaagacatcctgctgatgatcgtacgccacccggaaactggcaaggacgtcctggccatggccatcaagttggcgaaccacaaaggggcagacaacaagccgaagccgaccatcttcttctttactcttgccaggaggttgattttctgtttcatcagtactattatcagcctcgccgtgcacgacggcgcgtttgcctcgtcgacactcaccagcgtcagaaaagtgttcgaggccaagaaccggggcccgctcaagtgcaccccattacgttggaaggatgagtggctcaagcggccagttttccgacgatataacgactctgcctccgaagacctacccgatgatttcgatttcgatgtatccggctgctctattgcttcagggtcgaaatatcgacctctcccgtaccatcaactaaaggacgacatgaagcgacaatcgctcgacgctggagaagagaaggcgattgaaccaaaggcctggcgtagaggagcggccaacgtagcgaacggcaacgcttccgatgctgtccgcgatcagatgatgcgtcacaacccgaagtgggccacgttcaacagtgcatatatcaacgagaaggtcggattccacctccaaaacgcattcctagacgagccgaccgaggacagtcttctcgcgatgctttcgcacataggccacatgcgcgacccccgtgcaagcaaagatatggtccccgatgagatctgggagaagatgccgcctgacccggaaatcgtcgcgctggaggcggagaggacacggctcaaaggcggccactaccgaatcagaggcacagaaaacgaggagcagattcgcgaactcactaagttaatcgcgactaaaaaggcgcaccgtaaggaagctatccgggcagattaccgggccgattatttctacaaccgaccgacctgggacatggacgccgacggggaagaggatgaggagtacgtcgagccagttatgaacctacaaatacccgagcgcgccctactcgccgccatcctcaccagccagccgcttgacttgaactcctcggagctgctcgagctccggatcaaggcggtcgagctcatggtcgccctgtgcagcaaaagagagaccaagcgaaacagcatccgacggagaataccggccggcttgaccctaaaggaggagtctcctggaccggacccttttccgctcctgatggacaggcggcaatgtccacgctgcatcggagacgaagccttgtcccacactgaaagggcgtttaagtattgccggccggcagtaatgtacgaccattttgacaagaagcacgcaagtcagctaggcggcgcgaagcagatatcgtgcaaccaccctaagtgcagacaggaggcattagattttaagcacttgaggtctttcaaaaaccatgtagagagtgtccacggtgttaaattacgtgcgtag

SEQ ID NO: 1043 - protein, 761 aa, Muscodor strobelii
  misc_feature: SGI Peptide ID NO. 559935
  misc_feature (16)..(671): NCBI GI: 261360462 Blast Desc: conserved [Verticillium albo-atrum VaMs.102]
  misc_feature (16)..(450): NCBI GI: 116207680 Blast Desc: [Chaetomium globosum CBS 148.51] gi|88183730|gb|EAQ91198.1| [Chaetomium globosum CBS 148.51]
  misc_feature (61)..(679): NCBI GI: 156050801 Blast Desc: SS1G_07988 [Sclerotinia sclerotiorum 1980] gi|154692388|gb|EDN92126.1| SS1G_07988 [Sclerotinia sclerotiorum 1980]
  misc_feature (61)..(679): NCBI GI: 156041054 Blast Desc: SS1G_11505 [Sclerotinia sclerotiorum 1980] gi|154695889|gb|EDN95627.1| SS1G_11505 [Sclerotinia sclerotiorum 1980]
  misc_feature (88)..(679): NCBI GI: 156035779 Blast Desc: SS1G_13093 [Sclerotinia sclerotiorum 1980] gi|154698498|gb|EDN98236.1| SS1G_13093 [Sclerotinia sclerotiorum 1980]
  misc_feature (541)..(761): NCBI GI: 116207680 Blast Desc: [Chaetomium globosum CBS 148.51] gi|88183730|gb|EAQ91198.1| [Chaetomium globosum CBS 148.51]
  misc_feature (150)..(545): NCBI GI: 156044628 Blast Desc: [Sclerotinia sclerotiorum 1980] gi|154694806|gb|EDN94544.1| [Sclerotinia sclerotiorum 1980]
  misc_feature (47)..(758): NCBI GI: 255943407 Blast Desc: Pc18g06450 [Penicillium chrysogenum Wisconsin 54-1255] gi|211587205|emb|CAP94869.1| Pc18g06450 [Penicillium chrysogenum Wisconsin 54-1255]
  misc_feature (25)..(757): NCBI GI: 154287344 Blast Desc: [Ajellomyces capsulatus NAm1] gi|150408108|gb|EDN03649.1| [Ajellomyces capsulatus NAm1]
  misc_feature (47)..(758): NCBI GI: 121710534 Blast Desc: conserved [Aspergillus clavatus NRRL 1] gi|119401033|gb|EAW11457.1| conserved [Aspergillus clavatus NRRL 1]
MAPSQPLTKGRQRHAADFIRSFTQKEAKSRTAKRPEALTAAQRAALREQLRDTQLVQPAYADNTKINIAGILRKWKRYCTSAKLVGTWRDVIQSADRAMAMDFLEYLCQTCKIKSSGTSWEYFRQFKQLHVSAKPRQRIDENDTKEVLNFHNTVLIPRYKLQAPNIRGKDVADSDTLLVLLTYNLKFDTGIFSWERHRFNLSGVYQGLAFTGARPAEFVDGEKKNKDECLHEIFPRNAIASVGDDEEDKAPDDHSRLLEEMISQEIADRGRPKALCYEDILLMIVRHPETGKDVLAMAIKLANHKGADNKPKPTIFFFTLARRLIFCFISTIISLAVHDGAFASSTLTSVRKVFEAKNRGPLKCTPLRWKDEWLKRPVFRRYNDSASEDLPDDFDFDVSGCSIASGSKYRPLPYHQLKDDMKRQSLDAGEEKAIEPKAWRRGAANVANGNASDAVRDQMMRHNPKWATFNSAYINEKVGFHLQNAFLDEPTEDSLLAMLSHIGHMRDPRASKDMVPDEIWEKMPPDPEIVALEAERTRLKGGHYRIRGTENEEQIRELTKLIATKKAHRKEAIRADYRADYFYNRPTWDMDADGEEDEEYVEPVMNLQIPERALLAAILTSQPLDLNSSELLELRIKAVELMVALCSKRETKRNSIRRRIPAGLTLKEESPGPDPFPLLMDRRQCPRCIGDEALSHTERAFKYCRPAVMYDHFDKKHASQLGGAKQISCNHPKCRQEALDFKHLRSFKNHVESVHGVKLRA

SEQ ID NO: 1044 - DNA, 2725 bp, Muscodor strobelii
  misc_feature: SGI EST ID NO. CUFF.3117.1
  misc_feature: Variant of the nucleotide sequence at SEQ ID NO 1042
ttttcagaaagcagctgtccatgatccaggattcagttcaatattgaccttccacttctccagccagctcagcgcgacatgaaaaatggcagctgtcgcacttttcgtcgttcctacctcatccagggcttcacgcagagtggatgacccttatcgcttaatgccatcctcatggcaccctcgcagccgctcaccaagggccgccagcggcacgccgccgatttcatccgtagcttcacacagaaagaagccaagagccgaactgcgaagcgaccggaggccctgacggccgcacagcgcgcagccctccgcgagcagcttagggacacccagctcgtccagcctgcctatgccgacaacaccaaaatcaacattgccggcatcctacggaaatggaaaagatactgcacatctgctaagcttgtgggaacctggcgagacgtgatccagagcgcagaccgggcgatggccatggattttctagaatatttgtgtcaaacatgcaaaatcaagtcatcgggcacgtcatgggagtacttccgccagtttaagcagctacacgtcagtgccaagccgcggcagcgtatagacgaaaacgacacgaaagaagttttgaactttcataataccgtcttgatccctcggtataaattacaagcgcccaacattcggggaaaagacgtcgccgactcggatactttgctagtcctgttaacctataatctcaagttcgacaccggcatcttttcctgggaaagacatcgcttcaatctgagtggggtctaccaggggctcgccttcaccggggcacggccggccgagttcgtagacggggagaaaaagaacaaggacgagtgtttgcatgagatcttccctcgaaatgctatcgcgagcgtcggagatgacgaagaagacaaggcgcccgacgaccattctaggttgcttgaagagatgatctcgcaagagatcgcggaccgtggacgaccaaaggcgctatgttacgaagacatcctgctgatgatcgtacgccacccggaaactggcaaggacgtcctggccatggccatcaagttggcgaaccacaaaggggcagacaacaagccgaagccgaccatcttcttctttactcttgccaggaggttgattttctgtttcatcagtactattatcagcctcgccgtgcacgacggcgcgtttgcctcgtcgacactcaccagcgtcagaaaagtgttcgaggccaagaaccggggcccgctcaagtgcaccccattacgttggaaggatgagtggctcaagcggccagttttccgacgatataacgactctgcctccgaagacctacccgatgatttcgatttcgatgtatccggctgctctattgcttcagggtcgaaatatcgacctctcccgtaccatcaactaaaggacgacatgaagcgacaatcgctcgacgctggagaagagaaggcgattgaaccaaaggcctggcgtagaggagcggccaacgtagcgaacggcaacgcttccgatgctgtccgcgatcagatgatgcgtcacaacccgaagtgggccacgttcaacagtgcatatatcaacgagaaggtcggattccacctccaaaacgcattcctagacgagccgaccgaggacagtcttctcgcgatgctttcgcacataggccacatgcgcgacccccgtgcaagcaaagatatggtccccgatgagatctgggagaagatgccgcctgacccggaaatcgtcgcgctggaggcggagaggacacggctcaaaggcggccactaccgaatcagaggcacagaaaacgaggagcagattcgcgaactcactaagttaatcgcgactaaaaaggcgcaccgtaaggaagctatccgggcagattaccgggccgattatttctacaaccgaccgacctgggacatggacgccgacggggaagaggatgaggagtacgtcgagccagttatgaacctacaaatacccgagcgcgccctactcgccgccatcctcaccagccagccgcttgacttgaactcctcggagctgctcgagctccggatcaaggcggtcgagctcatggtcgccctgtgcagcaaaagagagaccaagcgaaacagcatccgacggagaataccggccggcttgaccctaaaggaggagtctcctggaccggacccttttccgctcctgatggacaggcggcaatgtccacgctgcatcggagacgaagccttgtcccacactgaaagggcgtttaagtattgccggccggcagtaatgtacgaccattttgacaagaagcacgcaagtcagctaggcggcgcgaagcagatatcgtgcaaccaccctaagtgcagacaggaggcattagattttaagcacttgaggtctttcaaaaaccatgtagagagtgtccacggtgttaaattacgtgcgtagctataatgtagaccgaactggcttaactaatacccaaaccttgcaactctgtctaaaatccttgcccaagccgttatggcaacaagatttcaggcgtaatactgtaagcaattttgtctctttcgaaggcggcgcatgagacaaggggcctttatggttatgaatctcatcgctagtgtcaaacataagtccatgaccgagcctcacgccggtaagaaaggatgtgcccctttgtcgtggttgtccaagcacggtggcggccttgtcg

SEQ ID NO: 1045 - DNA, 1104 bp, Muscodor strobelii
  misc_feature: SGI cDNA ID NO. 559936
  misc_feature: Encodes the peptide sequence at SEQ ID NO 1046
atgcaaacagacggcggtgtcagtctgttccaaaacttgtatatcgacaacaaaacccggaatccaaaggttaagggtgtgaatgactttcaaaacaatatcgtgtataactggggcggtggtggtggatacattgcgggagacagcgatgggcaaagctacgcaaacgtgatcaataactattttatctcaggacctagtacaagtgtgacggcgtttacgagaggcaacgcgaatttccacgggtatgtgtcgaacaacttctacgattccaaccaaaatggtgtgcttgacggtaccgctctatgtgtcaaaaccacctgttatagcgacatggatatcgtcggcactgcttatgcatatccggctccggtcaatctcctaagcccagcagatgctgtgacttacgtactcgccaatgtcggatccacgtaccctcagcgcgatagtgttgatattaagcttgtggccgaagtgaaaacatggggaaagggtggtcaacttatcagcgacgagacggcctcgcctatgtacgggccaggattcataaatagtggaacaaagcctctggacacggacggcgatggtattccggacgcatgggagaaagcgaacggattgaactaccaagatgcgagcgatgccatgaagattagcagttctggcaagaactcatccaagcgacccgacccaaaacagtacgctcacagtttctccaaccggaccgaatgtaagttcatcccttccgctatagtcatctacttcatttctcacactagcagcccgcttgatttccgcctcatgccgaccgccgcgccccccgaccccgcggggcggtttcgacgggtccagataggcggagatgggtatgccgagaattacaccaaggccgagccgagagacgctgttagagatgccctcatgttccctgtccctgtctacgagctcagcgggcccgcagctggtagtgcggaattccgagccgacggtctcctccacgccatttgctgggtcagacacgtcatgcagcatctccacaagatagcaagaattgcctgttaccctgccgcctctggtcatggcggtattggtctggctatgtaa

SEQ ID NO: 1046 - protein, 367 aa, Muscodor strobelii
  misc_feature: SGI Peptide ID NO. 559936
  misc_feature (1)..(222): NCBI GI: 256732289 Blast Desc: NECHADRAFT_80736 [Nectria haematococca mpVI 77-13-4]
  misc_feature (1)..(222): NCBI GI: 119473327 Blast Desc: NFIA_060270 [Neosartorya fischeri NRRL 181] gi|119406720|gb|EAW16671.1| conserved [Neosartorya fischeri NRRL 181]
  misc_feature (1)..(222): NCBI GI: 255936275 Blast Desc: Pc13g07340 [Penicillium chrysogenum Wisconsin 54-1255] gi|211583784|emb|CAP91803.1| Pc13g07340 [Penicillium chrysogenum Wisconsin 54-1255]
  misc_feature (1)..(222): NCBI GI: 70992931 Blast Desc: conserved [Aspergillus fumigatus Af293] gi|66848947|gb|EAL89276.1| conserved [Aspergillus fumigatus Af293]
  misc_feature (1)..(222): NCBI GI: 159130233 Blast Desc: conserved [Aspergillus fumigatus A1163]
  misc_feature (1)..(222): NCBI GI: 115398107 Blast Desc: conserved [Aspergillus terreus NIH2624] gi|114192836|gb|EAU34536.1| conserved [Aspergillus terreus NIH2624]
  misc_feature (1)..(222): NCBI GI: 238502337 Blast Desc: conserved [Aspergillus flavus NRRL3357] gi|220691212|gb|EED47560.1| conserved [Aspergillus flavus NRRL3357]
  misc_feature (1)..(222): NCBI GI: 169775697 Blast Desc: [Aspergillus oryzae RIB40] gi|83771050|dbj|BAE61182.1| protein product [Aspergillus oryzae]
  misc_feature (1)..(221): NCBI GI: 67538326 Blast Desc: AN5333.2 [Aspergillus nidulans FGSC A4] gi|40743303|gb|EAA62493.1| AN5333.2 [Aspergillus nidulans FGSC A4] gi|259485226|tpe|CBF82085.1| TPA: pectate lyase (Eurofung)
  misc_feature (1)..(202): NCBI GI: 169618908 Blast Desc: SNOG_12646 [Phaeosphaeria nodorum SN15] gi|111058824|gb|EAT79944.1| SNOG_12646 [Phaeosphaeria nodorum SN15]
MQTDGGVSLFQNLYIDNKTRNPKVKGVNDFQNNIVYNWGGGGGYIAGDSDGQSYANVINNYFISGPSTSVTAFTRGNANFHGYVSNNFYDSNQNGVLDGTALCVKTTCYSDMDIVGTAYAYPAPVNLLSPADAVTYVLANVGSTYPQRDSVDIKLVAEVKTWGKGGQLISDETASPMYGPGFINSGTKPLDTDGDGIPDAWEKANGLNYQDASDAMKISSSGKNSSKRPDPKQYAHSFSNRTECKFIPSAIVIYFISHTSSPLDFRLMPTAAPPDPAGRFRRVQIGGDGYAENYTKAEPRDAVRDALMFPVPVYELSGPAAGSAEFRADGLLHAICWVRHVMQHLHKIARIACYPAASGHGGIGLAM

SEQ ID NO: 1047 - DNA, 742 bp, Muscodor strobelii
  misc_feature: SGI EST ID NO. CUFF.2904.0
  misc_feature: Variant of the nucleotide sequence at SEQ ID NO 1045
atcgacaacaaaacccggaatccaaaggttaagggtgtgaatgactttcaaaacaatatcgtgtataactggggcggtggtggtggatacattgcgggagacagcgatgggcaaagctacgcaaacgtgatcaataactattttatctcaggacctagtacaagtgtgacggcgtttacgagaggcaacgcgaatttccacgggtatgtgtcgaacaacttctacgattccaaccaaaatggtgtgcttgacggtaccgctctatgtgtcaaaaccacctgttatagcgacatggatatcgtcggcactgcttatgcatatccggctccggtcaatctcctaagcccagcagatgctgtgacttacgtactcgccaatgtcggatccacgtaccctcagcgcgatagtgttgatattaagcttgtggccgaagtgaaaacatggggaaagggtggtcaacttatcagcgacgagacggcctcgcctatgtacgggccaggattcataaatagtggaacaaagcctctggacacggacggcgatggtattccggacgcatgggagaaagcgaacggattgaactaccaagatgcgagcgatgccatgaagattagcagttctgggtatgcaaatattgagctgtatctcaactcgctagtgccttcttcatagttatcggtattcgcgtagagatcgttgatgctaggacaggtgatgcagcaagaactcagtgcgttttttt

SEQ ID NO: 1048 - DNA, 1365 bp, Muscodor strobelii
  misc_feature: SGI cDNA ID NO. 559937
  misc_feature: Encodes the peptide sequence at SEQ ID NO 1049
atggcagatatagaagaagctgcagtaccacttccatcggcacctattgcgaggctagcgacaaacgcggttctacagccacccctcacccgccgtggctacggaccgggtctcatcattatcacacccggtctttcgcccacagaccacggcaagaagcaaacggccaactcacccaccaatcctggctcacttgatcccttacctcagaagaaatgggccgaggaaggatatgccgtcgtgcaacttgcgtttggggatgggaaacaaactagtgatgattggagcattgaagcaggtctcggctgcgcgattgaagcacttcaaaacttagagacatgtaacgtagctgagatattcggactcattggcaagcttctctttttctctttttcatcacaatacgcaaaagaacaccattctgactattctatagtctacggcacaccttcagaatatagctcagacttcgcatcaaagctgaagtcatcttatgaagcaggaagcaaacttatagccgcggtctgcttcagtctcgattggaacttatcacttaagcctgaattagtacacgtccccggggaaccaggtccaccgcgtcgggcttcactcccatccggtcgacctcacacgcggcgacatcattacatctcggccagaagcgcttcattcgtcctcccagattctccagatttcgactacaatgccgcaagtaacgcccatgcccgcagtctctcattccttaaagcgcaactcggcggtccaatctatgacttagaagctatatgggatgagcataccgctctcgagtttgcgactcgttccgtggcgcagaccatgggcacgatggtcgatgaaccgtacgtgaaccacgtacctacgattatgggcggaataggtcgagaggcgctcacaaaattctatcgcaatcacttcattttcaataatccggaggacatggcactcgagctcgttagcaggacagtgggggtgaatcgcgtgattgatgagttcatcgctgtttgtactcacgatcgtgttattgactggctactcccaggcgtcccgccaacgggcaagaaactgcgcatgccgtttgtttccgtggttaatatcaggggcgatagactatatcatgagcatattcactgggatcaagggactgtgctcaggcagcttgggcttttgccggagtatctcccgtttccttatgcgctacctgatgggaggacgcctgcgcctgggaagagatttgagtatcgtgttcctgttgctggttatgacacggcttcaaaattacagggtgagggtgaggtgcacagtaatgagatgcttgggtttgatgttagggaagtcgatgtctga

SEQ ID NO: 1049 - protein, 454 aa, Muscodor strobelii
  misc_feature: SGI Peptide ID NO. 559937
  misc_feature (354)..(393): Pfam Id: PF07366 Pfam Desc: SnoaL-like polyketide cyclase
  misc_feature (4)..(453): NCBI GI: 259485180 Blast Desc: TPA: conserved [Aspergillus nidulans FGSC A4]
  misc_feature (11)..(453): NCBI GI: 70992835 Blast Desc: conserved [Aspergillus fumigatus Af293] gi|66848899|gb|EAL89228.1| conserved [Aspergillus fumigatus Af293] gi|159130280|gb|EDP55393.1| conserved [Aspergillus A1163]
  misc_feature (23)..(453): NCBI GI: 119473183 Blast Desc: NFIA_059870 [Neosartorya fischeri NRRL 181] gi|119406681|gb|EAW16632.1| conserved [Neosartorya fischeri NRRL 181]
  misc_feature (11)..(453): NCBI GI: 121700346 Blast Desc: conserved [Aspergillus clavatus NRRL 1] gi|119396580|gb|EAW07012.1| conserved [Aspergillus clavatus NRRL 1]
  misc_feature (4)..(452): NCBI GI: 67538412 Blast Desc: AN5376.2 [Aspergillus nidulans FGSC A4] gi|40743346|gb|EAA62536.1| AN5376.2 [Aspergillus nidulans FGSC A4]
  misc_feature (3)..(453): NCBI GI: 240107415 Blast Desc: CPC735_067000 [Coccidioides posadasii C735 delta SOWgp]
  misc_feature (11)..(453): NCBI GI: 145240593 Blast Desc: An08g08300 [Aspergillus niger] gi|134077466|emb|CAK40031.1| protein product [Aspergillus niger]
  misc_feature (8)..(451): NCBI GI: 115390302 Blast Desc: ATEG_03478 [Aspergillus terreus NIH2624] gi|114195052|gb|EAU36752.1| ATEG_03478 [Aspergillus terreus NIH2624]
  misc_feature (3)..(453): NCBI GI: 119191053 Blast Desc: CIMG_05574 [Coccidioides immitis RS]
  misc_feature (19)..(453): NCBI GI: 255946672 Blast Desc: Pc22g00580 [Penicillium chrysogenum Wisconsin 54-1255] gi|211591120|emb|CAP97346.1| Pc22g00580 [Penicillium chrysogenum Wisconsin 54-1255]
  misc_feature: Useful for fungicidal and/or biocontrol applications
MADIEEAAVPLPSAPIARLATNAVLQPPLTRRGYGPGLIIITPGLSPTDHGKKQTANSPTNPGSLDPLPQKKWAEEGYAVVQLAFGDGKQTSDDWSIEAGLGCAIEALQNLETCNVAEIFGLIGKLLFFSFSSQYAKEHHSDYSIVYGTPSEYSSDFASKLKSSYEAGSKLIAAVCFSLDWNLSLKPELVHVPGEPGPPRRASLPSGRPHTRRHHYISARSASFVLPDSPDFDYNAASNAHARSLSFLKAQLGGPIYDLEAIWDEHTALEFATRSVAQTMGTMVDEPYVNHVPTIMGGIGREALTKFYRNHFIFNNPEDMALELVSRTVGVNRVIDEFIAVCTHDRVIDWLLPGVPPTGKKLRMPFVSVVNIRGDRLYHEHIHWDQGTVLRQLGLLPEYLPFPYALPDGRTPAPGKRFEYRVPVAGYDTASKLQGEGEVHSNEMLGFDVREVDV

SEQ ID NO: 1050 - DNA, 1532 bp, Muscodor strobelii
  misc_feature: SGI EST ID NO. CUFF.2917.0
  misc_feature: Variant of the nucleotide sequence at SEQ ID NO 1048
attcaacatatctaacttttaattgcccaggacaattcgatataggtccccgttatggcagatatagaagaagctgcagtaccacttccatcggcacctattgcgaggctagcgacaaacgcggttctacagccacccctcacccgccgtggctacggaccgggtctcatcattatcacacccggtctttcgcccacagaccacggcaagaagcaaacggccaactcacccaccaatcctggctcacttgatcccttacctcagaagaaatgggccgaggaaggatatgccgtcgtgcaacttgcgtttggggatgggaaacaaactagtgatgattggagcattgaagcaggtctcggctgcgcgattgaagcacttcaaaacttagagacatgtaacgtagctgagatattcggactcattgtctacggcacaccttcagaatatagctcagacttcgcatcaaagctgaagtcatcttatgaagcaggaagcaaacttatagccgcggtctgcttcagtctcgattggaacttatcacttaagcctgaattagtacacgtccccggggaaccaggtccaccgcgtcgggcttcactcccatccggtcgacctcacacgcggcgacatcattacatctcggccagaagcgcttcattcgtcctcccagattctccagatttcgactacaatgccgcaagtaacgcccatgcccgcagtctctcattccttaaagcgcaactcggcggtccaatctatgacttagaagctatatgggatgagcataccgctctcgagtttgcgactcgttccgtggcgcagaccatgggcacgatggtcgatgaaccgtacgtgaaccacgtacctacgattatgggcggaataggtcgagaggcgctcacaaaattctatcgcaatcacttcattttcaataatccggaggacatggcactcgagctcgttagcaggacagtgggggtgaatcgcgtgattgatgagttcatcgctgtttgtactcacgatcgtgttattgactggctactcccaggcgtcccgccaacgggcaagaaactgcgcatgccgtttgtttccgtggttaatatcaggggcgatagactatatcatgagcatattcactgggatcaagggactgtgctcaggcagcttgggcttttgccggagtatctcccgtttccttatgcgctacctgatgggaggacgcctgcgcctgggaagagatttgagtatcgtgttcctgttgctggttatgacacggcttcaaaattacagggtgagggtgaggtgcacagtaatgagatgcttgggtttgatgttagggaagtcgatgtctgataaagtttgagcttggggtgcgttgatggatgatacttcctccagttcgcctataatcattaggttaacttcatcagccttgggattgcatatgtgaatgatgtcgccgacgcgtaactcatcataacgcgattaggtctaacgcaaacagttagaacgacagacagtataattgtgat

SEQ ID NO: 1051 - DNA, 1299 bp, Muscodor strobelii
  misc_feature: SGI cDNA ID NO. 559938
  misc_feature: Encodes the peptide sequence at SEQ ID NO 1052
atggcagatatagaagaagctgcagtaccacttccatcggcacctattgcgaggctagcgacaaacgcggttctacagccacccctcacccgccgtggctacggaccgggtctcatcattatcacacccggtctttcgcccacagaccacggcaagaagcaaacggccaactcacccaccaatcctggctcacttgatcccttacctcagaagaaatgggccgaggaaggatatgccgtcgtgcaacttgcgtttggggatgggaaacaaactagtgatgattggagcattgaagcaggtctcggctgcgcgattgaagcacttcaaaacttagagacatgtaacgtagctgagatattcggactcattgtctacggcacaccttcagaatatagctcagacttcgcatcaaagctgaagtcatcttatgaagcaggaagcaaacttatagccgcggtctgcttcagtctcgattggaacttatcacttaagcctgaattagtacacgtccccggggaaccaggtccaccgcgtcgggcttcactcccatccggtcgacctcacacgcggcgacatcattacatctcggccagaagcgcttcattcgtcctcccagattctccagatttcgactacaatgccgcaagtaacgcccatgcccgcagtctctcattccttaaagcgcaactcggcggtccaatctatgacttagaagctatatgggatgagcataccgctctcgagtttgcgactcgttccgtggcgcagaccatgggcacgatggtcgatgaaccgtacgtgaaccacgtacctacgattatgggcggaataggtcgagaggcgctcacaaaattctatcgcaatcacttcattttcaataatccggaggacatggcactcgagctcgttagcaggacagtgggggtgaatcgcgtgattgatgagttcatcgctgtttgtactcacgatcgtgttattgactggctactcccaggcgtcccgccaacgggcaagaaactgcgcatgccgtttgtttccgtggttaatatcaggggcgatagactatatcatgagcatattcactgggatcaagggactgtgctcaggcagcttgggcttttgccggagtatctcccgtttccttatgcgctacctgatgggaggacgcctgcgcctgggaagagatttgagtatcgtgttcctgttgctggttatgacacggcttcaaaattacagggtgagggtgaggtgcacagtaatgagatgcttgggtttgatgttagggaagtcgatgtctga

SEQ ID NO: 1052 - protein, 432 aa, Muscodor strobelii
  misc_feature: SGI Peptide ID NO. 559938
  misc_feature (332)..(371): Pfam Id: PF07366 Pfam Desc: SnoaL-like polyketide cyclase
  misc_feature (4)..(431): NCBI GI: 259485180 Blast Desc: TPA: conserved [Aspergillus nidulans FGSC A4]
  misc_feature (4)..(430): NCBI GI: 67538412 Blast Desc: AN5376.2 [Aspergillus nidulans FGSC A4] gi|40743346|gb|EAA62536.1| AN5376.2 [Aspergillus nidulans FGSC A4]
  misc_feature (23)..(431): NCBI GI: 119473183 Blast Desc: NFIA_059870 [Neosartorya fischeri NRRL 181] gi|119406681|gb|EAW16632.1| conserved [Neosartorya fischeri NRRL 181]
  misc_feature (11)..(431): NCBI GI: 70992835 Blast Desc: conserved [Aspergillus fumigatus Af293] gi|66848899|gb|EAL89228.1| conserved [Aspergillus fumigatus Af293] gi|159130280|gb|EDP55393.1| conserved [Aspergillus A1163]
  misc_feature (11)..(431): NCBI GI: 121700346 Blast Desc: conserved [Aspergillus clavatus NRRL 1] gi|119396580|gb|EAW07012.1| conserved [Aspergillus clavatus NRRL 1]
  misc_feature (11)..(431): NCBI GI: 145240593 Blast Desc: An08g08300 [Aspergillus niger] gi|134077466|emb|CAK40031.1| protein product [Aspergillus niger]
  misc_feature (3)..(431): NCBI GI: 240107415 Blast Desc: CPC735_067000 [Coccidioides posadasii C735 delta SOWgp]
  misc_feature (8)..(429): NCBI GI: 115390302 Blast Desc: ATEG_03478 [Aspergillus terreus NIH2624] gi|114195052|gb|EAU36752.1| ATEG_03478 [Aspergillus terreus NIH2624]
  misc_feature (3)..(431): NCBI GI: 119191053 Blast Desc: CIMG_05574 [Coccidioides immitis RS]
  misc_feature (19)..(431): NCBI GI: 255946672 Blast Desc: Pc22g00580 [Penicillium chrysogenum Wisconsin 54-1255] gi|211591120|emb|CAP97346.1| Pc22g00580 [Penicillium chrysogenum Wisconsin 54-1255]
  misc_feature: Useful for fungicidal and/or biocontrol applications
MADIEEAAVPLPSAPIARLATNAVLQPPLTRRGYGPGLIIITPGLSPTDHGKKQTANSPTNPGSLDPLPQKKWAEEGYAVVQLAFGDGKQTSDDWSIEAGLGCAIEALQNLETCNVAEIFGLIVYGTPSEYSSDFASKLKSSYEAGSKLIAAVCFSLDWNLSLKPELVHVPGEPGPPRRASLPSGRPHTRRHHYISARSASFVLPDSPDFDYNAASNAHARSLSFLKAQLGGPIYDLEAIWDEHTALEFATRSVAQTMGTMVDEPYVNHVPTIMGGIGREALTKFYRNHFIFNNPEDMALELVSRTVGVNRVIDEFIAVCTHDRVIDWLLPGVPPTGKKLRMPFVSVVNIRGDRLYHEHIHWDQGTVLRQLGLLPEYLPFPYALPDGRTPAPGKRFEYRVPVAGYDTASKLQGEGEVHSNEMLGFDVREVDV

SEQ ID NO: 1053 - DNA, 1532 bp, Muscodor strobelii; identical to SEQ ID NO: 1050
  misc_feature: SGI EST ID NO. CUFF.2917.0
  misc_feature: Variant of the nucleotide sequence at SEQ ID NO 1051

SEQ ID NO: 1054 - DNA, 1248 bp, Muscodor strobelii
  misc_feature: SGI cDNA ID NO. 559939
  misc_feature: Encodes the peptide sequence at SEQ ID NO 1055
atgaacaggacgccggacatcacgaacaacggctcgccggggaagcccagcccccagatccagccctgccgctacaaggtcggcaagacactcggcgcgggctcctactcggtcgtcaaagaatgcgttcacatcgacaccggccgctactatgccgccaaggtcatcaataagcggctgatggctggtcgcgaacacatggtccgcaacgagattgccgtccttaagaaggtgtccatgggccaccagaacatcctcacactagtcgactacttcgagaccatgaacaacctgtatctcgtgactgatctagctctcggtggtgaacttttcgaccggatctgccgtaaaggctcgtactacgagtccgacgctgccgacttgatccgtgcgaccctgtccgccgtggcctatctgcacgaccacggcatcgtacatcgtgatctcaagcccgagaacctgcttttccgcacccccgaagacaacgccgacctcctcatcgccgactttggcctctcccgcatcatggacgaggagaagttccacgtcttgaccaccacttgcggcacaccagggtatatggctccggagatcttcaagaagactggccatggtaagcccgtcgacatatgggccatgggcgtcattacgtatttcctactctgcggctacactcccttcgatcgtgacagcgactttgaggagatgcaagcgatccttaatgccgattacagcttccagccgaccgagtactggcgcggagtcagcgatcacgccaaggagttcatccgtcgatgtctcacagttgacccaaacaagcggatgacggcacatgaggctctttctcatgccttcgtaacaggagacttaaaacccgatggcgacaagggccagaacttgctgccaaccgtcaagaagaacttcaacgcgagaaaaacgctccatgctgccatcgatacagtccgcgctatcaacaaactgcgagaaggacaagcagccgctgctgcgctcatggatggatcgcgctcggccgagcctcccaaaggtgccgcacctttacccagggacagtggtgtgagtatggccaagggcgactccggctactcgagcaatcgtgatggtgacatcgagatggggggaaccgcaccgacggccgaggtgccgtcaagcttgcgacccggagcagctgtgaataaagttgtcgaaacatctaaaggcctttggagtgccagccaaccacggagatag

SEQ ID NO: 1055 - protein, 415 aa, Muscodor strobelii
  misc_feature: SGI Peptide ID NO. 559939
  misc_feature (25)..(286): Pfam Id: PF00069 Pfam Desc: Protein kinase domain
  misc_feature (15)..(415): NCBI GI: 261355048 Blast Desc: calcium/calmodulin-dependent protein kinase [Verticillium albo-atrum VaMs.102]
  misc_feature (17)..(415): NCBI GI: 164426993 Blast Desc: calcium/calmodulin-dependent protein kinase type I [Neurospora crassa OR74A] gi|157071559|gb|EAA30691.2| calcium/calmodulin-dependent protein kinase type I [Neurospora
  misc_feature (22)..(414): NCBI GI: 145610749 Blast Desc: MGG_00925 [Magnaporthe grisea 70-15] gi|145018121|gb|EDK02400.1| MGG_00925 [Magnaporthe grisea 70-15] gi|171188415|gb|ACB41780.1| calcium/calmodulin-dependent protein
  misc_feature (7)..(392): NCBI GI: 2654181 Blast Desc: calmodulin-dependent protein kinase [Colletotrichum gloeosporioides]
  misc_feature (9)..(410): NCBI GI: 154291477 Blast Desc: BC1G_15259 [Botryotinia fuckeliana B05.10] gi|150846757|gb|EDN21950.1| BC1G_15259 [Botryotinia fuckeliana B05.10]
  misc_feature (15)..(410): NCBI GI: 156039469 Blast Desc: SS1G_11871 [Sclerotinia sclerotiorum 1980] gi|154697608|gb|EDN97346.1| SS1G_11871 [Sclerotinia sclerotiorum 1980]
  misc_feature (12)..(351): NCBI GI: 46105418 Blast Desc: FG00337.1 [Gibberella zeae PH-1]
  misc_feature (14)..(351): NCBI GI: 256735338 Blast Desc: [Nectria haematococca mpVI 77-13-4]
  misc_feature (8)..(408): NCBI GI: 184186912 Blast Desc: calmodulin dependent protein kinase [Setosphaeria turcica]
  misc_feature (7)..(352): NCBI GI: 89032786 Blast Desc: Ca/Cm-dependent protein kinase B [Phaeosphaeria nodorum]
  misc_feature (19)..(329): SWISSPROT Homolog: EC 2.7.11.17 Calcium/calmodulin-dependent protein kinase
MNRTPDITNNGSPGKPSPQIQPCRYKVGKTLGAGSYSVVKECVHIDTGRYYAAKVINKRLMAGREHMVRNEIAVLKKVSMGHQNILTLVDYFETMNNLYLVTDLALGGELFDRICRKGSYYESDAADLIRATLSAVAYLHDHGIVHRDLKPENLLFRTPEDNADLLIADFGLSRIMDEEKFHVLTTTCGTPGYMAPEIFKKTGHGKPVDIWAMGVITYFLLCGYTPFDRDSDFEEMQAILNADYSFQPTEYWRGVSDHAKEFIRRCLTVDPNKRMTAHEALSHAFVTGDLKPDGDKGQNLLPTVKKNFNARKTLHAAIDTVRAINKLREGQAAAAALMDGSRSAEPPKGAAPLPRDSGVSMAKGDSGYSSNRDGDIEMGGTAPTAEVPSSLRPGAAVNKVVETSKGLWSASQPRR

SEQ ID NO: 1056 - DNA, 4048 bp, Muscodor strobelii
  misc_feature: SGI EST ID NO. CUFF.3636.2
  misc_feature: Variant of the nucleotide sequence at SEQ ID NO 1054
ctatgctcaagttcagtatggaacaaagatgacagtgccaggaaacatccctgcatgataatgttctcatcccgtatttcatcaactccttcgcgattaaacccaatgtctttagccttcctaggccgatgggctagattcagacatggctcgacgataacctcgtcggtcgtacaaacaagagcaatcagatatcaagctcacgatgcgttgctagatccggacgacctggaggaagctagaaagtggcgagcatcatttcgtgaagactctttgccaaagggccatactacatattctcgctcaagcggtccgggcggccaacacgtgaacaaaaccgaaagcaaggcaacaacagtgtggccgatccacgagcttgccaggagtcttccaaaactcatgcgatcggctttgagatcatcacgttactacaccatgggtagcgattccttcactatccatgcccagactcaacgaagcagaacggcaaacgtgacggagaatcatgacaaacttgtaaaagagctacatcgaatttacgcggagaatgtgccagagcccacgagtgtgaagaaaatcaagaagcacgaagcagcagaaaaggcttttcatgaaaataggataaaaaccaagaaattccagagcacaaaaaaagcttcccgcaaaggagggtgacgtaagtagatatgggaaacacatcaaacacgacggagttgactctatctaggtctgctcttgatggatccagattcaggcgaagagtatcgtgaagtaggtggtcttgatggcttggatgctttgaggatgtccatgcgcacgccacgcatcatggatatgacggtttctcgatgtacgtgtgcggcaaagcgcctgtgcggtgcgatgtggaaaatgcaagttgcatatgcaggacgctacgccctacagtaaaggcggtcaaggatgcttaggcatgtgaagccgatatatccgtcgccaatgtcgaaacgtgaagacatcgggcaactcggccagatacacatgtaaatacagaaacaaagcaccgtagaagtagggagttagcttaattgagtgcaaaaaaattgcgggagagttccagtagatgatcataccaccataagttaaaagacaaggtactgattgggaggatacatatgtactactgtatcaaaccactcttttgccttcgggcaacatatcagacaatctagcgcaacggcatacccccattcatttgttcagtgccgaatgagttgaacgttttttcgagcatttcgctttactccgttcactatccaccgctgggtctcgtcctgatacgagtacgccaaccctacaacaagtagagcggtgcgattaagtgccctcatcttggacgaggcctagagtgcggcaattattaacatctggagctgatatccccagcaaggacccaaggaccctgctctacgggagtaggacttgaagcaatgcggggcttgaggtatctcctaataataacccaagcccaggtcaaatgtccgtacctattctgccaacggcttcgaaatttgaaggcggggcaattctgacatcaaagtgataaagacgcagtggatgcttatgcaacctacaaacctatcaataacttgttccgttcgatcaaagcccacgacgtcgaccactttcccatggactacctcagggacctagacattgtctaagatctattcaggtcttggcaccctcgcgccactgcagcagctcttgggcgccccgcactctcatcgtcctgcatcccgcaacgcacctactgttcttgaacccctccagcaccttactcaggtcgtgcatgactcaagctgagatcaagcagagacggagtcaagtcagcccagtcaaactcataccgtaacctgtgagattttgagagcacacatcgttactcactcacttgcgcctcttccgtccttactatcgtgtcgacacggaaggtccaacatattgcgtgctgcccgcgccccgatccagaccggtcccactgacaccccgccgatcttttgggtcagcagctgcgaaccatcccgtcgcgattctaacttgccgccgcgattggcagtcccagtcccagtcccagcaatcaagtcattgttccgcatcgcgagtagctaatcgccgacggccaaccgccaacccgacatcgcctcttgtggccggatccgtcgccttcgtcgccgaccatgaacaggacgccggacatcacgaacaacggctcgccggggaagcccagcccccagatccagccctgccgctacaaggtcggcaagacactcggcgcgggctcctactcggtcgtcaaagaatgcgttcacatcgacaccggccgctactatgccgccaaggtcatcaataagcggctgatggctggtcgcgaacacatggtccgcaacgagattgccgtccttaagaaggtgtccatgggccaccagaacatcctcacactagtcgactacttcgagaccatgaacaacctgtatctcgtgactgatctagctctcggtggtgaacttttcgaccggatctgccgtaaaggctcgtactacgagtccgacgctgccgacttgatccgtgcgaccctgtccgccgtggcctatctgcacgaccacggcatcgtacatcgtgatctcaagcccgagaacctgcttttccgcacccccgaagacaacgccgacctcctcatcgccgactttggcctctcccgcatcatggacgaggagaagttccacgtcttgaccaccacttgcggcacaccagggtatatggctccggagatcttcaagaagactggccatggtaagcccgtcgacatatgggccatgggcgtcattacgtatttcctactctgcggctacactcccttcgatcgtgacagcgactttgaggagatgcaagcgatccttaatgccgattacagcttccagccgaccgagtactggcgcggagtcagcgatcacgccaaggagttcatccgtcgatgtctcacagttgacccaaacaagcggatgacggcacatgaggctctttctcatgccttcgtaacaggagacttaaaacccgatggcgacaagggccagaacttgctgccaaccgtcaagaagaacttcaacgcgagaaaaacgctccatgctgccatcgatacagtccgcgctatcaacaaactgcgagaaggacaagcagccgctgctgcgctcatggatggatcgcgctcggccgagcctcccaaaggtgccgcacctttacccagggacagtggtgtgagtatggccaagggcgactccggctactcgagcaatcgtgatggtgacatcgagatggggggaaccgcaccgacggccgaggtgccgtcaagcttgcgacccggagcagctgtgaataaagttgtcgaaacatctaaaggcctttggagtgccagccaaccacggagataggctctccgccatgataacgcatacaactttaacaacggcttggatatgggtgagcatctcctaatgcttactcacaccagccacatcgagcatcgaacttgcaatagctgggcgatgcgattttgagataattattggcttcgagaaaacgacgacatgcatcatgagctatggcacacaacaaagagggtataatgtagcgcccgcagcgatgagtttaaatttggaaatacgacatggaaaagaggcgcgcaagccgatcgcgcgtcacggtacaatacagcgacacgaacaattttgtcttagattttgcctaggccttagatccatcttaactatacagatgatgaccttgtccagaggagcggtattgactcatctccgagcgcgctttcagtagctggactatttagcgaatcattcgtagggcatgtgggaatagcagtcatttctgagatcagattctttgcatcttatgccatcagtttcatgtgattgtaatgtgtcttgcattcgctcgctggttcttctacccgatcttatactcacttcatcgagcttgtgagtatcattgagcccct

SEQ ID NO: 1057 - DNA, 723 bp, Muscodor strobelii
  misc_feature: SGI cDNA ID NO. 559940
  misc_feature: Encodes the peptide sequence at SEQ ID NO 1058
atggacgaggagaagttccacgtcttgaccaccacttgcggcacaccagggtatatggctccggagatcttcaagaagactggccatggtaagcccgtcgacatatgggccatgggcgtcattacgtatttcctactctgcggctacactcccttcgatcgtgacagcgactttgaggagatgcaagcgatccttaatgccgattacagcttccagccgaccgagtactggcgcggagtcagcgatcacgccaaggagttcatccgtcgatgtctcacagttgacccaaacaagcggatgacggcacatgaggctctttctcatgccttcgtaacaggagacttaaaacccgatggcgacaagggccagaacttgctgccaaccgtcaagaagaacttcaacgcgagaaaaacgctccatgctgccatcgatacagtccgcgctatcaacaaactgcgagaaggacaagcagccgctgctgcgctcatggatggatcgcgctcggccgagcctcccaaaggtgccgcacctttacccagggacagtggtgtgagtatggccaagggcgactccggctactcgagcaatcgtgatggtgacatcgagatggggggaaccgcaccgacggccgaggtgccgtcaagcttgcgacccggagcagctgtgaataaagttgtcgaaacatctaaaggcctttggagtgccagccaaccacggagatag

SEQ ID NO: 1058 - protein, 240 aa, Muscodor strobelii
  misc_feature: SGI Peptide ID NO. 559940
  misc_feature (7)..(111): Pfam Id: PF00069 Pfam Desc: Protein kinase domain
  misc_feature (1)..(239): NCBI GI: 145610749 Blast Desc: MGG_00925 [Magnaporthe grisea 70-15] gi|145018121|gb|EDK02400.1| MGG_00925 [Magnaporthe grisea 70-15] gi|171188415|gb|ACB41780.1| calcium/calmodulin-dependent protein
  misc_feature (1)..(240): NCBI GI: 261355048 Blast Desc: calcium/calmodulin-dependent protein kinase [Verticillium albo-atrum VaMs.102]
  misc_feature (1)..(240): NCBI GI: 164426993 Blast Desc: calcium/calmodulin-dependent protein kinase type I [Neurospora crassa OR74A] gi|157071559|gb|EAA30691.2| calcium/calmodulin-dependent protein kinase type I [Neurospora
  misc_feature (1)..(217): NCBI GI: 2654181 Blast Desc: calmodulin-dependent protein kinase [Colletotrichum gloeosporioides]
  misc_feature (1)..(235): NCBI GI: 154291477 Blast Desc: BC1G_15259 [Botryotinia fuckeliana B05.10] gi|150846757|gb|EDN21950.1| BC1G_15259 [Botryotinia fuckeliana B05.10]
  misc_feature (1)..(235): NCBI GI: 156039469 Blast Desc: SS1G_11871 [Sclerotinia sclerotiorum 1980] gi|154697608|gb|EDN97346.1| SS1G_11871 [Sclerotinia sclerotiorum 1980]
  misc_feature (1)..(176): NCBI GI: 46105418 Blast Desc: FG00337.1 [Gibberella zeae PH-1]
  misc_feature (1)..(176): NCBI GI: 256735338 Blast Desc: [Nectria haematococca mpVI 77-13-4]
  misc_feature (1)..(175): NCBI GI: 184186912 Blast Desc: calmodulin dependent protein kinase [Setosphaeria turcica]
  misc_feature (1)..(177): NCBI GI: 89032786 Blast Desc: Ca/Cm-dependent protein kinase B [Phaeosphaeria nodorum]
  misc_feature (2)..(150): SWISSPROT Homolog: EC 2.7.11.17 Calcium/calmodulin-dependent protein kinase
MDEEKFHVLTTTCGTPGYMAPEIFKKTGHGKPVDIWAMGVITYFLLCGYTPFDRDSDFEEMQAILNADYSFQPTEYWRGVSDHAKEFIRRCLTVDPNKRMTAHEALSHAFVTGDLKPDGDKGQNLLPTVKKNFNARKTLHAAIDTVRAINKLREGQAAAAALMDGSRSAEPPKGAAPLPRDSGVSMAKGDSGYSSNRDGDIEMGGTAPTAEVPSSLRPGAAVNKVVETSKGLWSASQPRR

SEQ ID NO: 1059 - DNA, 4302 bp, Muscodor strobelii
  misc_feature: SGI EST ID NO. CUFF.3635.0
  misc_feature: Variant of the nucleotide sequence at SEQ ID NO 1057
ctatgctcaagttcagtatggaacaaagatgacagtgccaggaaacatccctgcatgataatgttctcatcccgtatttcatcaactccttcgcgattaaacccaatgtctttagccttcctaggccgatgggctagattcagacatggctcgacgataacctcgtcggtcgtacaaacaagagcaatcagatatcaagctcacgatgcgttgctagatccggacgacctggaggaagctagaaagtggcgagcatcatttcgtgaagactctttgccaaagggccatactacatattctcgctcaagcggtccgggcggccaacacgtgaacaagtgcgtcttgctcaacgggacgaatacgcaagaagaatcagagaacaccagactaacatttgacagaaccgaaagcaaggcaacaacagtgtggccgatccacgagcttgccaggagtcttccaaaactcatgcgatcggctttgagatcatcacgttactacaccatgggtagcgattccttcactatccatgcccagactcaacgaagcagaacggcaaacgtgacggagaatcatgacaaacttgtaaaagagctacatcgaatttacgcggagaatgtgccagagcccacgagtgtgaagaaaatcaagaagcacgaagcagcgtaagctagctgatatccctctgtactaatcgtggctcgagcgtggaactgacaaccgactggctatttgtagagaaaaggcttttcatgaaaataggataaaaaccaagaaattccagagcacaaaaaaagcttcccgcaaaggagggtgacgtaagtagatatgggaaacacatcaaacacgacggagttgactctatctaggtctgctcttgatggatccagattcaggcgaagagtatcgtgaagtaggtggtcttgatggcttggatgctttgaggatgtccatgcgcacgccacgcatcatggatatgacggtttctcgatgtacgtgtgcggcaaagcgcctgtgcggtgcgatgtggaaaatgcaagttgcatatgcaggacgctacgccctacagtaaaggcggtcaaggatgcttaggcatgtgaagccgatatatccgtcgccaatgtcgaaacgtgaagacatcgggcaactcggccagatacacatgtaaatacagaaacaaagcaccgtagaagtagggagttagcttaattgagtgcaaaaaaattgcgggagagttccagtagatgatcataccaccataagttaaaagacaaggtactgattgggaggatacatatgtactactgtatcaaaccactcttttgccttcgggcaacatatcagacaatctagcgcaacggcatacccccattcatttgttcagtgccgaatgagttgaacgttttttcgagcatttcgctttactccgttcactatccaccgctgggtctcgtcctgatacgagtacgccaaccctacaacaagtagagcggtgcgattaagtgccctcatcttggacgaggcctagagtgcggcaattattaacatctggagctgatatccccagcaaggacccaaggaccctgctctacgggagtaggacttgaagcaatgcggggcttgaggtatctcctaataataacccaagcccaggtcaaatgtccgtacctattctgccaacggcttcgaaatttgaaggcggggcaattctgacatcaaagtgataaagacgcagtggatgcttatgcaacctacaaacctatcaataacttgttccgttcgatcaaagcccacgacgtcgaccactttcccatggactacctcagggacctagacattgtctaagatctattcaggtcttggcaccctcgcgccactgcagcagctcttgggcgccccgcactctcatcgtcctgcatcccgcaacgcacctactgttcttgaacccctccagcaccttactcaggtcgtgcatgactcaagctgagatcaagcagagacggagtcaagtcagcccagtcaaactcataccgtaacctgtgagattttgagagcacacatcgttactcactcacttgcgcctcttccgtccttactatcgtgtcgacacggaaggtccaacatattgcgtgctgcccgcgccccgatccagaccggtcccactgacaccccgccgatcttttgggtcagcagctgcgaaccatcccgtcgcgattctaacttgccgccgcgattggcagtcccagtcccagtcccagcaatcaagtcattgttccgcatcgcgagtagctaatcgccgacggccaaccgccaacccgacatcgcctcttgtggccggatccgtcgccttcgtcgccgaccatgaacaggacgccggacatcacgaacaacggctcgccggggaagcccagcccccagatccagccctgccgctacaaggtcggcaagacactcggcgcgggctcctactcggtcgtcaaagaatgcgttcacatcgacaccggccgctactatgccgccaaggtcatcaataagcggctgatggctggtcgcgaacacatggtatgtccatcccgtttccgcctgtcaccggcgccatgcccctccgctgtgtgcagcaccgccaggcccatactggcgagccgcatgagctaaccgctgtcttgtttgtcaccaggtccgcaacgagattgccgtccttaagaaggtgtccatgggccaccagaacatcctcacactagtcgactacttcgagaccatgaacaacctgtatctcgtgactgatctagctctcggtggtgaacttttcgaccggatctgccgtaaaggctcgtactacgagtccgacgctgccgacttgatccgtgcgaccctgtccgccgtggcctatctgcacgaccacggcatcgtacatcgtgatctcaagcccgagaacctgcttttccgcacccccgaagacaacgccgacctcctcatcgccgactttggcctctcccgcatcatggacgaggagaagttccacgtcttgaccaccacttgcggcacaccagggtatatggctccggagatcttcaagaagactggccatggtaagcccgtcgacatatgggccatgggcgtcattacgtatttcctactctgcggctacactcccttcgatcgtgacagcgactttgaggagatgcaagcgatccttaatgccgattacagcttccagccgaccgagtactggcgcggagtcagcgatcacgccaaggagttcatccgtcgatgtctcacagttgacccaaacaagcggatgacggcacatgaggctctttctcatgccttcgtaacaggagacttaaaacccgatggcgacaagggccagaacttgctgccaaccgtcaagaagaacttcaacgcgagaaaaacgctccatgctgccatcgatacagtccgcgctatcaacaaactgcgagaaggacaagcagccgctgctgcgctcatggatggatcgcgctcggccgagcctcccaaaggtgccgcacctttacccagggacagtggtgtgagtatggccaagggcgactccggctactcgagcaatcgtgatggtgacatcgagatggggggaaccgcaccgacggccgaggtgccgtcaagcttgcgacccggagcagctgtgaataaagttgtcgaaacatctaaaggcctttggagtgccagccaaccacggagataggctctccgccatgataacgcatacaactttaacaacggcttggatatgggtgagcatctcctaatgcttactcacaccagccacatcgagcatcgaacttgcaatagctgggcgatgcgattttgagataattattggcttcgagaaaacgacgacatgcatcatgagctatggcacacaacaaagagggtataatgtagcgcccgcagcgatgagtttaaatttggaaatacgacatggaaaagaggcgcgcaagccgatcgcgcgtcacggtacaatacagcgacacgaacaattttgtcttagattttgcctaggccttagatccatcttaactatacagatgatgaccttgtccagaggagcggtattgactcatctccgagcgcgctttcagtagctggactatttagcgaatcattcgtagggcatgtgggaatagcagtcatttctgagatcagattctttgcatcttatgccatcagtttcatgtgattgtaatgtgtcttgcattcgctcgctggttcttctacccgatcttatactcacttcatcgagcttgtgagtatcattgagcccct

SEQ ID NO: 1060 - DNA, 495 bp, Muscodor strobelii
  misc_feature: SGI cDNA ID NO. 559941
  misc_feature: Encodes the peptide sequence at SEQ ID NO 1061
atgtctttagccttcctaggccgatgggctagattcagacatggctcgacgataacctcgtcggtcgtacaaacaagagcaatcagatatcaagctcacgatgcgttgctagatccggacgacctggaggaagctagaaagtggcgagcatcatttcgtgaagactctttgccaaagggccatactacatattctcgctcaagcggtccgggcggccaacacgtgaacaaaaccgaaagcaaggcaacaacagtgtggccgatccacgagcttgccaggagtcttccaaaactcatgcgatcggctttgagatcatcacgttactacaccatgggtagcgattccttcactatccatgcccagactcaacgaagcagaacggcaaacgtgacggagaatcatgacaaacttgtaaaagagctacatcgaatttacgcggagaatgtgccagagcccacgagtgtgaagaaaatcaagaagcacgaagcagcgtaa

SEQ ID NO: 1061 - protein, 164 aa, Muscodor strobelii
  misc_feature: SGI Peptide ID NO. 559941
  misc_feature (63)..(80): Pfam Id: PF00472 Pfam Desc: Peptidyl-tRNA hydrolase domain
  misc_feature (26)..(163): NCBI GI: 171679557 Blast Desc: protein product [Podospora anserina] gi|170939404|emb|CAP64632.1| protein product [Podospora anserina]
  misc_feature (16)..(162): NCBI GI: 46105416 Blast Desc: FG00336.1 [Gibberella zeae PH-1]
  misc_feature (18)..(162): NCBI GI: 256735339 Blast Desc: NECHADRAFT_73400 [Nectria haematococca mpVI 77-13-4]
  misc_feature (21)..(162): NCBI GI: 261355049 Blast Desc: conserved [Verticillium albo-atrum VaMs.102]
  misc_feature (25)..(157): NCBI GI: 154291483 Blast Desc: BC1G_15262 [Botryotinia fuckeliana B05.10] gi|150846760|gb|EDN21953.1| BC1G_15262 [Botryotinia fuckeliana B05.10]
  misc_feature (40)..(154): NCBI GI: 115396072 Blast Desc: [Aspergillus terreus NIH2624] gi|114193244|gb|EAU34944.1| [Aspergillus terreus NIH2624]
  misc_feature (9)..(163): NCBI GI: 164426995 Blast Desc: NCU10654 [Neurospora crassa OR74A] gi|157071560|gb|EDO65263.1| NCU10654 [Neurospora crassa OR74A]
  misc_feature (38)..(157): NCBI GI: 156039483 Blast Desc: [Sclerotinia sclerotiorum 1980] gi|154697615|gb|EDN97353.1| [Sclerotinia sclerotiorum 1980]
  misc_feature (40)..(162): NCBI GI: 169767486 Blast Desc: [Aspergillus oryzae RIB40] gi|238484363|ref|XP_002373420.1| peptidyl-tRNA hydrolase domain protein [Aspergillus flavus NRRL3357] gi|83766069|dbj|BAE56212.1|
  misc_feature (40)..(162): NCBI GI: 238840949 Blast Desc: peptidyl-tRNA hydrolase domain-containing protein [Microsporum canis CBS 113480]
MSLAFLGRWARFRHGSTITSSVVQTRAIRYQAHDALLDPDDLEEARKWRASFREDSLPKGHTTYSRSSGPGGQHVNKTESKATTVWPIHELARSLPKLMRSALRSSRYYTMGSDSFTIHAQTQRSRTANVTENHDKLVKELHRIYAENVPEPTSVKKIKKHEAA

SEQ ID NO: 1062 - DNA, 4048 bp, Muscodor strobelii; identical to SEQ ID NO: 1056
  misc_feature: SGI EST ID NO. CUFF.3636.2
  misc_feature: Variant of the nucleotide sequence at SEQ ID NO 1060

SEQ ID NO: 1063 - DNA, 2451 bp, Muscodor strobelii
  misc_feature: SGI cDNA ID NO. 559942
  misc_feature: Encodes the peptide sequence at SEQ ID NO 1064
atggcagacaaaccacctgagatctgggcagcagctgacctggagcccatatctccttcacccgtacacccatcttctcccgtcatggtcccaactctacaggagcaagccgatatatactccaacatgactctgaacaatagtatccctctcgcgtcgcttgcctccgctcttgtcgaaccgtctaaaactgatgaaaaggctaccgcgccaagcctcgatagtgctgagatgactggaggtgcagccatagatgtcgaggttgttgactcaacaacacttgaactggacaaggctatcgacggcttgattgacggagctgaggcccactcagccaccatcagtactgaaagcgtacaagatcaggaagaagcgcagcttcattctattgaaacgcaagaatccgcgcatcaagtccctgaatcaaatcatgatactaccggttctgtaaccaaccagcatgacattgctgccgactctcacgtgcctactgagattgtcccaaagtcagaagctgatcttgcgcaaagcaagcctcctgagccgttgccacgagcagaccatgatcccctaaaagatgatccgacttcctccaccactcaagcattctcctctcagatgcctattgaaaccatgccttcagatactggtcctattcctagtaatatcaatgcaagccaagaacccatcgatatccaagctctcgttgataatatcactgctcgagctgcagctgcagatgcaatccgggacccagcgaaccaagatgctaccactggtgttacttttcctgagaacatgtctctgccacccaagccacctatctcacagcaaccccccagccacgctcctgggcgtcccgaggacgctgtgtcttacccgccagatggttctcaatcgagtagaagcatgcatttcccttcaaacgccacgccaaagacaaactctttggagcctcatagtagtgctaccgtagtacctgagcctggctcgcaccctgagtatgcttatcatgccacagtaacaggccagcatcagatgaacccgactactgcacaaaaacaacgttgggaagcgttccttcaggacgagcgtaagtacgtatcagaggccaaatgggaccgctttccagatggctctcgtatttttgtcggtaacctatccagtgaacgggtctctaagagagaagtcttcgacatattttcccctttcggtcgccttgcgcagatatccttaaagcaagcttatggctttgtccagtatcatacaacggcggagggtcaggctgcgatgagtagtcttcaaggtatcaaaatcaaaggccggcagatccatttagaaatctcccgggcgcagaaaaaggatggcgatggaaacaatcgcggcgcaaagggtaaacgtgacaatgatcgcaatgagaacagtcgaagccgacgagatgattatcgcccagcacggcaaccatctccgcgacgagacagccaccgaccgccggcatcttatgacagccatagccgaggtcggaatcaccacgaaggtcataataacaaccgccgccgctctagatcgcccttccatgcaggttctcgtgatccctacagacatcgaagccctatccccaataaccctgtgcctaatggtcactattcagctggaacagacctcggccttccacgtcgctatggaggagatatccctgatgtacaatttcttctacttcaagaagtcgagagagatttcgtgtcctgggccgagaaagcctttactagccagggcttgagggttcaagttatgttcttgaatccccaatttcctcgagaagccgtccttagccagtttgtccttgagggtgtacatgctgtcgcagaactcaactaccatgcccagcagctgggaaaaattcccctgcaggtgttcgacagatcggcagggcacgagaatgtacgatatgaacaataccatgaccttgaccctcccatcgctgcccaggtggtcttgagaactaagtcccagactcaaccgccaacgccatacggaagtaatcattttgccgctccatcgccatatgcaatgcctccacagggtcaatattcagcgcacgcgtacccgccacctaatcatcatccttccagtggacccgggcctgggggggtcccattggacccggcaaccattcagagcatagcaagctcgctgaatgggcagcggcccagagtgccatcctatcagtcgcatcaacaccatcacaacaacagccccccagttgatgtcaataacttgctcgcctcccttgcgcctcacggccagcctccggctagaggacaccctccgcctcagcgaaacatgggctatgcgccgccgccgccgccgatgggttatgccggcgctccgcagggcgactcagcacagcacgtgcaaaatatcatgtcacaacttgcgaggtacaaatga

SEQ ID NO: 1064 - protein, 816 aa, Muscodor strobelii
  misc_feature: SGI Peptide ID NO. 559942
  misc_feature (382)..(446): Pfam Id: PF00076 Pfam Desc: RNA recognition motif. (a.k.a. RRM, RBD, or RNP domain)
  misc_feature (230)..(814): NCBI GI: 116203569 Blast Desc: CHGG_09668 [Chaetomium globosum CBS 148.51] gi|88175796|gb|EAQ83264.1| CHGG_09668 [Chaetomium globosum CBS 148.51]
  misc_feature (230)..(816): NCBI GI: 256734611 Blast Desc: NECHADRAFT_90216 [Nectria haematococca mpVI 77-13-4]
  misc_feature (221)..(816): NCBI GI: 46105414 Blast Desc: FG00335.1 [Gibberella zeae PH-1]
  misc_feature (6)..(641): NCBI GI: 261355050 Blast Desc: conserved [Verticillium albo-atrum VaMs.102]
  misc_feature (144)..(816): NCBI GI: 156039485 Blast Desc: SS1G_11879 [Sclerotinia sclerotiorum 1980] gi|154697616|gb|EDN97354.1| SS1G_11879 [Sclerotinia sclerotiorum 1980]
  misc_feature (230)..(816): NCBI GI: 154291485 Blast Desc: BC1G_15263 [Botryotinia fuckeliana B05.10] gi|150846761|gb|EDN21954.1| BC1G_15263 [Botryotinia fuckeliana B05.10]
  misc_feature (355)..(816): NCBI GI: 145610751 Blast Desc: MGG_11466 [Magnaporthe grisea 70-15] gi|145018122|gb|EDK02401.1| MGG_11466 [Magnaporthe grisea 70-15]
  misc_feature (357)..(671): NCBI GI: 171679559 Blast Desc: protein product [Podospora anserina] gi|170939405|emb|CAP64633.1| protein product [Podospora anserina]
  misc_feature (230)..(669): NCBI GI: 85094653 Blast Desc: NCU02286 [Neurospora crassa OR74A] gi|28921387|gb|EAA30694.1| [Neurospora crassa OR74A]
  misc_feature (354)..(816): NCBI GI: 240105028 Blast Desc: RNA recognition motif containing protein [Coccidioides posadasii C735 delta SOWgp]
MADKPPEIWAAADLEPISPSPVHPSSPVMVPTLQEQADIYSNMTLNNSIPLASLASALVEPSKTDEKATAPSLDSAEMTGGAAIDVEVVDSTTLELDKAIDGLIDGAEAHSATISTESVQDQEEAQLHSIETQESAHQVPESNHDTTGSVTNQHDIAADSHVPTEIVPKSEADLAQSKPPEPLPRADHDPLKDDPTSSTTQAFSSQMPIETMPSDTGPIPSNINASQEPIDIQALVDNITARAAAADAIRDPANQDATTGVTFPENMSLPPKPPISQQPPSHAPGRPEDAVSYPPDGSQSSRSMHFPSNATPKTNSLEPHSSATVVPEPGSHPEYAYHATVTGQHQMNPTTAQKQRWEAFLQDERKYVSEAKWDRFPDGSRIFVGNLSSERVSKREVFDIFSPFGRLAQISLKQAYGFVQYHTTAEGQAAMSSLQGIKIKGRQIHLEISRAQKKDGDGNNRGAKGKRDNDRNENSRSRRDDYRPARQPSPRRDSHRPPASYDSHSRGRNHHEGHNNNRRRSRSPFHAGSRDPYRHRSPIPNNPVPNGHYSAGTDLGLPRRYGGDIPDVQFLLLQEVERDFVSWAEKAFTSQGLRVQVMFLNPQFPREAVLSQFVLEGVHAVAELNYHAQQLGKIPLQVFDRSAGHENVRYEQYHDLDPPIAAQVVLRTKSQTQPPTPYGSNHFAAPSPYAMPPQGQYSAHAYPPPNHHPSSGPGPGGVPLDPATIQSIASSLNGQRPRVPSYQSHQHHHNNSPPVDVNNLLASLAPHGQPPARGHPPPQRNMGYAPPPPPMGYAGAPQGDSAQHVQNIMSQLARYK

SEQ ID NO: 1065 - DNA, 3868 bp, Muscodor strobelii
  misc_feature: SGI EST ID NO. CUFF.3760.0
  misc_feature: Variant of the nucleotide sequence at SEQ ID NO 1063
gtggatcccccgacagtgctggaatgaggctcaaatcaggcacacagaccaatagagtgctctaaatgctggaccagcacgctgcttccgcgtgcggcgctcagattgtagtgagatgcgcccccactttcctttggacttcggtcgctgtctgtagagccgtcgagacctcccacctttcacccacgcatcctctcatgactctttccgtctctcatctcttgccatcctcgcaccgcataataaggcttacttgagttgagcatgtttacaagcttcgcgcggtcaatgtcactcaaacatgctcactcaactcgatttatgtgatctcatttctcattagtctgccaatagatcgcccgccaaatcaattcacttagcctcactgacatcattcttactcacgccaattacgagtacccagccttgtgcaatttcaaggtgaatttgatgtttaccatcacccaacacgtcacttacacttaggtttacgtatcatttgagtcttaactggcactattctagattcgcggtttctctctccaatctggggcttggccaagtagggctgttaagttcacatcagaccagacgaccgtatttcagcgtgtcattgccagtagttgcaactggacacgacctttccagcctgagtgatttggagcgcgtcgcaatcacctcgccttgctagttgatgtgccgtctcaaaagtgcagcgccaaaagacgcgcatattctccaacgcaacattacgctatctgtcgctggcactcacacaaacaaaacttctgaacaaacgtgactcaggggcatctccctccatcccactatcgcccaaatccttcctgatggtagcatcgtccctcaatcggatgtttcttcaaaccattccacgctcccatttgtatctcgccatcttcacctgaatggcagacaaaccacctgagatctgggcagcagctgacctggagcccatatctccttcacccgtacacccatcttctcccgtcatggtcccaactctacaggagcaagccgatatatactccaacatgactctgaacaatagtatccctctcgcgtcgcttgcctccgctcttgtcgaaccgtctaaaactgatgaaaaggctaccgcgccaagcctcgatagtgctgagatgactggaggtgcagccatagatgtcgaggttgttgactcaacaacacttgaactggacaaggctatcgacggcttgattgacggagctgaggcccactcagccaccatcagtactgaaagcgtacaagatcaggaagaagcgcagcttcattctattgaaacgcaagaatccgcgcatcaagtccctgaatcaaatcatgatactaccggttctgtaaccaaccagcatgacattgctgccgactctcacgtgcctactgagattgtcccaaagtcagaagctgatcttgcgcaaagcaagcctcctgagccgttgccacgagcagaccatgatcccctaaaagatgatccgacttcctccaccactcaagcattctcctctcagatgcctattgaaaccatgccttcagatactggtcctattcctagtaatatcaatgcaagccaagaacccatcgatatccaagctctcgttgataatatcactgctcgagctgcagctgcagatgcaatccgggacccagcgaaccaagatgctaccactggtgttacttttcctgagaacatgtctctgccacccaagccacctatctcacagcaaccccccagccacgctcctgggcgtcccgaggacgctgtgtcttacccgccagatggttctcaatcgagtagaagcatgcatttcccttcaaacgccacgccaaagacaaactctttggagcctcatagtagtgctaccgtagtacctgagcctggctcgcaccctgagtatgcttatcatgccacagtaacaggccagcatcagatgaacccgactactgcacaaaaacaacgttgggaagcgttccttcaggacgagcgtaagtacgtatcagaggccaaatgggaccgctttccagatggctctcgtatttttgtcggtaacctatccagtgaacgggtctctaagagagaagtcttcgacatattttcccctttcggtcgccttgcgcagatatccttaaagcaagcttatggctttgtccagtatcatacaacggcggagggtcaggctgcgatgagtagtcttcaaggtatcaaaatcaaaggccggcagatccatttagaaatctcccgggcgcagaaaaaggatggcgatggaaacaatcgcggcgcaaagggtaaacgtgacaatgatcgcaatgagaacagtcgaagccgacgagatgattatcgcccagcacggcaaccatctccgcgacgagacagccaccgaccgccggcatcttatgacagccatagccgaggtcggaatcaccacgaaggtcataataacaaccgccgccgctctagatcgcccttccatgcaggttctcgtgatccctacagacatcgaagccctatccccaataaccctgtgcctaatggtcactattcagctggaacagacctcggccttccacgtcgctatggaggagatatccctgatgtacaatttcttctacttcaagaagtcgagagagatttcgtgtcctgggccgagaaagcctttactagccagggcttgagggttcaagttatgttcttgaatccccaatttcctcgagaagccgtccttagccagtttgtccttgagggtgtacatgctgtcgcagaactcaactaccatgcccagcagctgggaaaaattcccctgcaggtgttcgacagatcggcagggcacgagaatgtacgatatgaacaataccatgaccttgaccctcccatcgctgcccaggtggtcttgagaactaagtcccagactcaaccgccaacgccatacggaagtaatcattttgccgctccatcgccatatgcaatgcctccacagggtcaatattcagcgcacgcgtacccgccacctaatcatcatccttccagtggacccgggcctgggggggtcccattggacccggcaaccattcagagcatagcaagctcgctgaatgggcagcggcccagagtgccatcctatcagtcgcatcaacaccatcacaacaacagccccccagttgatgtcaataacttgctcgcctcccttgcgcctcacggccagcctccggctagaggacaccctccgcctcagcgaaacatgggctatgcgccgccgccgccgccgatgggttatgccggcgctccgcagggcgactcagcacagcacgtgcaaaatatcatgtcacaacttgcgaggtacaaatgaagacttaaccaaaatccgacaaaccctgggtatcactgaggcattgctgtgtattggtttggaaatgtagccgattattctagaagtcccgcctttctgtcattgatacccttcgatatgatttttgatggaaaagtgcaccgtgcgcgttaatctcaacaagcaacgctattgcggccgctcctagaaggatatgcgctgttccgtgtcagacgtacttctcggccaggagtcggtgagcgacgaacacgatggggcgttggggactccagagggctccatctagccgcaacggcctaaaacgatgacgatgaacatgaattttgagacgactcattggcgtggagttctcacatgggtggatagatcttcatcaagggatgatagatgttagttagaacctctgttgtatcattttggtatgcgtataggggataccttgtgaatcaagatggctcggggaaagttttaatacaccgcattcatgaaca

SEQ ID NO: 1066 - DNA, 1179 bp, Muscodor strobelii
  misc_feature: SGI cDNA ID NO. 559943
  misc_feature: Encodes the peptide sequence at SEQ ID NO 1067
atgagcctcagcaactcgggagcgcgcatcacgcgcctccagccaacactccttcaccatggcgcgatttcaactccgactctcttcttgttccttgcccatgggcataggcagattcacactcgctcgcgcataagaccgactgcttcatcaaatgcgccgtctactcgacgaaatgcgaactcgaagtctttaacctccaccagggaaaagtcaacctcatctttatcgaagccaaccactcgagccacaacaccaccaaaagccttgccagatctactacctcgccattctaaggcaaatcccgaatccctacttaacccaccagacagcacgcggcccccgccgctcgacctaccagtgcgcgacccctccaagagtctattctcatacctcttctccctcggcaaggcctacacaaccttctacaagaccggtctcaaagccgtcttcacgaaccgcaatctcctccgcgacggctctctctcagcccgccaatcatccctccatctcccatccaacacctatccttcccgggccttccgcctaacccaccaacgcgtgggccacgacctccgccggcttcccctattcgggctcatcgtgctcatctgcggtgaattcacgcccctcattgttctagcgttccccaagataacgccgtacacatgtcgtatcccaaaacaacaagacgtcatccgacgctccgccgaagcccgtcgcgccgcatcgaggcgtgccctacaatacatagaccagaatgaccactcagccgtcagtaaggtagctccgggacacatatgtcggagtctcagccttggcagcccgctctgggataaaataggattggacgtacccttcgcagttggacgcacaatcatagccctcgaagctctcctcatagacgacaacatgatccgcgacggcggcggagtcgcgcacctcgtcgatgaggaggtcgtcctcgcctgcgaaaagcgaggtatcgacaccctcggcgtctctatcgagaccctacgagagaaactcacagattgggtagacaagagcttgatcatgcaccaggggaagaaaggagaagcggcgccgcggatcgaaaagatcatggaagatatttccatgaagtaccagagcctcatactcggctttccatacccggagcctcctccacgtaaatag

SEQ ID NO: 1067 - protein, 392 aa, Muscodor strobelii
  misc_feature: SGI Peptide ID NO. 559943
  misc_feature (302)..(348): Pfam Id: PF07766 Pfam Desc: LETM1-like protein
  misc_feature (102)..(347): NCBI GI: 156039487 Blast Desc: SS1G_11880 [Sclerotinia sclerotiorum 1980] gi|154697617|gb|EDN97355.1| SS1G_11880 [Sclerotinia sclerotiorum 1980]
  misc_feature (69)..(347): NCBI GI: 154291487 Blast Desc: BC1G_15264 [Botryotinia fuckeliana B05.10] gi|150846762|gb|EDN21955.1| BC1G_15264 [Botryotinia fuckeliana B05.10]
  misc_feature (46)..(334): NCBI GI: 145610753 Blast Desc: MGG_11467 [Magnaporthe grisea 70-15] gi|145018123|gb|EDK02402.1| MGG_11467 [Magnaporthe grisea 70-15]
  misc_feature (101)..(347): NCBI GI: 46137095 Blast Desc: FG10063.1 [Gibberella zeae PH-1]
  misc_feature (105)..(347): NCBI GI: 256732125 Blast Desc: [Nectria haematococca mpVI 77-13-4]
  misc_feature (83)..(260): NCBI GI: 40804607 Blast Desc: [Neurospora crassa]
  misc_feature (104)..(348): NCBI GI: 240104959 Blast Desc: CPC735_045220 [Coccidioides posadasii C735 delta SOWgp]
  misc_feature (104)..(349): NCBI GI: 119195349 Blast Desc: CIMG_02049 [Coccidioides immitis RS]
  misc_feature (106)..(349): NCBI GI: 238845790 Blast Desc: conserved [Microsporum canis CBS 113480]
  misc_feature (27)..(358): NCBI GI: 67525945 Blast Desc: AN3430.2 [Aspergillus nidulans FGSC A4] gi|40743719|gb|EAA62907.1| AN3430.2 [Aspergillus nidulans FGSC A4] gi|259485581|tpe|CBF82723.1| TPA: conserved [Aspergillus FGSC
MSLSNSGARITRLQPTLLHHGAISTPTLFLFLAHGHRQIHTRSRIRPTASSNAPSTRRNANSKSLTSTREKSTSSLSKPTTRATTPPKALPDLLPRHSKANPESLLNPPDSTRPPPLDLPVRDPSKSLFSYLFSLGKAYTTFYKTGLKAVFTNRNLLRDGSLSARQSSLHLPSNTYPSRAFRLTHQRVGHDLRRLPLFGLIVLICGEFTPLIVLAFPKITPYTCRIPKQQDVIRRSAEARRAASRRALQYIDQNDHSAVSKVAPGHICRSLSLGSPLWDKIGLDVPFAVGRTIIALEALLIDDNMIRDGGGVAHLVDEEVVLACEKRGIDTLGVSIETLREKLTDWVDKSLIMHQGKKGEAAPRIEKIMEDISMKYQSLILGFPYPEPPPRK

SEQ ID NO: 1068 - DNA, 1613 bp, Muscodor strobelii
  misc_feature: SGI EST ID NO. CUFF.3763.0
  misc_feature: Variant of the nucleotide sequence at SEQ ID NO 1066
tttagttcctgacgtcgacgatagcgacatttgtatgatgactggtagtttgctaaggtagttgcacatgtcccatttctctcgaatgcttgctcgtactattaggtcaatcgccaattcatcacaaacgtcgctcgcgcaccttggtattcaaagtgtcgaaacagaatagcacccagctccatctgatctcatccgatgagcctcagcaactcgggagcgcgcatcacgcgcctccagccaacactccttcaccatggcgcgatttcaactccgactctcttcttgttccttgcccatgggcataggcagattcacactcgctcgcgcataagaccgactgcttcatcaaatgcgccgtctactcgacgaaatgcgaactcgaagtctttaacctccaccagggaaaagtcaacctcatctttatcgaagccaaccactcgagccacaacaccaccaaaagccttgccagatctactacctcgccattctaaggcaaatcccgaatccctacttaacccaccagacagcacgcggcccccgccgctcgacctaccagtgcgcgacccctccaagagtctattctcatacctcttctccctcggcaaggcctacacaaccttctacaagaccggtctcaaagccgtcttcacgaaccgcaatctcctccgcgacggctctctctcagcccgccaatcatccctccatctcccatccaacacctatccttcccgggccttccgcctaacccaccaacgcgtgggccacgacctccgccggcttcccctattcgggctcatcgtgctcatctgcggtgaattcacgcccctcattgttctagcgttccccaagataacgccgtacacatgtcgtatcccaaaacaacaagacgtcatccgacgctccgccgaagcccgtcgcgccgcatcgaggcgtgccctacaatacatagaccagaatgaccactcagccgtcagtaaggtagctccgggacacatatgtcggagtctcagccttggcagcccgctctgggataaaataggattggacgtacccttcgcagttggacgcacaatcatagccctcgaagctctcctcatagacgacaacatgatccgcgacggcggcggagtcgcgcacctcgtcgatgaggaggtcgtcctcgcctgcgaaaagcgaggtatcgacaccctcggcgtctctatcgagaccctacgagagaaactcacagattgggtagacaagagcttgatcatgcaccaggggaagaaaggagaagcggcgccgcggatcgaaaagatcatggaagatatttccatgaagtaccagagcctcatactcggctttccatacccggagcctcctccacgtaaataggtggctgtgaagactttgtgcataattgctgggtgttgaacatgtagttattgtatcatcatgtgtagaatagatgaggtttagatccatacctcggaggtacaagcgcctatctctcttctcgacaaatatatgtggagggacaatagaacagaccattcagtcgcatcatatcaaaatgtcgaatgatgcatctgagagaaacagcccgtgatctatatgcaacgatattttcc

SEQ ID NO: 1069 - DNA, 411 bp, Muscodor strobelii
  misc_feature: SGI cDNA ID NO. 559944
  misc_feature: Reduced expression when VOC is produced
  misc_feature: Encodes the peptide sequence at SEQ ID NO 1070
atgtcgtcgactaaagaagccgtctccactaccaagtcgccagccccgctgccgcagttctcacaggccatcaagtacggcggcatggtttattgttctggtaacattggcaaggacccggtgacaggagaattagccgagggcggcattcagcctcaaactcgtgttgccatcacaaacctcaaaaatgtgctcgaggcagctggtagtagtctcgccaacgtagtcaaagctaacatcttcctgacgacgatggatgattttgcggctatgaacgaggtgtatgatgagtttttcggtagtattgaccccaagccgtgccggacgtgtgttgcagtctaccagctgccgtttgctgctaagatggagattgagtgcaccgcatttttagactcggcagcgaagctgtag

SEQ ID NO: 1070 - protein, 136 aa, Muscodor strobelii
  misc_feature: SGI Peptide ID NO. 559944
  misc_feature (10)..(130): Pfam Id: PF01042 Pfam Desc: Endoribonuclease L-PSP
  misc_feature (6)..(136): NCBI GI: 164426991 Blast Desc: NCU10226 [Neurospora crassa OR74A] gi|40804608|emb|CAF05868.1| brt1 protein [Neurospora crassa] gi|157071558|gb|EAA30687.2| NCU10226 [Neurospora crassa OR74A]
  misc_feature (5)..(128): NCBI GI: 156040439 Blast Desc: Brt1 [Sclerotinia sclerotiorum 1980] gi|154696292|gb|EDN96030.1| Brt1 [Sclerotinia sclerotiorum 1980]
  misc_feature (5)..(136): NCBI GI: 238844084 Blast Desc: yabJ [Microsporum canis CBS 113480]
  misc_feature (1)..(129): NCBI GI: 256729158 Blast Desc: NECHADRAFT_39755 [Nectria haematococca mpVI 77-13-4]
  misc_feature (3)..(131): NCBI GI: 256723204 Blast Desc: NECHADRAFT_51633 [Nectria haematococca mpVI 77-13-4]
  misc_feature (1)..(130): NCBI GI: 154287744 Blast Desc: protein mmf1, mitochondrial precursor [Ajellomyces capsulatus NAm1] gi|150408308|gb|EDN03849.1| protein mmf1, mitochondrial precursor [Ajellomyces capsulatus NAm1]
  misc_feature (1)..(130): NCBI GI: 225559981 Blast Desc: conserved [Ajellomyces capsulatus G186AR] gi|240276150|gb|EER39662.1| L-PSP endoribonuclease [Ajellomyces capsulatus H143]
  misc_feature (7)..(136): NCBI GI: 171679533 Blast Desc: protein product [Podospora anserina] gi|170939392|emb|CAP64620.1| protein product [Podospora anserina]
  misc_feature (3)..(130): NCBI GI: 238838716 Blast Desc: BRT1 [Microsporum canis CBS 113480]
  misc_feature (1)..(130): NCBI GI: 261199992 Blast Desc: endoribonuclease L-PSP [Ajellomyces dermatitidis SLH14081] gi|239594605|gb|EEQ77186.1| endoribonuclease L-PSP [Ajellomyces dermatitidis SLH14081] gi|239607994|gb|EEQ84981.1|
  misc_feature (16)..(129): SWISSPROT Homolog: EC 3.5.99.5 2-aminomuconate deaminase
  misc_feature: Useful for introducing or modulating the production of volatile compounds
MSSTKEAVSTTKSPAPLPQFSQAIKYGGMVYCSGNIGKDPVTGELAEGGIQPQTRVAITNLKNVLEAAGSSLANVVKANIFLTTMDDFAAMNEVYDEFFGSIDPKPCRTCVAVYQLPFAAKMEIECTAFLDSAAKL

SEQ ID NO: 1071 - DNA, 1459 bp, Muscodor strobelii
  misc_feature: SGI EST ID NO. CUFF.2942.0
  misc_feature: Variant of the nucleotide sequence at SEQ ID NO 1069
cgaaatactatcccctagaatgagattaggatgacctatatgatttaggcccgaaattcatagctatcttcatgatgccgattagcagtatgcaagcaatgccgttgcgccaaatggtattgtacgttttgcccggtggcaaaaggtagttatagagtggcccatatactgagccatcaatgcccaacccgtcgtaagaattgcgtctctctttaacctgaacgatgtcgcaatacgtggagttagccgcgatcccgacaagagaaacagatactggtgatactctcccccgaattactcatccaatgcgccgtgatccacgtctaaaagttgacactgcctgacattagtgcaatatagccgtcgcaaaccgctattggcgccgaatcgcatacgaagtcgcaagcttcatttgatgccggacatatatactcccgagctttcgttgattgctaagcatgcactgttgaccaaaccactggtatagcactcgtgcatacatcgcatcgtgcaagtcgtgtctaagtgatgcggaatggaatttataatcatggggttgaagcatttgatccaagacttttcgatagtatggagtatatttcggattgaaacgcctatggttcgctaacggattggattgatgcggcaaatgatgtcgggcgttggaaggtcggcatctttacgaccaagccgagtgtccttccttacccggcggggacattgcttggccgtccgggacgccgatgcgatgccggtatatttgtgactccaatgtcggatgctactaccagaatcttacaaatctctccccgttgttttttagatataaactttaatcactgctacacgagaacaatttgtcttaacatcatcaccctgtgagtaaaatgtcgtcgactaaagaagccgtctccactaccaagtcgccagccccgctgccgcagttctcacaggccatcaagtacggcggcatggtttattgttctggtaacattggcaaggacccggtgacaggagaattagccgagggcggcattcagcctcaaactcgtgttgccatcacaaacctcaaaaatgtgctcgaggcagctggtagtagtctcgccaacgtagtcaaagctaacatcttcctgacgacgatggatgattttgcggctatgaacgaggtgtatgatgagtttttcggtagtattgaccccaagccgtgccggacgtgtgttgcagtctaccagctgccgtttgctgctaagatggagattgagtgcaccgcatttttagactcggcagcgaagctgtagttggccaatgttaatagagtcaaaattctaagttggagagcacgtgttcatgttctttttaatgagtgacattttcccaaaatctcgcagcgttatcccgagtacctatcgtgaacattagttgacaatatgaactgagagacgtgtttcacggatcagcg

SEQ ID NO: 1072 - DNA, 2883 bp, Muscodor strobelii
  misc_feature: SGI cDNA ID NO. 559945
  misc_feature: Encodes the peptide sequence at SEQ ID NO 1073
atgacatctctcggaaagattagcaattcattagtttccgccgttaacgagaatactctagctctcgcaagtctcaactttgatttttcggtaatcaaagtagaggcgccgaatgagtacaaggcgatcggcagagctttaggtgggacgcgaagggacgacgctgagtatgggagtgctcatcggactgcgcgtaaactagctgccctttttgaagaaatgatgccgcaagtcccgactctcgtagctgcctatggaaagagatcgagtgagataatacaaacacctggattaaacccaacaggaaacacagagtcccacggtgctttttcaaacttcgtcggagcagacgcaagttcgatttgggccgctgctacttccggactggcagcgattggtgttcacctacttgcttgtttgttagcgagagctttcactgacccagccaaatcgacgtcagtttgggcagaactagtcgctatacgacagcaagacatattgatcactgcacaaaaccccaacctcaatctcacgcaatttgcagcaatcaatgctgcaaatcagcatattgcgcgtgaagaactgcgcttatgggatgctagtgcaagggcctggttgcagacagctgattcgtcacgacagagagactacacacaactcaagctgattctcaagaacattagtctccctatttcgggcggggttaggcttttcgactcagtcgtacacgcttggaggcaggctatgctcggccttgagtgtctcatcaaaggacagcctcagagcgtgaccgatggtgcaatcttgctagcaatttcagcgtggcatctttatccaaatctcctagtactaggaaatcaagtgacgaaaattgatttcaaggattgtctactatccccgaacgccattcttaccatcggtattacaactgtaggagaagatgccgaaaataaagatggtatatattggtcaatcgcattatcgcattaccgtttctatggtaagccgctacctgcgacaggagaagttttcgacagattcacgatgaatgaatttcagttcgtcgttctcggaagcttattacgtacgtgggattgtccaagagggcccatggaaaagtgtgcccgatggttcgactctctatggggatgtcttgagcgcgcacccactccactcaaacccccgcaatggttaggaataccagtcgatgccgcgcggcagtacctcggcgccgatgatacgacaaaagcgaactactcgaggttaatagactttggcttccgtcgagggcgcaatttctttcatcgttcaactcataaacgtgcttcgcttccttggtttgggctgcggtgcagaaatatcatggaaagtcttggagctgatgacccagagctctgtgttgtcaaatatctaagatttttggcccaggctggggggctgaagccgactcaggctttgatttacctagtctcgaagctgccaggcaagaaagttgaaaggcaccgagcttataagatagtggtaccaacagacgaaaggttccctacgaataatggaatgcagtccacggagcgggacgtatcagactcagaaatagagagccaccgtgacaggcgtcctgacagcactggaaaagcatttccactcaatcgtgatcagagtcacagtggcccaggaattccgtcgaatattcgcaaaaagcatcattcatgggaaagcgacattaagataaggcagtatcggattgcaggtgacaatttctcatccttcatgccagagtctagtgaaaggaatgatgaggaacattatcctgacgcaaagcatctactttgcgatagaattacgagacaagaaaccggagtgctatgcgactgttctgcattatggtatcattacaacgattggttcgcaccgaacaccagcattgcccggtgtgccaacattgcccaatttgccaacacagttacagatagcattggagcagcacgcctgtacatcacgaaactgacgaccgatgaaaagaaacattttgaaaaatgcatgagccagcttcaaactggtacttgggagcctctagtcgatatagacttgtcgagttcgcttctgaatggtagaggcgctgagaattggaaatgcttcaaccctattttgctatggcagtacctgaacggactaaacccgtacgacccggctgactcaatgagatcagcactcgatatgatgaggtgcgagagagagcacaatctaatcatatcgaaaacactcaagaatattaccttagctaggaaaatctatgataacctcgaaggtgcaacaatcgctccctcggtcgtggagactggtctacacggagtcaagtgggcgccagatggcactgaattgccatacacgagatcgacagcgttcagctgtatagcaatgatggaaaccggaaaaattgacattgactcgaaaaacctcgacgaagtattcgctttgtcgtccggaaactcgctgttcgttgcatcgcggctgctcaatgatccctacacgcagactgccagtaatgcggtcacacgaatcgtgggtaacgtgggccgtccagggataagctttttagtgcctcctgcggccaggccactcgttcgggatctaagttcgagttatcgagccgtcaattatgccccctttgatggaaaacgtgaagataattttaggagcacctctcttcacctatcattcacttcacatgtattcccattagactacggtgcaacagggatgtatgatcatcaagcctttcttgtggagtccgttatctccatccatgacgcagtctgcctgacggggttaattcagagacatctgaacagattgaaactgactctgatcaacgagcaatag

SEQ ID NO: 1073 - protein, 960 aa, Muscodor strobelii
  misc_feature: SGI Peptide ID NO. 559945
  misc_feature (1)..(490): NCBI GI: 238844746 Blast Desc: conserved [Microsporum canis CBS 113480]
  misc_feature (1)..(514): NCBI GI: 261360699 Blast Desc: conserved [Verticillium albo-atrum VaMs.102]
  misc_feature (3)..(475): NCBI GI: 115492241 Blast Desc: [Aspergillus terreus NIH2624] gi|114197608|gb|EAU39308.1| [Aspergillus terreus NIH2624]
  misc_feature (3)..(364): NCBI GI: 169604668 Blast Desc: SNOG_05349 [Phaeosphaeria nodorum SN15] gi|160706620|gb|EAT87740.2| SNOG_05349 [Phaeosphaeria nodorum SN15]
  misc_feature (3)..(434): NCBI GI: 169605903 Blast Desc: SNOG_05984 [Phaeosphaeria nodorum SN15] gi|111065928|gb|EAT87048.1| SNOG_05984 [Phaeosphaeria nodorum SN15]
  misc_feature (3)..(361): NCBI GI: 240111731 Blast Desc: CPC735_011940 [Coccidioides posadasii C735 delta SOWgp]
  misc_feature (1)..(434): NCBI GI: 46137867 Blast Desc: FG10449.1 [Gibberella zeae PH-1]
  misc_feature (10)..(337): NCBI GI: 169598688 Blast Desc: SNOG_02149 [Phaeosphaeria nodorum SN15] gi|111069241|gb|EAT90361.1| SNOG_02149 [Phaeosphaeria nodorum SN15]
  misc_feature (2)..(367): NCBI GI: 149210921 Blast Desc: MGCH7_ch7g933 [Magnaporthe grisea 70-15] gi|86196888|gb|EAQ71526.1| MGCH7_ch7g933 [Magnaporthe grisea 70-15]
  misc_feature (4)..(480): NCBI GI: 256731930 Blast Desc: NECHADRAFT_80807 [Nectria haematococca mpVI 77-13-4]
MTSLGKISNSLVSAVNENTLALASLNFDFSVIKVEAPNEYKAIGRALGGTRRDDAEYGSAHRTARKLAALFEEMMPQVPTLVAAYGKRSSEIIQTPGLNPTGNTESHGAFSNFVGADASSIWAAATSGLAAIGVHLLACLLARAFTDPAKSTSVWAELVAIRQQDILITAQNPNLNLTQFAAINAANQHIAREELRLWDASARAWLQTADSSRQRDYTQLKLILKNISLPISGGVRLFDSVVHAWRQAMLGLECLIKGQPQSVTDGAILLAISAWHLYPNLLVLGNQVTKIDFKDCLLSPNAILTIGITTVGEDAENKDGIYWSIALSHYRFYGKPLPATGEVFDRFTMNEFQFVVLGSLLRTWDCPRGPMEKCARWFDSLWGCLERAPTPLKPPQWLGIPVDAARQYLGADDTTKANYSRLIDFGFRRGRNFFHRSTHKRASLPWFGLRCRNIMESLGADDPELCVVKYLRFLAQAGGLKPTQALIYLVSKLPGKKVERHRAYKIVVPTDERFPTNNGMQSTERDVSDSEIESHRDRRPDSTGKAFPLNRDQSHSGPGIPSNIRKKHHSWESDIKIRQYRIAGDNFSSFMPESSERNDEEHYPDAKHLLCDRITRQETGVLCDCSALWYHYNDWFAPNTSIARCANIAQFANTVTDSIGAARLYITKLTTDEKKHFEKCMSQLQTGTWEPLVDIDLSSSLLNGRGAENWKCFNPILLWQYLNGLNPYDPADSMRSALDMMRCEREHNLIISKTLKNITLARKIYDNLEGATIAPSVVETGLHGVKWAPDGTELPYTRSTAFSCIAMMETGKIDIDSKNLDEVFALSSGNSLFVASRLLNDPYTQTASNAVTRIVGNVGRPGISFLVPPAARPLVRDLSSSYRAVNYAPFDGKREDNFRSTSLHLSFTSHVFPLDYGATGMYDHQAFLVESVISIHDAVCLTGLIQRHLNRLKLTLINEQ

SEQ ID NO: 1074 - DNA, 939 bp, Muscodor strobelii
  misc_feature: SGI cDNA ID NO. 559946
  misc_feature: Encodes the peptide sequence at SEQ ID NO 1075
atggcgttcaattctcctcgcctcatccacattggaagccattctttggctctatatacgcatgggccagaacccaagaactctcatgagcccgttgtactgttcgtctcaggagtgtcaagcgatgcgctcaactggcaagccgtcgtacgacaactcccttccaacctgcgaagctatacatacgaccgttctggctttcgcaattcagaatcttcaccgcgagctccttcagccgaaaacattgccctggagctatcgctcctgattgaaaatgctcaaatcgcaaatccgctaattctcgtgggtcactcatgggcaggggtactcctacacgagtacatcgtacttaagggaattgaacaaatcgccggtcttgttctcgttgatgccaatcatgagacgcatttacaggtgatgaatgtcaatgatccaatactctgggatatcatcggtgctactttggagccatacgctgccatgggtatcgaagcagagcataagctgacgcaggaggagtggaaggcgttcagagaggtgcattctggcgaaaaatacgacgcaatatcacaaaaagaagattccgaatacccttccagtttcgaaattctccaagaaaaggggttgagtaggaagcaacccctgttgagggagaaaccagtcttcgtgataggggccacgcggagcagagattggtctggattgtacgaagcaggtgttgcgaagggaaacggaaacgaggagcagagggctcatgtcagagatatgatcaagaccgtagacgggaaaactgagcagctccaaaaggagtttctgaagctctcgaccaggagcaagcttgtttttgcgacggagagtggccattttgttcagttgacacaacctgatgttgttgtcaatggagtccaatgggtcttagaccatttacgcccactctaa

SEQ ID NO: 1075 - protein, 312 aa, Muscodor strobelii
  misc_feature: SGI Peptide ID NO. 559946
  misc_feature (7)..(309): NCBI GI: 119485891 Blast Desc: NFIA_100280 [Neosartorya fischeri NRRL 181] gi|119410444|gb|EAW20391.1| NFIA_100280 [Neosartorya fischeri NRRL 181]
  misc_feature (7)..(309): NCBI GI: 121702483 Blast Desc: conserved [Aspergillus clavatus NRRL 1] gi|119397649|gb|EAW08080.1| conserved [Aspergillus clavatus NRRL 1]
  misc_feature (8)..(311): NCBI GI: 238492419 Blast Desc: alpha/beta hydrolase, [Aspergillus flavus NRRL3357] gi|220695940|gb|EED52282.1| alpha/beta hydrolase, [Aspergillus flavus NRRL3357]
  misc_feature (8)..(311): NCBI GI: 169782774 Blast Desc: [Aspergillus oryzae RIB40] gi|83774593|dbj|BAE64716.1| protein product [Aspergillus oryzae]
  misc_feature (9)..(310): NCBI GI: 212538319 Blast Desc: conserved [Penicillium marneffei ATCC 18224] gi|210069057|gb|EEA23148.1| conserved [Penicillium marneffei ATCC 18224]
  misc_feature (8)..(308): NCBI GI: 242796120 Blast Desc: conserved [Talaromyces stipitatus ATCC 10500] gi|218719321|gb|EED18741.1| conserved [Talaromyces stipitatus ATCC 10500]
  misc_feature (1)..(310): NCBI GI: 154303156 Blast Desc: BC1G_09598 [Botryotinia fuckeliana B05.10] gi|150855061|gb|EDN30253.1| BC1G_09598 [Botryotinia fuckeliana B05.10]
  misc_feature (9)..(310): NCBI GI: 212526516 Blast Desc: conserved [Penicillium marneffei ATCC 18224] gi|210072813|gb|EEA26900.1| conserved [Penicillium marneffei ATCC 18224]
  misc_feature (8)..(309): NCBI GI: 261195306 Blast Desc: alpha/beta hydrolase [Ajellomyces dermatitidis SLH14081] gi|239587929|gb|EEQ70572.1| alpha/beta hydrolase [Ajellomyces dermatitidis SLH14081]
  misc_feature (8)..(309): NCBI GI: 239610580 Blast Desc: alpha/beta hydrolase [Ajellomyces dermatitidis ER-3]
MAFNSPRLIHIGSHSLALYTHGPEPKNSHEPVVLFVSGVSSDALNWQAVVRQLPSNLRSYTYDRSGFRNSESSPRAPSAENIALELSLLIENAQIANPLILVGHSWAGVLLHEYIVLKGIEQIAGLVLVDANHETHLQVMNVNDPILWDIIGATLEPYAAMGIEAEHKLTQEEWKAFREVHSGEKYDAISQKEDSEYPSSFEILQEKGLSRKQPLLREKPVFVIGATRSRDWSGLYEAGVAKGNGNEEQRAHVRDMIKTVDGKTEQLQKEFLKLSTRSKLVFATESGHFVQLTQPDVVVNGVQWVLDHLRPL

SEQ ID NO: 1076 - DNA, 904 bp, Muscodor strobelii
  misc_feature: SGI EST ID NO. CUFF.2956.0
  misc_feature: Variant of the nucleotide sequence at SEQ ID NO 1074
tctggctttcgcaattcagaatcttcaccgcgagctccttcagccgaaaacattgccctggagctatcgctcctgattgaaaatgctcaaatcgcaaatccgctaattctcgtgggtcactcatgggcaggggtactcctacacgagtacatcgtacttaagggaattgaacaaatcgccggtcttgttctcgttgatgccaatcatgagacgcatttacaggtgatgaatgtcaatgatccaatactctgggatatcatcggtgctactttggagccatacgctgccatgggtatcgaagcagagcataagctgacgcaggaggagtggaaggcgttcagagaggtgcattctggcgaaaaatacgacgcaatatcacaaaaagaagattccgaatacccttccagtttcgaaattctccaagaaaaggggttgagtaggaagcaacccctgttgagggagaaaccagtcttcgtgataggggccacgcggagcagagattggtctggattgtacgaagcaggtgttgcgaagggaaacggaaacgaggagcagagggctcatgtcagagatatgatcaagaccgtagacgggaaaactgagcagctccaaaaggagtttctgaagctctcgaccaggagcaagcttgtttttgcgacggagagtggccattttgttcagttgacacaacctgatgttgttgtcaatggagtccaatgggtcttagaccatttacgcccactctaatcggccaataacaatatgaagatccttagataagaatggtcccacggttaacatgagcttggcacataagtggtgtgaccccaagcagcaatgctattgactgatcttatctcagatatttgatagggtagctagatatgacgctggtgatattagg

SEQ ID NO: 1077 - DNA, 960 bp, Muscodor strobelii
  misc_feature: SGI cDNA ID NO. 559947
  misc_feature: Encodes the peptide sequence at SEQ ID NO 1078
atgccacaaggttctgtgacctatccaaccataggctgggagttcgtaatgcgtctcatgcgtcgtcaacacataatcgcccatggccatcgtcagtgggccgaggaccagttcgacggcgccttcaggcgattgttcaactctcacgtcaatggtacgctgccagggctgtgtcgtggtcgtgtcccgctacactttttcatgctgagcctgtacaaggacatggccaacaagttctggcccaagtctctcgaagacgatgacatgtacaagtttgagccaatgcgaaaccagcactcgagacctgtcgccagagccgagtttctcaacgtcgacgtttcagctctttcgtttcgacagatttgcgagtttgtcgccactaatgctcgtccagccttcgaggtcccaacgaagtctcgacgagtcaatccttgcaggcggcgaaagcgcaacggccgccaccgagtgcagagaagaatgccaaaaccggtcactcccacaggtcctcctcgccgcgatcttgttcagacaagcccaactccaaaaatggagtctccagctcctcgaagagttcttgcgagaatccccatgatcgagaccacaaatccgcctcaagcaaatacccctatatattcagacagacctgtcactttgactgccgagcttgaaataaggaaacccgtactgtcttacaagtgtcgtcccggctttgacctaaacgatcgaagggtatggaccgtggctcccggtgcaaagctaccgtctaatgaagtcttcgacatgattgacaaccgtatacgcagcaactctactacgtcctccatcactctttcggatcaagcgcctaccaccatcatattcaagccgacatcgaaagaggaccaacagatgtttttggatgcatttctcggacggaagaatccttcgctgcttggaaaatggatgagacaattgctataa

SEQ ID NO: 1078 - protein, 319 aa, Muscodor strobelii
  misc_feature: SGI Peptide ID NO. 559947
MPQGSVTYPTIGWEFVMRLMRRQHIIAHGHRQWAEDQFDGAFRRLFNSHVNGTLPGLCRGRVPLHFFMLSLYKDMANKFWPKSLEDDDMYKFEPMRNQHSRPVARAEFLNVDVSALSFRQICEFVATNARPAFEVPTKSRRVNPCRRRKRNGRHRVQRRMPKPVTPTGPPRRDLVQTSPTPKMESPAPRRVLARIPMIETTNPPQANTPIYSDRPVTLTAELEIRKPVLSYKCRPGFDLNDRRVWTVAPGAKLPSNEVFDMIDNRIRSNSTTSSITLSDQAPTTIIFKPTSKEDQQMFLDAFLGRKNPSLLGKWMRQLL

SEQ ID NO: 1079 - DNA, 1035 bp, Muscodor strobelii
  misc_feature: SGI cDNA ID NO. 559948
  misc_feature: Encodes the peptide sequence at SEQ ID NO 1080
atggaaggtgggtgtcagaccgttggccagcgggcgcccattcctgagctgactagtgcgccagtagtatcaagcacgacgatagatagcagcatctctacttcttcttcgctcaatttcgtacaagaagggcatcaagtcatgcaactcaatccagagaaaggactgatctccttccatctctttccgaatctaccccccgaactgcgtttactcatttgggaagaggcgatgagaagcgagctacaaatcgtaaaatcatctgattgcactctgtacacgcacagatctgcagatggcctgaggggtattcggcccttcatgaagatcgatggccagatctatcaacaagtgccatcgttcttttttgtgagccaagaatgccacaagactgccaagaagtattattcgatttgcgtggatgacgaaactcgtccctacgagtttaataatagcctacccgcgtcggagccaattgcaaagctcattgcaagtccagatgctattctttacgacggtgtctcttacaagtcagaacgtattaagcgaagtacttctaccctgatagacaggatcagactacgtacagttgtaatgcgcagtttctgtatcaaacctcctgcctgcttaggagattggcaggtgcaattgctcgagatcgtggcgaattcgaaatcaaataaaaatgcactgcgggattatttcgccgagaaatcgaaaagagacgtacaagctcacaacgcaaagatgaccgactatcacatccagtatctaacacgcttgaaaaagaacgccgtcgatcaatgggttcttcccgttgctatatacgggcaagatcagtccccaaacactagtctcaaagaatctcacttccattacgtcgaccgacatgatctattacctaccggatactgggcccaaaagaagcgcgaagagaacagtaaatactccaaagtccgagccagggcaagggtagctaggaaaatacgatttgctcggatcacggaagcaccaagcgttgtgccacagaaatga

SEQ ID NO: 1080 - protein, 344 aa, Muscodor strobelii
  misc_feature: SGI Peptide ID NO. 559948
MEGGCQTVGQRAPIPELTSAPVVSSTTIDSSISTSSSLNFVQEGHQVMQLNPEKGLISFHLFPNLPPELRLLIWEEAMRSELQIVKSSDCTLYTHRSADGLRGIRPFMKIDGQIYQQVPSFFFVSQECHKTAKKYYSICVDDETRPYEFNNSLPASEPIAKLIASPDAILYDGVSYKSERIKRSTSTLIDRIRLRTVVMRSFCIKPPACLGDWQVQLLEIVANSKSNKNALRDYFAEKSKRDVQAHNAKMTDYHIQYLTRLKKNAVDQWVLPVAIYGQDQSPNTSLKESHFHYVDRHDLLPTGYWAQKKREENSKYSKVRARARVARKIRFARITEAPSVVPQK

SEQ ID NO: 1081 - DNA, 288 bp, Muscodor strobelii
  misc_feature: SGI cDNA ID NO. 559949
  misc_feature: Encodes the peptide sequence at SEQ ID NO 1082
atgaccgactatcacatccagtatctaacacgcttgaaaaagaacgccgtcgatcaatgggttcttcccgttgctatatacgggcaagatcagtccccaaacactagtctcaaagaatctcacttccattacgtcgaccgacatgatctattacctaccggatactgggcccaaaagaagcgcgaagagaacagtaaatactccaaagtccgagccagggcaagggtagctaggaaaatacgatttgctcggatcacggaagcaccaagcgttgtgccacagaaatga

SEQ ID NO: 1082 - protein, 95 aa, Muscodor strobelii
  misc_feature: SGI Peptide ID NO. 559949
MTDYHIQYLTRLKKNAVDQWVLPVAIYGQDQSPNTSLKESHFHYVDRHDLLPTGYWAQKKREENSKYSKVRARARVARKIRFARITEAPSVVPQK

SEQ ID NO: 1083 - DNA, 2157 bp, Muscodor strobelii
  misc_feature: SGI cDNA ID NO. 559950
  misc_feature: Encodes the peptide sequence at SEQ ID NO 1084
atgaacacatccaaacccctttccttagccccggccccgagctcggatgtaagcgcggggagcatggcacagaatcaggacccaggtatcatgccctataactgtcaaccctgtgtgcgacgcaaggtaaaatgcgatcgcatcactccgatatgtacaagctgcacgcgacgcaaggtatcatgctattatcaagctccggcgccgccgcgcccgagacgtcggaagccctcagtcatcgaggacatgaacgagcggctcgcgaggtatgagcgaacactcaaggaacacgggctacttggcgcggtggagtcgaacatagaggcagacgggacgtatatcacgcctagggacgagcatgcgcccggtgggagcgaactacgtgcgggatctacgaggagcggcatagcgatccatgagatcgcatctcccgatggaccccagaatgagggaaagctcctagcaactgatggcaggtcgcgatacatcgacagtagtatctggatgaacgctgcagacgaggagatacaagctatcatggatgaagacgatagcgatggagatcgtcggccatcaaatggaattgatgctctaggcaatgtcaccgatccattatcccaggctctactaggaatgacgcacaatctgacgtgttttcatccctctcacgattccgcgatgaaactctggaagatatatacggagaacgtcgatcctctatgcagggtcttgcacattcccacaacatcccgcatggtcgaatccgtctgccagcgaccagcaaacgcaagcaaagtccaagaatgtctcctattctccatatactacgccgcaactcactctctccatcccaccgactgctcaactctcttctccgagccccgcgcagtcctgctatcccgctaccaagcagcagtccaccaatctctcgtgaacgtctcattcctccgcacagcagaaatgcccgtgatgcaagcctacatcctctacctcatcgcctgccgctcaaccatggacccgcacacatactggatcctagtcggtgtcgcaatccgtctagcacaacgcatcggcctccaccgcgacggcgaagccctcggcctgccacccttcgaagtccaaatgcgtcgtcgcttattctggcaactcttgcctttagacggctactccgggcaaatgagcggaacaggaatcttcatatcccccaactcctgggacacaaagatgccgcttaactgctccgacaccgccatctggccaggcatgaccacaccacccgtcgaagtcgcaggagcctcagacatgatattcgtcctccccaaagtagagctctcaaacttctacatccggacctccgtctcctctccctctccaaaaggccggttgggtcaaaaacccgccccagaactcagcaccctaatcacgcgcgtcgaatcactcgtcgaagagaaatatctccggtactgcgacataatcaacccgctgcacttcctaaccctcgccataacccgctcagcactaaacatggtgcgactccgctcctccatgtcgaccatcctctcgcaatccctgcctgacgcgcaacgccgtgcgatgtgcaccacagcgctcaaaatcctcgacacagacctcgcgttatacgctaacccggcaatccgaaaattccactggcatctggcgaacttcttcctccgcgacgctatcctcactatcctgttctctattctcaaaactgggttctttagtacgatggagagagacgagatttgggataagataaagaatattttcgcaaatcaccctgaaccgacgacttctcctagagccatatacgtagtgatagctcgtgtcacgctccaggcttgggttacgaacccaccgacctcaaatgttcccgaaccagagttcatcactgcgttgcggaatctgaggaagaaacgtgagggcgccttggacaaggtgtctgataggcgagaagccggaagcgtcgatgatggaagtacacaggacggtggagtggcagatctaggttttatgcccccgcttgacaatatgtttgattttgatccgcgaagtttcggcatggattcgaatttcaatccaatatcaacggattggatgttctgggaggaagacctagcggcagttccagaataa

SEQ ID NO: 1084 - protein, 718 aa, Muscodor strobelii
  misc_feature: SGI Peptide ID NO. 559950
  misc_feature (33)..(71): Pfam Id: PF00172 Pfam Desc: Fungal Zn(2)-Cys(6) binuclear cluster domain
  misc_feature (320)..(416): Pfam Id: PF04082 Pfam Desc: Fungal specific transcription factor domain
  misc_feature (3)..(711): NCBI GI: 238506233 Blast Desc: C6 transcription factor, [Aspergillus flavus NRRL3357] gi|220689031|gb|EED45382.1| C6 transcription factor, [Aspergillus flavus NRRL3357]
  misc_feature (6)..(711): NCBI GI: 119482764 Blast Desc: fungal specific transcription factor, [Neosartorya fischeri NRRL 181] gi|119409565|gb|EAW19513.1| fungal specific transcription factor, [Neosartorya fischeri NRRL 181]
  misc_feature (6)..(711): NCBI GI: 70987078 Blast Desc: C6 transcription factor [Aspergillus fumigatus Af293] gi|66846651|gb|EAL86983.1| C6 transcription factor, [Aspergillus fumigatus Af293]
  misc_feature (23)..(711): NCBI GI: 121706392 Blast Desc: C6 transcription factor domain protein [Aspergillus clavatus NRRL 1] gi|119399605|gb|EAW10033.1| C6 transcription factor domain protein [Aspergillus clavatus NRRL 1]
  misc_feature (6)..(711): NCBI GI: 159123209 Blast Desc: C6 transcription factor, [Aspergillus fumigatus A1163]
  misc_feature (1)..(575): NCBI GI: 115401760 Blast Desc: [Aspergillus terreus NIH2624] gi|114190409|gb|EAU32109.1| [Aspergillus terreus NIH2624]
  misc_feature (9)..(641): NCBI GI: 261356630 Blast Desc: C6 transcription factor domain-containing protein [Verticillium albo-atrum VaMs.102]
  misc_feature (152)..(711): NCBI GI: 145247929 Blast Desc: An13g00730 [Aspergillus niger] gi|134080960|emb|CAK41474.1| protein product [Aspergillus niger]
  misc_feature (7)..(711): NCBI GI: 116179110 Blast Desc: CHGG_00183 [Chaetomium globosum CBS 148.51] gi|88184480|gb|EAQ91948.1| CHGG_00183 [Chaetomium globosum CBS 148.51]
  misc_feature (31)..(672): NCBI GI: 225563034 Blast Desc: C6 zinc finger domain-containing protein [Ajellomyces capsulatus G186AR]
MNTSKPLSLAPAPSSDVSAGSMAQNQDPGIMPYNCQPCVRRKVKCDRITPICTSCTRRKVSCYYQAPAPPRPRRRKPSVIEDMNERLARYERTLKEHGLLGAVESNIEADGTYITPRDEHAPGGSELRAGSTRSGIAIHEIASPDGPQNEGKLLATDGRSRYIDSSIWMNAADEEIQAIMDEDDSDGDRRPSNGIDALGNVTDPLSQALLGMTHNLTCFHPSHDSAMKLWKIYTENVDPLCRVLHIPTTSRMVESVCQRPANASKVQECLLFSIYYAATHSLHPTDCSTLFSEPRAVLLSRYQAAVHQSLVNVSFLRTAEMPVMQAYILYLIACRSTMDPHTYWILVGVAIRLAQRIGLHRDGEALGLPPFEVQMRRRLFWQLLPLDGYSGQMSGTGIFISPNSWDTKMPLNCSDTAIWPGMTTPPVEVAGASDMIFVLPKVELSNFYIRTSVSSPSPKGRLGQKPAPELSTLITRVESLVEEKYLRYCDIINPLHFLTLAITRSALNMVRLRSSMSTILSQSLPDAQRRAMCTTALKILDTDLALYANPAIRKFHWHLANFFLRDAILTILFSILKTGFFSTMERDEIWDKIKNIFANHPEPTTSPRAIYVVIARVTLQAWVTNPPTSNVPEPEFITALRNLRKKREGALDKVSDRREAGSVDDGSTQDGGVADLGFMPPLDNMFDFDPRSFGMDSNFNPISTDWMFWEEDLAAVPE

SEQ ID NO: 1085 - DNA, 1479 bp, Muscodor strobelii
  misc_feature: SGI cDNA ID NO. 559951
  misc_feature: Encodes the peptide sequence at SEQ ID NO 1086
atgaaactctggaagatatatacggagaacgtcgatcctctatgcagggtcttgcacattcccacaacatcccgcatggtcgaatccgtctgccagcgaccagcaaacgcaagcaaagtccaagaatgtctcctattctccatatactacgccgcaactcactctctccatcccaccgactgctcaactctcttctccgagccccgcgcagtcctgctatcccgctaccaagcagcagtccaccaatctctcgtgaacgtctcattcctccgcacagcagaaatgcccgtgatgcaagcctacatcctctacctcatcgcctgccgctcaaccatggacccgcacacatactggatcctagtcggtgtcgcaatccgtctagcacaacgcatcggcctccaccgcgacggcgaagccctcggcctgccacccttcgaagtccaaatgcgtcgtcgcttattctggcaactcttgcctttagacggctactccgggcaaatgagcggaacaggaatcttcatatcccccaactcctgggacacaaagatgccgcttaactgctccgacaccgccatctggccaggcatgaccacaccacccgtcgaagtcgcaggagcctcagacatgatattcgtcctccccaaagtagagctctcaaacttctacatccggacctccgtctcctctccctctccaaaaggccggttgggtcaaaaacccgccccagaactcagcaccctaatcacgcgcgtcgaatcactcgtcgaagagaaatatctccggtactgcgacataatcaacccgctgcacttcctaaccctcgccataacccgctcagcactaaacatggtgcgactccgctcctccatgtcgaccatcctctcgcaatccctgcctgacgcgcaacgccgtgcgatgtgcaccacagcgctcaaaatcctcgacacagacctcgcgttatacgctaacccggcaatccgaaaattccactggcatctggcgaacttcttcctccgcgacgctatcctcactatcctgttctctattctcaaaactgggttctttagtacgatggagagagacgagatttgggataagataaagaatattttcgcaaatcaccctgaaccgacgacttctcctagagccatatacgtagtgatagctcgtgtcacgctccaggcttgggttacgaacccaccgacctcaaatgttcccgaaccagagttcatcactgcgttgcggaatctgaggaagaaacgtgagggcgccttggacaaggtgtctgataggcgagaagccggaagcgtcgatgatggaagtacacaggacggtggagtggcagatctaggttttatgcccccgcttgacaatatgtttgattttgatccgcgaagtttcggcatggattcgaatttcaatccaatatcaacggattggatgttctgggaggaagacctagcggcagttccagaataa

SEQ ID NO: 1086 - protein, 492 aa, Muscodor strobelii
  misc_feature: SGI Peptide ID NO. 559951
  misc_feature (94)..(190): Pfam Id: PF04082 Pfam Desc: Fungal specific transcription factor domain
  misc_feature (3)..(485): NCBI GI: 70987078 Blast Desc: C6 transcription factor [Aspergillus fumigatus Af293] gi|66846651|gb|EAL86983.1| C6 transcription factor, [Aspergillus fumigatus Af293]
  misc_feature (2)..(485): NCBI GI: 119482764 Blast Desc: fungal specific transcription factor, [Neosartorya fischeri NRRL 181] gi|119409565|gb|EAW19513.1| fungal specific transcription factor, [Neosartorya fischeri NRRL 181]
  misc_feature (3)..(485): NCBI GI: 121706392 Blast Desc: C6 transcription factor domain protein [Aspergillus clavatus NRRL 1] gi|119399605|gb|EAW10033.1| C6 transcription factor domain protein [Aspergillus clavatus NRRL 1]
  misc_feature (1)..(485): NCBI GI: 238506233 Blast Desc: C6 transcription factor, [Aspergillus flavus NRRL3357] gi|220689031|gb|EED45382.1| C6 transcription factor, [Aspergillus flavus NRRL3357]
  misc_feature (1)..(485): NCBI GI: 169785257 Blast Desc: [Aspergillus oryzae RIB40] gi|83775837|dbj|BAE65956.1| protein product [Aspergillus oryzae]
  misc_feature (3)..(485): NCBI GI: 159123209 Blast Desc: C6 transcription factor, [Aspergillus fumigatus A1163]
  misc_feature (2)..(349): NCBI GI: 115401760 Blast Desc: [Aspergillus terreus NIH2624] gi|114190409|gb|EAU32109.1| [Aspergillus terreus NIH2624]
  misc_feature (2)..(485): NCBI GI: 145247929 Blast Desc: An13g00730 [Aspergillus niger] gi|134080960|emb|CAK41474.1| protein product [Aspergillus niger]
  misc_feature (1)..(415): NCBI GI: 261356630 Blast Desc: C6 transcription factor domain-containing protein [Verticillium albo-atrum VaMs.102]
  misc_feature (3)..(485): NCBI GI: 116179110 Blast Desc: CHGG_00183 [Chaetomium globosum CBS 148.51] gi|88184480|gb|EAQ91948.1| CHGG_00183 [Chaetomium globosum CBS 148.51]
MKLWKIYTENVDPLCRVLHIPTTSRMVESVCQRPANASKVQECLLFSIYYAATHSLHPTDCSTLFSEPRAVLLSRYQAAVHQSLVNVSFLRTAEMPVMQAYILYLIACRSTMDPHTYWILVGVAIRLAQRIGLHRDGEALGLPPFEVQMRRRLFWQLLPLDGYSGQMSGTGIFISPNSWDTKMPLNCSDTAIWPGMTTPPVEVAGASDMIFVLPKVELSNFYIRTSVSSPSPKGRLGQKPAPELSTLITRVESLVEEKYLRYCDIINPLHFLTLAITRSALNMVRLRSSMSTILSQSLPDAQRRAMCTTALKILDTDLALYANPAIRKFHWHLANFFLRDAILTILFSILKTGFFSTMERDEIWDKIKNIFANHPEPTTSPRAIYVVIARVTLQAWVTNPPTSNVPEPEFITALRNLRKKREGALDKVSDRREAGSVDDGSTQDGGVADLGFMPPLDNMFDFDPRSFGMDSNFNPISTDWMFWEEDLAAVPE

SEQ ID NO: 1087 - DNA, 837 bp, Muscodor strobelii
  misc_feature: SGI cDNA ID NO. 559952
  misc_feature: Encodes the peptide sequence at SEQ ID NO 1088
atgcagtatgtaaagttacgtctgcgcaagaatgactgggaaagcgtcacaacgagccatccagactatattcgattttataacagtctgtggcttgtcgctaatgatgtgatcattggcatagccgttgggtcgtacatcattgaaaatggtgactgggtagcagctacaatcaacatgctcctcgaggaatatgctattactgccttgcgtagcagtatcgagtggctcatgggttggccggctggcctcaagctcaacagcgaattggctttgttccttggcgatctctttctattcgtcatcaactactggtctagctgcgtccaaacgcttcgaccactgctcccgacaatgatatggttcatcggattctcttcctttggtggtgcgagtatgcccattgccatgttatcagatctgctctcgatgcttaccctccatatctactcgttctaccttgcctcggcccgaatattccattggcagctcacgattctcctctcgttatttcaactatttcgagggaagaagtacaatgtgttacggaatcgagtagattcctgcgactacgatctagatcagctcctcgtcggcaccatcttattcaccttgttattcttcttgctaccgactgtcattgtcttctaccttaattttgccctagcgcgtatggtcatcatatcgctgaaagcgatttttgacacaatgctttcctgcttgaatcatttcccactatttgcactcatgcttcgggccaaggaccccaagcgacttccgggtaagtattccgatcccggaacaaattcagctacaagggacactaacgtaatctag

SEQ ID NO: 1088 - protein, 278 aa, Muscodor strobelii
  misc_feature: SGI Peptide ID NO. 559952
  misc_feature (25)..(213): Pfam Id: PF05024 Pfam Desc: N-acetylglucosaminyl transferase component (Gpi1)
  misc_feature (1)..(278): NCBI GI: 171679577 Blast Desc: protein product [Podospora anserina] gi|170939414|emb|CAP64642.1| protein product [Podospora anserina]
  misc_feature (1)..(276): NCBI GI: 164426974 Blast Desc: NCU02255 [Neurospora crassa OR74A] gi|157071552|gb|EAA30663.2| NCU02255 [Neurospora crassa OR74A]
  misc_feature (1)..(276): NCBI GI: 40804634 Blast Desc: related to N-acetylglucosaminyl-phosphatidylinositol biosynthetic protein gpi1 [Neurospora crassa]
  misc_feature (1)..(276): NCBI GI: 46123359 Blast Desc: FG06057.1 [Gibberella zeae PH-1]
  misc_feature (1)..(271): NCBI GI: 261355074 Blast Desc: phosphatidylinositol N-acetylglucosaminyltransferase subunit GPI1 [Verticillium albo-atrum VaMs.102]
  misc_feature (1)..(276): NCBI GI: 256733014 Blast Desc: NECHADRAFT_60009 [Nectria haematococca mpVI 77-13-4]
  misc_feature (1)..(261): NCBI GI: 242767108 Blast Desc: N-acetylglucosaminyl transferase component Gpi1 [Talaromyces stipitatus ATCC 10500] gi|218724501|gb|EED23918.1| N-acetylglucosaminyl transferase component Gpi1 [Talaromyces ATCC
  misc_feature (1)..(261): NCBI GI: 212528166 Blast Desc: N-acetylglucosaminyl transferase component Gpi1 [Penicillium marneffei ATCC 18224] gi|210073638|gb|EEA27725.1| N-acetylglucosaminyl transferase component Gpi1 [Penicillium ATCC
  misc_feature (1)..(261): NCBI GI: 145252304 Blast Desc: An16g03530 [Aspergillus niger] gi|134083213|emb|CAK42851.1| protein product [Aspergillus niger]
  misc_feature (1)..(260): NCBI GI: 156039495 Blast Desc: SS1G_11884 [Sclerotinia sclerotiorum 1980] gi|154697621|gb|EDN97359.1| SS1G_11884 [Sclerotinia sclerotiorum 1980]
  misc_feature (20)..(264): SWISSPROT Homolog: EC 2.4.1.198 Phosphatidylinositol N-acetylglucosaminyltransferase
MQYVKLRLRKNDWESVTTSHPDYIRFYNSLWLVANDVIIGIAVGSYIIENGDWVAATINMLLEEYAITALRSSIEWLMGWPAGLKLNSELALFLGDLFLFVINYWSSCVQTLRPLLPTMIWFIGFSSFGGASMPIAMLSDLLSMLTLHIYSFYLASARIFHWQLTILLSLFQLFRGKKYNVLRNRVDSCDYDLDQLLVGTILFTLLFFLLPTVIVFYLNFALARMVIISLKAIFDTMLSCLNHFPLFALMLRAKDPKRLPGKYSDPGTNSATRDTNVI

SEQ ID NO: 1089 - DNA, 7244 bp, Muscodor strobelii
  misc_feature: SGI EST ID NO. CUFF.3450.0
  misc_feature: Variant of the nucleotide sequence at SEQ ID NO 1087
caggcagctcgtcataataattgcttctcatcggatggcatgaacgaacatctgcattctttgatatcttcgtcctgtgccttcagcaagtctcttccgagcctccaagtgatcagacaagaactgtgatataccgtcaacttacctaacgttgcattctgcgctgtcttctcaaacctccattgtccgcatcactacactactgctaagcgtacagtctcttcccaaggctgctagtgggctgatgataacatgtcggcttcgcttgcgcctgagtgtaacgaagtaaaagaacgatacgatacctgctttcttaagtggtatagcgaaagtaagtcaacttgccttgcctctcacatgtcttgggtcttagcgcagacatgagttagctggcttacaagcatagagtatttacgcggcaacggaaagacggatgacaacgagtgctctaaactctttgaaaactatcagaagtgcctcacggtcgcactcaaagagcgcggcatcgacaaattgctggtcgaggcccgtgaagacagcaaagagaatgattccatacatatgaaacgaaagtaaaggcatcatccagactcaccggctcgatccgaaccccggcaatccggcgtcgagctggccctgcagcgccgcctcgcgcctagcatcttggcacctgaacgggttaccaccgagatggaaccccacgtaacccatagccgcaccatgatcctgcatctgggcaggaggtgacataagaaatacgagaatggaaatgtcagactggcgattggcctgtcagatatctgggtgatggtcatcataggtagacatagttattgagtcacacctgccaattgggcctagggcagcgcaagtgtcgcaggaaggataaattatctcgtgtcatggcaacaacaaggacctttgacgatcatttcgtattctcttggcctgcatatataagaagagacatctcagcttagactcaaaatctcacctgctcccctctccatatatctatctcaaagacttgtcgcatcgcatttcttgatgctcgtgccgcaatcacttcgtctgaaccgcagccttcattacggattgtgagaaaccgcaatggtaatgatcgagttgccgagatgctctcatagcggttgatctttgagcatgagtgacgtgaacttagatttggctgaaagacgtctatgcgcgacgactacggcatcggagcaagtgggtttgacatattcagcagaggcgtaagtatgtgctccagctgaacggcaatgtgatgtgatttatcgacatttggattgtggtgcagatgatgcggcgtgtcgtctaggtaggttgctctcggcaagagccgcgcgtctctttcgactgccgagacattacctatctcccgatgtcttctcgcaagtacctcaacatggcgcctcgcggaattgtttccctctaatttgcagattcggtagtataatctagctactccttaaccccgagtcattttacacatcttctcttgctttggtggttatcgatagtgagtagcattgcatcgtttcacgctgcacggttggcgcatctggcgagtctggccaatttgcttctccaccaaacctccaaaactccactggctccgatctgggccaaggaaagattgcagttcgtctatcgatccagataacatcaccagcagcacctctactactatccattcccgccctcatccttacggtgctactcgccttgtcggcctacgacaatcattctcgccatctcgtctgctggtgcaagacagcctcgcctacccacttgcttgtttcaagccccgacgctcgtttagatatccaacagacctatttgctccccagccaggagaggagggggatcccaatcatccatcgcgtgcgacaataacgacgacacaccgacaatagagctccggccaataaagcgaccatttccgacgagtgtgactctgtgtcccgagtctctaagctctgcatcactccagaaaagtcccacgtcactcatcccacattcgcaacaacggaatcgtaccttgctattagggatgccagtcggtcggccataaacacttccttcgcgcgactcgtcctttatgcaccccttctctatcctaactctcgccatcttcgtagcgggctatatcactgctcgatgggatctggtcgcacgtttatacgaccttgtccttttcgcctgggataaaggtgtcatttcccgtgtcgccattggcttcagcttcctgagccttgccttcttcctgctgttcatacctgtacagcgacttgcacacatcgaggccgatctgcatccgcgatcgccgagtcggggagtgtctgcacgagaacagctcaggcgcagaggctccttctagccgggagctctctgtcgccgtcttgacatgccagagaacgatggcctgatgcgagttttctggccgattgacatcgtgacctcggacttgccgggcgtcatcgtcggatggaggaattccaccctggacttcgttgtcgtggctgtcttggagcatgtggaccctcggagtgttgagaatgccctgaagaccggcattctgctgcgcaatgcccctcattccgttcctcggatcttcgacttgtgtggccaatctgctctgcatgttcttggactggccaatcccgtgcctgaagcgatctctgagccaacatgggtgcatgcaacaacaaatacctctgaacgttaccctcgagtttactgcccgaaagcctcaaatgttcagaccatactcttcgcccgaccaaacccacttcagatgcaatacatctccttgaacccgattgcactttctctcggtgataagaatgagtcatcgtacaccggctatcaccaacccgacgctgaggcggagaagcaggagctcaagaacaaacggaaagctacgtacttggtggacaaagtgaagcagcattcagttgtgaaacattcggcgaccgcaaaggagaaagctttaaccaaaatcgtcaatcagatcaactgggcatgggagcttgagcatcttttgcaaaagaatgtccctctcataggtccccggcccaaacgtgcgctgagcgtctcggagcgtgtggtggaacacgccacggcggtgagggacaacatcatgctgtggatatgggatatgatcatcatctacgcctttcccataataagacgtgccgtcattctaacactgcttggtcatcgaatagcagccgaagtccttctcttcgtcctcgaatggcgccttcgacctggctcttctgccctcaaggacatttccgctactgcacaacaagtagaaattcggctgcaacaattctgctattggccaatgcagtatgtaaagttacgtctgcgcaagaatgactgggaaagcgtcacaacgagccatccagactatattcgattttataacagtctgtggcttgtcgctaatgatgtgatcattggcatagccgttgggtcgtacatcattgaaaatggtgactgggtagcagctacaatcaacatgctcctcgaggaatatgctattactgccttgcgtagcagtatcgagtggctcatgggttggccggctggcctcaagctcaacagcgaattggctttgttccttggcgatctctttctattcgtcatcaactactggtctagctgcgtccaaacgcttcgaccactgctcccgacaatgatatggttcatcggattctcttcctttggtggtgcgagtatgcccattgccatgttatcagatctgctctcgatgcttaccctccatatctactcgttctaccttgcctcggcccgaatattccattggcagctcacgattctcctctcgttatttcaactatttcgagggaagaagtacaatgtgttacggaatcgagtagattcctgcgactacgatctagatcagctcctcgtcggcaccatcttattcaccttgttattcttcttgctaccgactgtcattgtcttctaccttaattttgccctagcgcgtatggtcatcatatcgctgaaagcgatttttgacacaatgctttcctgcttgaatcatttcccactatttgcactcatgcttcgggccaaggaccccaagcgacttccgggcggcatccattttgaacttcgtgatacccatgatatacgtagtaataattccaaatcttcgctttcatcttcgccaacatcggtcatctatttaaaaccgattccactggaattcactgccatgtttcaccagtattttgagatgggaaatcgcattcgaaaacactatttgtctcttcgcgtccttttctgccttctcactgggcgcttcgttccgcccatccaccggaaaaacctttactccttacagtatagcatgctaccagcccgtagagcgggcatcatggagatgtgggaggcgcttaattcacttcccgccaagaagcctgcgaggttacatccttttcgtgttgccacgaataccatcatgccgaatggacgacgacacatgaacgggcgggcaccccgaggcggggtgaggcatggatgacatggtcgactttcatgtcacacgggcgttgggaatggtacatagacggcatagaatagggggcatgtcacagcaacgattcttgatttctgtatacagcgatttgtctttttgaaccagacgcggttctttgaatgcatcagatgatcacgagctcatcatttcactatcctatacaaacgtgccttcatatttgcaactaaccaagatactactacttggttcttttaggaaccaatccgattaattgcgggtttattctggaactgccgctaggtcttcctcccagaacatccaatccgttgatattggattgaaattcgaatccatgccgaaacttcgcggatcaaaatcaaacatattgtcaagcgggggcataaaacctagatctgccactccaccgtcctgtgtacttccatcatcgacgcttccggcttctcgcctatcagacaccttgtccaaggcgccctcacgtttcttcctcagattccgcaacgcagtgatgaactctggttcgggaacatttgaggtcggtgggttcgtaacccaagcctggagcgtgacacgagctatcactacgtatatggctctaggagaagtcgtcggttcagggtgatttgcgaaaatattctttatcttatcccaaatctcgtctctctccatcgtactaaagaacccagttttgagaatagagaacaggatagtgaggatagcgtcgcggaggaagaagttcgccagatgccagtggaattttcggattgccgggttagcgtataacgcgaggtctgtgtcgaggattttgagcgctgtggtgcacatcgcacggcgttgcgcgtcaggcagggattgcgagaggatggtcgacatggaggagcggagtcgcaccatgtttagtgctgagcgggttatggcgagggttaggaagtgcagcgggttgattatgtcgcagtaccggagatatttctcttcgacgagtgattcgacgcgcgtgattagggtgctgagttctggggcgggtttttgacccaaccggccttttggagagggagaggagacggaggtccggatgtagaagtttgagagctctactttggggaggacgaatatcatgtctgaggctcctgcgacttcgacgggtggtgtggtcatgcctggccagatggcggtgtcggagcagttaagcggcatctttgtgtcccaggagttgggggatatgaagattcctgttccgctcatttgcccggagtagccgtctaaaggcaagagttgccagaataagcgacgacgcatttggacttcgaagggtggcaggccgagggcttcgccgtcgcggtggaggccgatgcgttgtgctagacggattgcgacaccgactaggatccagtatgtgtgcgggtccatggttgagcggcaggcgatgaggtagaggatgtaggcttgcatcacgggcatttctgctgtgcggaggaatgagacgttcacgagagattggtggactgctgcttggtagcgggatagcaggactgcgcggggctcggagaagagagttgagcagtcggtgggatggagagagtgagttgcggcgtagtatatggagaataggagacattcttggactttgcttgcgtttgctggtcgctggcagacggattcgaccatgcgggatgttgtgggaatgtgcaagaccctgcatagaggatcgacgttctccgtatatatcttccagagtttcatcgcggaatcgtgagagggatgaaaacacgtcagattgtgcgtcattcctagtagagcctgggataatggatcggtgacattgcctagagcatcaattccatttgatggccgacgatctccatcgctatcgtcttcatccatgatagcttgtatctcctcgtctgcagcgttcatccagatactactgtcgatgtatcgcgacctgccatcagttgctaggagctttccctcattctggggtccatcgggagatgcgatctcatggatcgctatgccgctcctcgtagatcccgcacgtagttcgctcccaccgggcgcatgctcgtccctaggcgtgatatacgtcccgtctgcctctatgttcgactccaccgcgccaagtagcccgtgttccttgagtgttcgctcatacctcgcgagccgctcgttcatgtcctcgatgactgagggcttccgacgtctcgggcgcggcggcgccggagcttgataatagcatgataccttgcgtcgcgtgcagcttgtacatatcggagtgatgcgatcgcattttaccttgcgtcgcacacagggttgacagttatagggcatgatacctgggtcctgattctgtgccatgctccccgcgcttacatccgagctcggggccggggctaaggaaaggggtttggatgtgttcattatgagcagttttgtggctatctaacaccttcatttgaagcttgataatctgacggcagatcagtatttgcccctacatgcatccgagcgccgaaagccccctgagatcgataatgtcatgagcttagttgcgggcataagtcggcatcatcctgaatcgcgctaggataagttggtctcatctatgagatgaggggttcgagtcgcaaaaaaagcaatggaaggacgcaggattacatccagaatc

SEQ ID NO: 1090 - DNA, 2397 bp, Muscodor strobelii
  misc_feature: SGI cDNA ID NO. 559953
  misc_feature: Encodes the peptide sequence at SEQ ID NO 1091
atgcaccccttctctatcctaactctcgccatcttcgtagcgggctatatcactgctcgatgggatctggtcgcacgtttatacgaccttgtccttttcgcctgggataaaggtgtcatttcccgtgtcgccattggcttcagcttcctgagccttgccttcttcctgctgttcatacctgtacagcgacttgcacacatcgaggccgatctgccgggagctctctgtcgccgtcttgacatgccagagaacgatggcctgatgcgagttttctggccgattgacatcgtgacctcggacttgccgggcgtcatcgtcggatggaggaattccaccctggacttcgttgtcgtggctgtcttggagcatgtggaccctcggagtgttgagaatgccctgaagaccggcattctgctgcgcaatgcccctcattccgttcctcggatcttcgacttgtgtggccaatctgctctgcatgttcttggactggccaatcccgtgcctgaagcgatctctgagccaacatgggtgcatgcaacaacaaatacctctgaacgttaccctcgagtttactgcccgaaagcctcaaatgttcagaccatactcttcgcccgaccaaacccacttcagatgcaatacatctccttgaacccgattgcactttctctcggtgataagaatgagtcatcgtacaccggctatcaccaacccgacgctgaggcggagaagcaggagctcaagaacaaacggaaagctacgtacttggtggacaaagtgaagcagcattcagttgtgaaacattcggcgaccgcaaaggagaaagctttaaccaaaatcgtcaatcagatcaactgggcatgggagcttgagcatcttttgcaaaagaatgtccctctcataggtccccggcccaaacgtgcgctgagcgtctcggagcgtgtggtggaacacgccacggcggtgagggacaacatcatgctgtggatatgggatatgatcatcatctacgcctttcccataataagacgtgccgtcattctaacactgcttggtcatcgaatagcagccgaagtccttctcttcgtcctcgaatggcgccttcgacctggctcttctgccctcaaggacatttccgctactgcacaacaagtagaaattcggctgcaacaattctgctattggccaatgcagtatgtaaagttacgtctgcgcaagaatgactgggaaagcgtcacaacgagccatccagactatattcgattttataacagtctgtggcttgtcgctaatgatgtgatcattggcatagccgttgggtcgtacatcattgaaaatggtgactgggtagcagctacaatcaacatgctcctcgaggaatatgctattactgccttgcgtagcagtatcgagtggctcatgggttggccggctggcctcaagctcaacagcgaattggctttgttccttggcgatctctttctattcgtcatcaactactggtctagctgcgtccaaacgcttcgaccactgctcccgacaatgatatggttcatcggattctcttcctttggtggtgcgagtatgcccattgccatgttatcagatctgctctcgatgcttaccctccatatctactcgttctaccttgcctcggcccgaatattccattggcagctcacgattctcctctcgttatttcaactatttcgagggaagaagtacaatgtgttacggaatcgagtagattcctgcgactacgatctagatcagctcctcgtcggcaccatcttattcaccttgttattcttcttgctaccgactgtcattgtcttctaccttaattttgccctagcgcgtatggtcatcatatcgctgaaagcgatttttgacacaatgctttcctgcttgaatcatttcccactatttgcactcatgcttcgggccaaggaccccaagcgacttccgggcggcatccattttgaacttcgtgatacccatgatatacgtagtaataattccaaatcttcgctttcatcttcgccaacatcggtcatctatttaaaaccgattccactggaattcactgccatgtttcaccagtattttgagatgggaaatcgcattcgaaaacactatttgtctcttcgcgtccttttctgccttctcactgggcgcttcgttccgcccatccaccggaaaaacctttactccttacagtatagcatgctaccagcccgtagagcgggcatcatggagatgtgggaggcgcttaattcacttcccgccaagaagcctgcgaggttacatccttttcgtgttgccacgaataccatcatgccgaatggacgacgacacatgaacgggcgggcaccccgaggcggggtgaggcatggatga

SEQ ID NO: 1091 - protein, 798 aa, Muscodor strobelii
  misc_feature: SGI Peptide ID NO. 559953
  misc_feature (420)..(608): Pfam Id: PF05024 Pfam Desc: N-acetylglucosaminyl transferase component (Gpi1)
  misc_feature (81)..(764): NCBI GI: 212528166 Blast Desc: N-acetylglucosaminyl transferase component Gpi1 [Penicillium marneffei ATCC 18224] gi|210073638|gb|EEA27725.1| N-acetylglucosaminyl transferase component Gpi1 [Penicillium ATCC
  misc_feature (84)..(759): NCBI GI: 145252304 Blast Desc: An16g03530 [Aspergillus niger] gi|134083213|emb|CAK42851.1| protein product [Aspergillus niger]
  misc_feature (84)..(759): NCBI GI: 119491957 Blast Desc: N-acetylglucosaminyl transferase component Gpi1 [Neosartorya fischeri NRRL 181] gi|119411633|gb|EAW21576.1| N-acetylglucosaminyl transferase component Gpi1 [Neosartorya NRRL
  misc_feature (81)..(780): NCBI GI: 119195129 Blast Desc: CIMG_01939 [Coccidioides immitis RS]
  misc_feature (81)..(781): NCBI GI: 240105021 Blast Desc: N-acetylglucosaminyl transferase component family protein [Coccidioides posadasii C735 delta SOWgp]
  misc_feature (84)..(793): NCBI GI: 261206140 Blast Desc: N-acetylglucosaminyl transferase component Gpi1 [Ajellomyces dermatitidis SLH14081] gi|239592866|gb|EEQ75447.1| N-acetylglucosaminyl transferase component Gpi1 [Ajellomyces
  misc_feature (81)..(759): NCBI GI: 238840959 Blast Desc: N-acetylglucosaminyl transferase component Gpi1 [Microsporum canis CBS 113480]
  misc_feature (81)..(789): NCBI GI: 145610797 Blast Desc: MGG_00894 [Magnaporthe grisea 70-15] gi|145018157|gb|EDK02436.1| MGG_00894 [Magnaporthe grisea 70-15]
  misc_feature (124)..(759): NCBI GI: 159127647 Blast Desc: N-acetylglucosaminyl transferase component Gpi1 [Aspergillus fumigatus A1163]
  misc_feature (124)..(759): NCBI GI: 70999832 Blast Desc: N-acetylglucosaminyl transferase component Gpi1 [Aspergillus fumigatus Af293] gi|66852270|gb|EAL92595.1| N-acetylglucosaminyl transferase component Gpi1 [Aspergillus
  misc_feature (374)..(757): SWISSPROT Homolog: EC 2.4.1.198 Phosphatidylinositol N-acetylglucosaminyltransferase
MHPFSILTLAIFVAGYITARWDLVARLYDLVLFAWDKGVISRVAIGFSFLSLAFFLLFIPVQRLAHIEADLPGALCRRLDMPENDGLMRVFWPIDIVTSDLPGVIVGWRNSTLDFVVVAVLEHVDPRSVENALKTGILLRNAPHSVPRIFDLCGQSALHVLGLANPVPEAISEPTWVHATTNTSERYPRVYCPKASNVQTILFARPNPLQMQYISLNPIALSLGDKNESSYTGYHQPDAEAEKQELKNKRKATYLVDKVKQHSVVKHSATAKEKALTKIVNQINWAWELEHLLQKNVPLIGPRPKRALSVSERVVEHATAVRDNIMLWIWDMIIIYAFPIIRRAVILTLLGHRIAAEVLLFVLEWRLRPGSSALKDISATAQQVEIRLQQFCYWPMQYVKLRLRKNDWESVTTSHPDYIRFYNSLWLVANDVIIGIAVGSYIIENGDWVAATINMLLEEYAITALRSSIEWLMGWPAGLKLNSELALFLGDLFLFVINYWSSCVQTLRPLLPTMIWFIGFSSFGGASMPIAMLSDLLSMLTLHIYSFYLASARIFHWQLTILLSLFQLFRGKKYNVLRNRVDSCDYDLDQLLVGTILFTLLFFLLPTVIVFYLNFALARMVIISLKAIFDTMLSCLNHFPLFALMLRAKDPKRLPGGIHFELRDTHDIRSNNSKSSLSSSPTSVIYLKPIPLEFTAMFHQYFEMGNRIRKHYLSLRVLFCLLTGRFVPPIHRKNLYSLQYSMLPARRAGIMEMWEALNSLPAKKPARLHPFRVATNTIMPNGRRHMNGRAPRGGVRHG

SEQ ID NO: 1092 - DNA, 7244 bp, Muscodor strobelii; identical to SEQ ID NO: 1089
  misc_feature: SGI EST ID NO. CUFF.3450.0
  misc_feature: Variant of the nucleotide sequence at SEQ ID NO 1090

SEQ ID NO: 1093 - DNA, 249 bp, Muscodor strobelii
  misc_feature: SGI cDNA ID NO. 559954
  misc_feature: Encodes the peptide sequence at SEQ ID NO 1094
atgtcggcttcgcttgcgcctgagtgtaacgaagtaaaagaacgatacgatacctgctttcttaagtggtatagcgaaaagtatttacgcggcaacggaaagacggatgacaacgagtgctctaaactctttgaaaactatcagaagtgcctcacggtcgcactcaaagagcgcggcatcgacaaattgctggtcgaggcccgtgaagacagcaaagagaatgattccatacatatgaaacgaaagtaa

SEQ ID NO: 1094 - protein, 82 aa, Muscodor strobelii
  misc_feature: SGI Peptide ID NO. 559954
  misc_feature (1)..(70): Pfam Id: PF05254 Pfam Desc: Uncharacterised protein family (UPF0203)
  misc_feature (1)..(82): NCBI GI: 145610795 Blast Desc: MGG_00895 [Magnaporthe grisea 70-15] gi|145018156|gb|EDK02435.1| MGG_00895 [Magnaporthe grisea 70-15]
  misc_feature (1)..(82): NCBI GI: 164426974 Blast Desc: NCU02255 [Neurospora crassa OR74A] gi|157071552|gb|EAA30663.2| NCU02255 [Neurospora crassa OR74A]
  misc_feature (1)..(82): NCBI GI: 256733014 Blast Desc: NECHADRAFT_60009 [Nectria haematococca mpVI 77-13-4]
  misc_feature (1)..(82): NCBI GI: 261355075 Blast Desc: conserved [Verticillium albo-atrum VaMs.102]
  misc_feature (1)..(81): NCBI GI: 156039493 Blast Desc: [Sclerotinia sclerotiorum 1980] gi|154697620|gb|EDN97358.1| [Sclerotinia sclerotiorum 1980]
  misc_feature (1)..(76): NCBI GI: 154301230 Blast Desc: [Botryotinia fuckeliana B05.10] gi|150856186|gb|EDN31378.1| [Botryotinia fuckeliana B05.10]
  misc_feature (1)..(82): NCBI GI: 40804633 Blast Desc: conserved [Neurospora crassa]
  misc_feature (1)..(80): NCBI GI: 189194649 Blast Desc: PTRG_03330 [Pyrenophora tritici-repentis Pt-1C-BFP] gi|187979227|gb|EDU45853.1| PTRG_03330 [Pyrenophora tritici-repentis Pt-1C-BFP]
  misc_feature (1)..(81): NCBI GI: 242767038 Blast Desc: mitochondrial distribution and morphology protein, [Talaromyces stipitatus ATCC 10500] gi|218724487|gb|EED23904.1| mitochondrial distribution and morphology protein, [Talaromyces
  misc_feature (1)..(82): NCBI GI: 239610959 Blast Desc: BDCG_03066 [Ajellomyces dermatitidis ER-3]
MSASLAPECNEVKERYDTCFLKWYSEKYLRGNGKTDDNECSKLFENYQKCLTVALKERGIDKLLVEAREDSKENDSIHMKRK

SEQ ID NO: 1095 - DNA, 7244 bp, Muscodor strobelii; identical to SEQ ID NO: 1089
  misc_feature: SGI EST ID NO. CUFF.3450.0
  misc_feature: Variant of the nucleotide sequence at SEQ ID NO 1093

SEQ ID NO: 1096 - DNA, 2316 bp, Muscodor strobelii
  misc_feature: SGI cDNA ID NO. 559955
  misc_feature: Reduced expression when VOC is produced
  misc_feature: Encodes the peptide sequence at SEQ ID NO 1097
atggacttcaaagccgtgcaggacagcatccaggcggccctcgttgcgacgacgcgacaagccaaccagatagcctccgaagatctctctttccatcgaaccagcaaccctgccgttgccgaagagcttgacgatgcatcctcccgccttctctctctgaccgcctccctccttcaatccgcgtccaagggttctgatgtctccatccccgatcttgacgatgccgacgacgtcgaggtccactggcaccgcatcgtcgatgtcgtcgacaccctgctcgagaaggccgacacctgtctcgacgagtacaccggcaccatcaagcgaaagacagcccctattgaccaccccggcactgctgccaagaagtctcgctctgctctcgaccactcgatgcgcaacgccaacatcctcaagccccaaaatgccttcgagcgcaagcccgacaatctcgacaccactgcctggaagcccttcctcaccagcaaaccccacgccgttgtccccctccacaagagcctgggtgtcttcaacgacgagacgcagagcacgcagtacaagcatccttacgagacagaaatcctcaccatggactatccggagccactgttcgagtccgccgatcctatccccttcggccccgttgagtcgaccgccgcgacctttgttgacacttacgagggtgtactggagatgctcgaggagctcaagggcgctaccgagatcgccatcgatactgagcatcacgattttcggacctacagcggcctactatctctcatgcaaatcagcacccgcgacaaggactggatagtagatacactgcagccgtggcgtcacaaactcgaagtactcaacgaggtttttgcagatcccaaaattatcaaggtattgcatggtgcatatatggacatcttatggctacagagagattgtggcctctacattgttggtctgttcgacacttacgaagcggcttgcactcttcagtaccctgggcgaggacttgcgtatctgcttaaacgcttcgtgaatttcgacgccgacaaaaagtaccagctcgctgactggcgcatacggcccatacccgaagaaatgctctattatgcacgttctgatactcactacctcctctatatctttgacaggcttcgcaatgaaattcttgcaaggccagacgggcaagatgccatgcgagctgtgctggaccgatccaaggaaacatcgttgcgtcgtcacgaatccatcaactatgatgctatcaatggccaaggcgctgcgggttggtataatttgctggtcaagaacgcttccacgagattgaccaaagaacaatttgcggttttgcgagcagtacaccaatggcgagatgagcttgcccgcaaggaggatgagagcccactttttgtcctgggccaatcgctgttatgggacattgtacgacagctacctccggatcccaaagcgcttcatgctctagtcggcgcatcttatctcgctaggcgcgaggtgtcgtcattgtttgatgtcatcaccaaagcgaaggcacagggcgttaatgggcccagtgttgtcgaagtgcttcgttataactcttccggctctccattggccattggcgacgttgcacaaaaagtcttcccagccatcaagaagccgatccgtcacgctgttgagactaaagaccttgtgtgcgaatcatcccaattgtggggagatatccctatgagcagccggtgggatcctagttccacagaacacaaccccaacccgatgcgttttgagctgcctttggccaaatttgttcagtctgccagagttgttgatgacaaaggggcggatgtcatggaggtatcgagtctaaatgagaagcctgccgctgagacaatgaacgaagagatgattcctgaggacaaggaattcacgctcagggctggaaagaaacgcaaggctcccgagccggcatcgccatcggaatcagaagccgagtcggagtcagagtcagcggcggaaacagaggcacaggaaccgagcgagccatccgctgcggtctcaaacgatgaagaaatgaatctggagaacacagacgacagtgacgcacagaaggaagctaagcaggccaaaaaggcattgaagaaggcgcgcagacttgcaaagaaagatgaacgccgagagcgcaagaagcagaagaaagccgcgaagctcgccaagaaggctcaggcaggccaggctgaagccgagaaagaggaagatgaagagccattcgactacaaaaaggcaaaagtcggttctgaaacccgacaagggtgcggttaa

SEQ ID NO: 1097 - protein, 771 aa, Muscodor strobelii
  misc_feature: SGI Peptide ID NO. 559955
  misc_feature (220)..(389): Pfam Id: PF01612 Pfam Desc: 3'-5' exonuclease
  misc_feature (445)..(513): Pfam Id: PF00570 Pfam Desc: HRDC domain
  misc_feature (14)..(106): Pfam Id: PF08066 Pfam Desc: PMC2NT (NUC016) domain
  misc_feature (1)..(650): NCBI GI: 85094529 Blast Desc: NCU02256 [Neurospora crassa OR74A] gi|28921357|gb|EAA30664.1| NCU02256 [Neurospora crassa OR74A] gi|40804632|emb|CAF05892.1| related to nucleolar 100K protein
  misc_feature (2)..(739): NCBI GI: 154301232 Blast Desc: BC1G_10286 [Botryotinia fuckeliana B05.10] gi|150856187|gb|EDN31379.1| BC1G_10286 [Botryotinia fuckeliana B05.10]
  misc_feature (2)..(760): NCBI GI: 156039491 Blast Desc: SS1G_11882 [Sclerotinia sclerotiorum 1980] gi|154697619|gb|EDN97357.1| SS1G_11882 [Sclerotinia sclerotiorum 1980]
  misc_feature (2)..(760): NCBI GI: 116203503 Blast Desc: CHGG_09635 [Chaetomium globosum CBS 148.51] gi|88175763|gb|EAQ83231.1| CHGG_09635 [Chaetomium globosum CBS 148.51]
  misc_feature (2)..(760): NCBI GI: 256733008 Blast Desc: NECHADRAFT_92603 [Nectria haematococca mpVI 77-13-4]
  misc_feature (2)..(650): NCBI GI: 46123343 Blast Desc: FG06049.1 [Gibberella zeae PH-1]
  misc_feature (1)..(647): NCBI GI: 39973915 Blast Desc: MGG_00896 [Magnaporthe grisea 70-15] gi|145018155|gb|EDK02434.1| MGG_00896 [Magnaporthe grisea 70-15]
  misc_feature (31)..(650): NCBI GI: 261355076 Blast Desc: 3'-5' exonuclease domain-containing protein [Verticillium albo-atrum VaMs.102]
  misc_feature (3)..(659): NCBI GI: 169617554 Blast Desc: SNOG_11959 [Phaeosphaeria nodorum SN15] gi|111059251|gb|EAT80371.1| SNOG_11959 [Phaeosphaeria nodorum SN15]
  misc_feature (2)..(657): NCBI GI: 169767462 Blast Desc: [Aspergillus oryzae RIB40] gi|83766057|dbj|BAE56200.1| protein product [Aspergillus oryzae]
  misc_feature: Useful for introducing or modulating the production of volatile compounds
MDFKAVQDSIQAALVATTRQANQIASEDLSFHRTSNPAVAEELDDASSRLLSLTASLLQSASKGSDVSIPDLDDADDVEVHWHRIVDVVDTLLEKADTCLDEYTGTIKRKTAPIDHPGTAAKKSRSALDHSMRNANILKPQNAFERKPDNLDTTAWKPFLTSKPHAVVPLHKSLGVFNDETQSTQYKHPYETEILTMDYPEPLFESADPIPFGPVESTAATFVDTYEGVLEMLEELKGATEIAIDTEHHDFRTYSGLLSLMQISTRDKDWIVDTLQPWRHKLEVLNEVFADPKIIKVLHGAYMDILWLQRDCGLYIVGLFDTYEAACTLQYPGRGLAYLLKRFVNFDADKKYQLADWRIRPIPEEMLYYARSDTHYLLYIFDRLRNEILARPDGQDAMRAVLDRSKETSLRRHESINYDAINGQGAAGWYNLLVKNASTRLTKEQFAVLRAVHQWRDELARKEDESPLFVLGQSLLWDIVRQLPPDPKALHALVGASYLARREVSSLFDVITKAKAQGVNGPSVVEVLRYNSSGSPLAIGDVAQKVFPAIKKPIRHAVETKDLVCESSQLWGDIPMSSRWDPSSTEHNPNPMRFELPLAKFVQSARVVDDKGADVMEVSSLNEKPAAETMNEEMIPEDKEFTLRAGKKRKAPEPASPSESEAESESESAAETEAQEPSEPSAAVSNDEEMNLENTDDSDAQKEAKQAKKALKKARRLAKKDERRERKKQKKAAKLAKKAQAGQAEAEKEEDEEPFDYKKAKVGSETRQGCG

SEQ ID NO: 1098 - DNA, 2968 bp, Muscodor strobelii
  misc_feature: SGI EST ID NO. CUFF.3298.1
  misc_feature: Variant of the nucleotide sequence at SEQ ID NO 1096
gcaggtgcctctttctacctcttgattggcaacgacagcctcccaatccccatgatttctcccaacttctgcccataaaactccaatcctgggctcaccgtctcagccaaacctctcctacctggctgcaatctggtgctgcaccgcgctgttgaagatggacttcaaagccgtgcaggacagcatccaggcggccctcgttgcgacgacgcgacaagccaaccagatagcctccgaagatctctctttccatcgaaccagcaaccctgccgttgccgaagagcttgacgatgcatcctcccgccttctctctctgaccgcctccctccttcaatccgcgtccaagggttctgatgtctccatccccgatcttgacgatgccgacgacgtcgaggtccactggcaccgcatcgtcgatgtcgtcgacaccctgctcgagaaggccgacacctgtctcgacgagtacaccggcaccatcaagcgaaagacagcccctattgaccaccccggcactgctgccaagaagtctcgctctgctctcgaccactcgatgcgcaacgccaacatcctcaagccccaaaatgccttcgagcgcaagcccgacaatctcgacaccactgcctggaagcccttcctcaccagcaaaccccacgccgttgtccccctccacaagagcctgggtgtcttcaacgacgagacgcagagcacgcagtacaagcatccttacgagacagaaatcctcaccatggactatccggagccactgttcgagtccgccgatcctatccccttcggccccgttgagtcgaccgccgcgacctttgttgacacttacgagggtgtactggagatgctcgaggagctcaagggcgctaccgagatcgccatcgatactgagcatcacgattttcggacctacagcggcctactatctctcatgcaaatcagcacccgcgacaaggactggatagtagatacactgcagccgtggcgtcacaaactcgaagtactcaacgaggtttttgcagatcccaaaattatcaaggtattgcatggtgcatatatggacatcttatggctacagagagattgtggcctctacattgttggtctgttcgacacttacgaagcggcttgcactcttcagtaccctgggcgaggacttgcgtatctgcttaaacgcttcgtgaatttcgacgccgacaaaaagtaccagctcgctgactggcgcatacggcccatacccgaagaaatgctctattatgcacgttctgatactcactacctcctctatatctttgacaggcttcgcaatgaaattcttgcaaggccagacgggcaagatgccatgcgagctgtgctggaccgatccaaggaaacatcgttgcgtcgtcacgaatccatcaactatgatgctatcaatggccaaggcgctgcgggttggtataatttgctggtcaagaacgcttccacgagattgaccaaagaacaatttgcggttttgcgagcagtacaccaatggcgagatgagcttgcccgcaaggaggatgagagcccactttttgtcctgggccaatcgctgttatgggacattgtacgacagctacctccggatcccaaagcgcttcatgctctagtcggcgcatcttatctcgctaggcgcgaggtgtcgtcattgtttgatgtcatcaccaaagcgaaggcacagggcgttaatgggcccagtgttgtcgaagtgcttcgttataactcttccggctctccattggccattggcgacgttgcacaaaaagtcttcccagccatcaagaagccgatccgtcacgctgttgagactaaagaccttgtgtgcgaatcatcccaattgtggggagatatccctatgagcagccggtgggatcctagttccacagaacacaaccccaacccgatgcgttttgagctgcctttggccaaatttgttcagtctgccagagttgttgatgacaaaggggcggatgtcatggaggtatcgagtctaaatgagaagcctgccgctgagacaatgaacgaagagatgattcctgaggacaaggaattcacgctcagggctggaaagaaacgcaaggctcccgagccggcatcgccatcggaatcagaagccgagtcggagtcagagtcagcggcggaaacagaggcacaggaaccgagcgagccatccgctgcggtctcaaacgatgaagaaatgaatctggagaacacagacgacagtgacgcacagaaggaagctaagcaggccaaaaaggcattgaagaaggcgcgcagacttgcaaagaaagatgaacgccgagagcgcaagaagcagaagaaagccgcgaagctcgccaagaaggctcaggcaggccaggctgaagccgagaaagaggaagatgaagagccattcgactacaaaaaggcaaaagtcggttctgaaacccgacaagggtgcggttaatggtaccggtggaaagcctcagaagacgaaattcaatccgtatgccttgacgggtgagggccctaagccagctcgcagaatgcatggcgagaaggctgggaagagtcagactttcaagagatgagtcgtcttctgactgacttggttttctatctttgcctgtatcgttcaatctgtttcctgggctgcctgtgatgtgcattgttggcgtttggcattttgattgttgggatggcatggaaaagagtgggagatacccctgagaacgttgccggactactaaaccctttacaaagtgtagacgacgggatgctatagcaatgaaactgttcacaatgaattagacagtctgtataatcatgactgcaagccgtaagttagggattgtgagaccatatgatccagaataccagactccttctgtcccagtctgaagtagaaatgcccttgctgactaagcaatttaacgatgttgagcctttctttcatctcaga

SEQ ID NO: 1099 - DNA, 2094 bp, Muscodor strobelii
  misc_feature: SGI cDNA ID NO. 559956
  misc_feature: Encodes the peptide sequence at SEQ ID NO 1100
atgcctttcttgcgcaaagatgctcctgcttgggtaccagacgaggagaccatcgagtctcttctcagcgatccttaccacttgtctctcggtatctggaaagaggttaaaccattacaagagctgacccatatcgaaaaggaacagcaaaatctgatcgagcttcgacgtcgcaagaccgtcatcccaggagatccgtggggtcattatccggtctgggccggcaacgttggacacccagagcatccgcgattggttgagattttggacccattgtttcaatcacttgagaacactccgatccgagacgacgacaccgctgtgcagctactacagacactcctagagcgagtcccaaacgaagatgtcgtcgatctagcgaaagagtttgccactcatggtcatttcggcatccatcaggatgactcctcacaaatcgtcgttgtattccatatcggatatctaagcatccgatttatgcaagcaagggacctagacatcaccgaccctaagtcttacaaccgaagcgagcgggcacaggcttctctgaagaaagtcctcgagctcacaccagagccgccaatgacaatcaagacgcagatgtacctcatagcagaacatcttgtcaagtctggggattatacaaagtatccaaggctttttgccgaggaaaatgtgggagaactgagagaaaatgacatccattcattcgcaaaattccgagcactagcacaagaaagatattggcttctttcaaccagagaagagcgtgaggcaattgatgaggtcgcaaacgacttatcaatttcccacgagccgcagctgcaggccatcttagagaccgttcgagctaaatggccgcggaaatggaacaatggacggcgggatcccgacttcttctacaattatctccgagaccaacgcgcagctgcagacgcatggccgctcatcacagaggacgtcttcttagtgaccgacgtgcgacgccgtatcgtttttgcaagtattgagaatctgggcggtcttttgctgggtgagaatgggatgcaaaagctctttcgatctgctgacatgtgggctttttttgcaccgttgcatatacccgaaagcagtcgtcacgtcgtcgataaccatattcgccggaaacatcccgaactcgacccatcaaaggcaaccgtttcttcccttccaaatgcgcgcatggccgttgcacattacgggtgctggagtcaaagaggtgacccgcacgggaaaaaggtgatgatgacttcggaacatcctaattttgaaggttcgcgttcagacggtctgaggggaatgtttggctcttttgcaacctctgtcttgggctcagcgacaaagttactccgatggatggtcaggcctctagaccccggtttctataaagaaggtcaagagatatgggaaaatctgcctgtcagagaacgtactacgacaactgaagagaaggatggagaatctgattttctgaatttgtttgcgtttggggtcaacggctatacacagcgccatacagatacgcaagatatttctggaggtctggccggcttgttctcctttggaacctataagggagggaatctctgtctcccacagctaggctgtaaagtgaagtacagccctggctcatgcgcaatattgcgaggcacgtcattagaccacctcgtagaagactatgaagggacgcgattcttcatcattggcacgtcacatgaaagctgtaaaaggcatgtctggcgcaaacttggcaggcttcctcaattaccgccgacactgccaaaaagcaagaaacggaaggtaggtgataccaacgaagggatagcgctgaatgagtctaccagcccggccgcagctggagacatcagcgataatcaagagagccacgaatatgacaatggcgattacaacccctttttaccgatggaaaccccctgtcggatcttggatgaagactacgattacgacgaggaagttgaatggaccaacgagctgctacatggcccagctgtcctaccaattgaggctctagtagatctttctggtgatggggagaataacgaaggggacgattga

SEQ ID NO: 1100 - protein, 697 aa, Muscodor strobelii
  misc_feature: SGI Peptide ID NO. 559956
MPFLRKDAPAWVPDEETIESLLSDPYHLSLGIWKEVKPLQELTHIEKEQQNLIELRRRKTVIPGDPWGHYPVWAGNVGHPEHPRLVEILDPLFQSLENTPIRDDDTAVQLLQTLLERVPNEDVVDLAKEFATHGHFGIHQDDSSQIVVVFHIGYLSIRFMQARDLDITDPKSYNRSERAQASLKKVLELTPEPPMTIKTQMYLIAEHLVKSGDYTKYPRLFAEENVGELRENDIHSFAKFRALAQERYWLLSTREEREAIDEVANDLSISHEPQLQAILETVRAKWPRKWNNGRRDPDFFYNYLRDQRAAADAWPLITEDVFLVTDVRRRIVFASIENLGGLLLGENGMQKLFRSADMWAFFAPLHIPESSRHVVDNHIRRKHPELDPSKATVSSLPNARMAVAHYGCWSQRGDPHGKKVMMTSEHPNFEGSRSDGLRGMFGSFATSVLGSATKLLRWMVRPLDPGFYKEGQEIWENLPVRERTTTTEEKDGESDFLNLFAFGVNGYTQRHTDTQDISGGLAGLFSFGTYKGGNLCLPQLGCKVKYSPGSCAILRGTSLDHLVEDYEGTRFFIIGTSHESCKRHVWRKLGRLPQLPPTLPKSKKRKVGDTNEGIALNESTSPAAAGDISDNQESHEYDNGDYNPFLPMETPCRILDEDYDYDEEVEWTNELLHGPAVLPIEALVDLSGDGENNEGDD

SEQ ID NO: 1101 - DNA, 876 bp, Muscodor strobelii
  misc_feature: SGI cDNA ID NO. 559957
  misc_feature: Encodes the peptide sequence at SEQ ID NO 1102
atgattaagagccgtctctcggagggggaaaatgcaaagcacaagctatttttcatgactgacactctacgcgtactggaagatgatgaactctttatagaagaaatccggtctgaggcaacatttcttctttctgccggttcgtacttcactcaagtccattttttgcacaatgcaaactcttacgtgacatatttcctgggacttataggtagcgatactatgtcaacctgtcttagcgcattgttcttttatctatcaagaagcccaacctgctacaaacagctgacgacagaaatccgctgcaccttcgtcagcagcgatgagatcagaggcggaccacgtctgtcagactgcatctacctgcgagcctgcattgacgaggctcttcggatgtcgccccccattgcgggaacactatggagagaacagatcacgggggctgatgatactaccccgctgatcatcgatggtcacgtcattccgaggggaacacatattggggtcaacatctatgcccttcatcataatgaaacatactttccagagcctttcacgttcaagcctgagagattcctgtgttggaattcgcaaggcgatgagcaagtcagacaagcatttagccctttttcattaggttctcgcggttgcatgggtagatcgatggcgtacttggaactgagcctgattgtcgctaaagtcctgtggcactttgatattgcacaggcaccaggggaaactggacgaacgggagagtctacgtactggagatcccggggcaaggctggcagagttaacgagtaccaaactggtgacatttttggcgcaactcatgaagggccatgtctgttactcaagccctgccgcagcctttga

SEQ ID NO: 1102 - protein, 291 aa, Muscodor strobelii
  misc_feature: SGI Peptide ID NO. 559957
  misc_feature (71)..(239): Pfam Id: PF00067 Pfam Desc: Cytochrome P450
  misc_feature (1)..(287): NCBI GI: 156056276 Blast Desc: SS1G_05490 [Sclerotinia sclerotiorum 1980] gi|154703274|gb|EDO03013.1| SS1G_05490 [Sclerotinia sclerotiorum 1980]
  misc_feature (67)..(287): NCBI GI: 145256217 Blast Desc: An10g00660 [Aspergillus niger CBS 513.88] gi|134078632|emb|CAK40505.1| protein product [Aspergillus niger]
  misc_feature (67)..(287): NCBI GI: 238845959 Blast Desc: benzoate 4-monooxygenase cytochrome P450 [Microsporum canis CBS 113480]
  misc_feature (67)..(287): NCBI GI: 121710976 Blast Desc: benzoate 4-monooxygenase cytochrome P450 [Aspergillus clavatus NRRL 1] gi|119401254|gb|EAW11678.1| benzoate 4-monooxygenase cytochrome P450 [Aspergillus clavatus NRRL 1]
  misc_feature (41)..(286): NCBI GI: 145241738 Blast Desc: An09g02000 [Aspergillus niger] gi|134078055|emb|CAK40138.1| protein product [Aspergillus niger]
  misc_feature (1)..(285): NCBI GI: 156060449 Blast Desc: SS1G_02363 [Sclerotinia sclerotiorum 1980] gi|154699771|gb|EDN99509.1| SS1G_02363 [Sclerotinia sclerotiorum 1980]
  misc_feature (22)..(286): NCBI GI: 46102666 Blast Desc: FG00037.1 [Gibberella zeae PH-1]
  misc_feature (66)..(286): NCBI GI: 189196570 Blast Desc: cytochrome P450 4A5 precursor [Pyrenophora tritici-repentis Pt-1C-BFP] gi|187980502|gb|EDU47128.1| cytochrome P450 4A5 precursor [Pyrenophora tritici-repentis
  misc_feature (66)..(283): NCBI GI: 169603764 Blast Desc: SNOG_04890 [Phaeosphaeria nodorum SN15] gi|111066161|gb|EAT87281.1| SNOG_04890 [Phaeosphaeria nodorum SN15]
  misc_feature (41)..(286): NCBI GI: 255954725 Blast Desc: Pc21g10830 [Penicillium chrysogenum Wisconsin 54-1255] gi|211589826|emb|CAP95980.1| Pc21g10830 [Penicillium chrysogenum Wisconsin 54-1255]
  misc_feature (44)..(245): SWISSPROT Homolog: EC 1.14.13.13 Calcidiol 1-monooxygenase
MIKSRLSEGENAKHKLFFMTDTLRVLEDDELFIEEIRSEATFLLSAGSYFTQVHFLHNANSYVTYFLGLIGSDTMSTCLSALFFYLSRSPTCYKQLTTEIRCTFVSSDEIRGGPRLSDCIYLRACIDEALRMSPPIAGTLWREQITGADDTTPLIIDGHVIPRGTHIGVNIYALHHNETYFPEPFTFKPERFLCWNSQGDEQVRQAFSPFSLGSRGCMGRSMAYLELSLIVAKVLWHFDIAQAPGETGRTGESTYWRSRGKAGRVNEYQTGDIFGATHEGPCLLLKPCRSL

SEQ ID NO: 1103 - DNA, 475 bp, Muscodor strobelii
  misc_feature: SGI EST ID NO. CUFF.3002.0
  misc_feature: Variant of the nucleotide sequence at SEQ ID NO 1101
tgcgagcctgcattgacgaggctcttcggatgtcgccccccattgcgggaacactatggagagaacagatcacgggggctgatgatactaccccgctgatcatcgatggtcacgtcattccgaggggaacacatattggggtcaacatctatgcccttcatcataatgaaacatactttccagagcctttcacgttcaagcctgagagattcctgtgttggaattcgcaaggcgatgagcaagtcagacaagcatttagccctttttcattaggttctcgcggttgcatgggtagatcgatggcgtacttggaactgagcctgattgtcgctaaagtcctgtggcactttgatattgcacaggcaccaggggaaactggacgaacgggagagtctacgtactggagatcccggggcaaggctggcagagttaacgagtaccaaactggtgacatttttggcgcaactcatgaagg

SEQ ID NO: 1104 - DNA, 1806 bp, Muscodor strobelii
  misc_feature: SGI cDNA ID NO. 559958
  misc_feature: Encodes the peptide sequence at SEQ ID NO 1105
atggcttcaagcacggcttctgaactgaacgacttcgcccaccatgagacaagtcttgggaaatcggggacaaacggacatggagacgtcaatatcaaaaccgcatcaaatcagtcgctaagtgaatcagatataaattacattcgaggcactaggttttggattatcagcattgccatcgccatcatcatgttcctagtcaattttgaggttccagtcattattacggccttggtatctatcacaaacgatcttgaagggtttgaaaatgtagcatgggtcatcgcaagttatctgctgggttacgttggaatcattgttatcgtcgccaagttctctgatatttttggtcgcaagctggtcttcactttgtcgattggcatattcattgttttctctgctgcttgcagtgctgctcaaacaatgaatcagctcatagttttccgagcgttccagggcattggcggcggcgggtcttggtccttagctacaatcttcgttacagaacttgtcccaccagagaaatacccaaagttcgtcgcaaacatctccatcaccaatgcgcttgccttgcttctagggccaattatcggtggagccatagcatccggcacgacgtggaggtggatattcatcatcaatattcccatcgctgtaccggcgcttttgattctcctttatgcggtgccgaacggtttccctcaccatgaccaaccgaactacaagcgaaagacattctcagatctcatctcaaaaccatccctcgatcgaatcgatacaccaggcacagtcctgatccttttcgccacgctttctttaacggcggcgttcgaagaagctgacaaaagatttccgtggaggtctgcttatgttattacacttttgactatatccggatttctctggataatgctggtgatttgggaacgatacgttacgctctctcgaactatccgagagccagttttgccgtggggatttcttatgaatcgcgaaatgatgggaatcttgctgaattttgttcttctcggtgggccaaccgtaatatgcatgtttatccttccgcaaagatttcaacttgtatacggaacctctggcctggatgcgggtgttagattgattccattctctgcggttatcccgatcggttcaattttcgcttcaattcttggaggcaaacacaaggtgccgccggtgtatcttctcggtacgtgtaaatgtaagtcatatagctcccaggtgctagaagcccgttgtttatcccaaactgcgcgttctatcagggcagaacggcggaaaactaggctaatatttgacatatctgtctataagatctttggctcaatactgcaagttcttgggttcgccttaatagggacattgccgtcgactttagacataccctcacgtatctatgggtaccagattcttgcgggctggggctgcgggatcaacttctcgcttcttttcatattgatcccactggtcaacaggaaagaggatactgctgtcggccttggggcaggttcacaatttcgatttatcggcggctcaatcgtcctctctatctccacctctattttcaacagctacgttcgaccacgactacaatcggaattaggaatatcaaatccagacgtgctcctacagattctaccaacgcttgccccgtctgttcaggatgcagtccgacacgtccttgccacaggatacagtcgccaaatcctcgtgttggcagtttcggcaggattacagataccagcgacccttctcatgtggaagagaccacaactgaaactaccgtag

SEQ ID NO: 1105 - protein, 601 aa, Muscodor strobelii
  misc_feature: SGI Peptide ID NO. 559958
  misc_feature (60)..(521): Pfam Id: PF07690 Pfam Desc: Major Facilitator Superfamily
  misc_feature (60)..(277): Pfam Id: PF07690 Pfam Desc: Major Facilitator Superfamily
  misc_feature (64)..(600): NCBI GI: 212533541 Blast Desc: multidrug resistance protein fnx1, [Penicillium marneffei ATCC 18224] gi|210072291|gb|EEA26380.1| multidrug resistance protein fnx1, [Penicillium marneffei ATCC 18224]
  misc_feature (3)..(595): NCBI GI: 242773497 Blast Desc: efflux pump antibiotic resistance protein, [Talaromyces stipitatus ATCC 10500] gi|218721871|gb|EED21289.1| efflux pump antibiotic resistance protein, [Talaromyces ATCC
  misc_feature (1)..(597): NCBI GI: 225556984 Blast Desc: drug resistance transporter EmrB/QacA subfamily [Ajellomyces capsulatus G186AR]
  misc_feature (29)..(599): NCBI GI: 67526853 Blast Desc: AN3884.2 [Aspergillus nidulans FGSC A4] gi|40739959|gb|EAA59149.1| AN3884.2 [Aspergillus nidulans FGSC A4] gi|259481548|tpe|CBF75171.1| TPA: MFS multidrug transporter,
  misc_feature (27)..(600): NCBI GI: 156060439 Blast Desc: SS1G_02358 [Sclerotinia sclerotiorum 1980] gi|154699766|gb|EDN99504.1| SS1G_02358 [Sclerotinia sclerotiorum 1980]
  misc_feature (70)..(599): NCBI GI: 169769094 Blast Desc: [Aspergillus oryzae RIB40] gi|83766875|dbj|BAE57015.1| protein product [Aspergillus oryzae]
  misc_feature (21)..(594): NCBI GI: 255932603 Blast Desc: Pc12g10360 [Penicillium chrysogenum Wisconsin 54-1255] gi|211582477|emb|CAP80663.1| Pc12g10360 [Penicillium chrysogenum Wisconsin 54-1255]
  misc_feature (44)..(382): NCBI GI: 154294994 Blast Desc: BC1G_13363 [Botryotinia fuckeliana B05.10] gi|150844492|gb|EDN19685.1| BC1G_13363 [Botryotinia fuckeliana B05.10]
  misc_feature (31)..(595): NCBI GI: 169772129 Blast Desc: [Aspergillus oryzae RIB40] gi|83768393|dbj|BAE58532.1| protein product [Aspergillus oryzae]
  misc_feature (36)..(595): NCBI GI: 256728111 Blast Desc: NECHADRAFT_53897 [Nectria haematococca mpVI 77-13-4]
MASSTASELNDFAHHETSLGKSGTNGHGDVNIKTASNQSLSESDINYIRGTRFWIISIAIAIIMFLVNFEVPVIITALVSITNDLEGFENVAWVIASYLLGYVGIIVIVAKFSDIFGRKLVFTLSIGIFIVFSAACSAAQTMNQLIVFRAFQGIGGGGSWSLATIFVTELVPPEKYPKFVANISITNALALLLGPIIGGAIASGTTWRWIFIINIPIAVPALLILLYAVPNGFPHHDQPNYKRKTFSDLISKPSLDRIDTPGTVLILFATLSLTAAFEEADKRFPWRSAYVITLLTISGFLWIMLVIWERYVTLSRTIREPVLPWGFLMNREMMGILLNFVLLGGPTVICMFILPQRFQLVYGTSGLDAGVRLIPFSAVIPIGSIFASILGGKHKVPPVYLLGTCKCKSYSSQVLEARCLSQTARSIRAERRKTRLIFDISVYKIFGSILQVLGFALIGTLPSTLDIPSRIYGYQILAGWGCGINFSLLFILIPLVNRKEDTAVGLGAGSQFRFIGGSIVLSISTSIFNSYVRPRLQSELGISNPDVLLQILPTLAPSVQDAVRHVLATGYSRQILVLAVSAGLQIPATLLMWKRPQLKLP

SEQ ID NO: 1106 - DNA, 768 bp, Muscodor strobelii
  misc_feature: SGI EST ID NO. CUFF.3006.0
  misc_feature: Variant of the nucleotide sequence at SEQ ID NO 1104
ctttggctcaatactgcaagttcttgggttcgccttaatagggacattgccgtcgactttagacataccctcacgtatctatgggtaccagattcttgcgggctggggctgcgggatcaacttctcgcttcttttcatattgatcccactggtcaacaggaaagaggatactgctgtcggccttggggcaggttcacaatttcgatttatcggcggctcaatcgtcctctctatctccacctctattttcaacagctacgttcgaccacgactacaatcggaattaggaatatcaaatccagacgtgctcctacagattctaccaacgcttgccccgtctgttcaggatgcagtccgacacgtccttgccacaggatacagtcgccaaatcctcgtgttggcagtttcggcaggattacagataccagcgacccttctcatgtggaagagaccacaactgaaactaccgtagtgggtataaagtcgcaccggccggcagaaggactcaaaattggctggtgctcaaaaaaaccactatatgtggcagtgctcgactaacagcctttatcttctgcaactttgtaacatgatgtgcagttcgttggaagacggcccgtaaaacggaattaccataattttgagtcatcgcaacagctggcgccgttttcagcgcaagttaatgtgagacatgacgtgtttttaaactggtcattttgcagccaaaccatttcgatatatcactttgaaactagataagaatgttttgac

SEQ ID NO: 1107 - DNA, 1119 bp, Muscodor strobelii
  misc_feature: SGI cDNA ID NO. 559959
  misc_feature: Encodes the peptide sequence at SEQ ID NO 1108
atgcatttcaggtcccttactctattggcttgtgccttcgccaagaataccttggccgtgggagtgactggtgctgcagagggtttcgccaaaggagttactggtggtggtacgaccaatgcagagctggtttcatacctaggtgatagctctgcgcgtgtcatcatcttgactaaaaccttcgacttcaccggctcggaaggtaccgtgtcgggcacaggatgcgcgccatggggtactggatccgcatgccaagtcgcgattgatcaaaactcctggtgcgagaactatgaacccaatgctgccaaggtttcggtctcatatgacaaggcaggcgtgcttgggatcactgtcaagagtaataaatcgctcgtcggccagggcacgagcggtgttattatcggcaagggattgagaatcgtgtccggagcttcgaatatcatcatccagaatatcaagattacgaatctcaacccgaagtacgtctggggcggtgatgcgatcaccctagatgggacggatctggtctggattgatcatgttacgacttcgcttattggtcgtcaacatatcgtgctggggacgagcgcatccaatcgagtgaccatctcaaacaacttcattgacggtcgaacaagttggtctgcgacatgcgatggctaccactattggaacctgtacttcactggctctagcgatcttgtgacgttcaaaggaaactatattcttcatacatcaggtcgcgcacccaaggtcggtggcaacactctattacatgctgtcaacaactactggtatcagagcagtggtcacgattttgaggttgactccggtgcgatgattgttgctgaaggcaatgttttccaaaacgccggaaacatggtcgacagtactgtgagtggcaagatattcactagcccggattccgcgtcaaatgcggcttgttcagcatatctgggccacacttgtcaactaaatgcctatggaagcacaactagctactcgggcaaagatacaagtttcttttcgaatttcaatgggaagaacgttgcttcagcgggtactgctgcatctgcacaatcaagtgtcccatccactgctggatatggcactatctag

SEQ ID NO: 1108 - protein, 372 aa, Muscodor strobelii
  misc_feature: SGI Peptide ID NO. 559959
  misc_feature (100)..(288): Pfam Id: PF00544 Pfam Desc: Pectate lyase
  misc_feature (116)..(184): Pfam Id: PF00544 Pfam Desc: Pectate lyase
  misc_feature (21)..(372): NCBI GI: 67524223 Blast Desc: AN2569.2 [Aspergillus nidulans FGSC A4] gi|40745518|gb|EAA64674.1| AN2569.2 [Aspergillus nidulans FGSC A4] gi|95025733|gb|ABF50856.1| pectin lyase [Emericella nidulans]
  misc_feature (1)..(372): NCBI GI: 70988721 Blast Desc: pectate lyase [Aspergillus fumigatus Af293] gi|66846848|gb|EAL87179.1| pectate lyase, [Aspergillus fumigatus Af293] gi|159128631|gb|EDP53745.1| pectate lyase, [Aspergillus
  misc_feature (1)..(372): NCBI GI: 119497763 Blast Desc: pectate lyase, [Neosartorya fischeri NRRL 181] gi|119413803|gb|EAW23742.1| pectate lyase, [Neosartorya fischeri NRRL 181]
  misc_feature (1)..(372): NCBI GI: 121711062 Blast Desc: pectate lyase, [Aspergillus clavatus NRRL 1] gi|119401297|gb|EAW11721.1| pectate lyase, [Aspergillus clavatus NRRL 1]
  misc_feature (8)..(372): NCBI GI: 212546505 Blast Desc: pectate lyase, [Penicillium marneffei ATCC 18224] gi|210064926|gb|EEA19021.1| pectate lyase, [Penicillium marneffei ATCC 18224]
  misc_feature (20)..(372): NCBI GI: 119479243 Blast Desc: pectin lyase, [Neosartorya fischeri NRRL 181] gi|119407804|gb|EAW17753.1| pectin lyase, [Neosartorya fischeri NRRL 181]
  misc_feature (19)..(372): NCBI GI: 5453414 Blast Desc: AF156984_1 pectin lyase 2 [Colletotrichum gloeosporioides f. sp. malvae]
  misc_feature (6)..(372): NCBI GI: 110962353 Blast Desc: pectin lyase 1 [Penicillium occitanis]
  misc_feature (27)..(372): NCBI GI: 70997737 Blast Desc: pectin lyase [Aspergillus fumigatus Af293] gi|66851240|gb|EAL91566.1| pectin lyase, [Aspergillus fumigatus Af293] gi|159126662|gb|EDP51778.1| pectin lyase, [Aspergillus
  misc_feature (22)..(372): NCBI GI: 75858962 Blast Desc: AN9439.2 [Aspergillus nidulans FGSC A4] gi|40747657|gb|EAA66813.1| AN9439.2 [Aspergillus nidulans FGSC A4] gi|259480569|tpe|CBF71823.1| TPA: pectin lyase (Eurofung) A4]
  misc_feature (21)..(372): SWISSPROT Homolog: EC 4.2.2.10 Pectin lyase
MHFRSLTLLACAFAKNTLAVGVTGAAEGFAKGVTGGGTTNAELVSYLGDSSARVIILTKTFDFTGSEGTVSGTGCAPWGTGSACQVAIDQNSWCENYEPNAAKVSVSYDKAGVLGITVKSNKSLVGQGTSGVIIGKGLRIVSGASNIIIQNIKITNLNPKYVWGGDAITLDGTDLVWIDHVTTSLIGRQHIVLGTSASNRVTISNNFIDGRTSWSATCDGYHYWNLYFTGSSDLVTFKGNYILHTSGRAPKVGGNTLLHAVNNYWYQSSGHDFEVDSGAMIVAEGNVFQNAGNMVDSTVSGKIFTSPDSASNAACSAYLGHTCQLNAYGSTTSYSGKDTSFFSNFNGKNVASAGTAASAQSSVPSTAGYGTI

SEQ ID NO: 1109 - DNA, 1764 bp, Muscodor strobelii
  misc_feature: SGI cDNA ID NO. 559960
  misc_feature: Encodes the peptide sequence at SEQ ID NO 1110
atgatgagctacaccctcagctgtgttgccttggtggttatattggcaatactgtttgtcaaacctaggctgtacccagctccatatccgggcattccctacaataagccttcggcgacccgcctgatgggcgacgtccctgatctcttaccgatcgcacaagacacgaaggagttttctatctcggttcttactttgaccacgcggaaactaggcacaccgattgcacagtttctatttcctgcgcttcgacgtccgttgattgttttagaggacccgtatgaaatcgaggacatcatagttcgtcgcggccgggaatttgacaaggcgccgtctgccgtggtcatgtttggctccgcgtttccgaaaggcacactcagtcaattcgcaacgccagaactaaaagcgcagaaacggctatgggctgaagcactgagccatgaattcttgcgaaagactgccgctgcgaatatttacgcctcagctctggagttgatagaactttggcggctgaaagcgaccagcctatacaaagacaaatcgtttgaggctcacggggatttgcagaatactggtctagacgccatttgggtcactgtggcaaacgaacaagcaggactgaaccgacatgaaatcaataaactgcaaagacaaatcaaagggcgcgatatcggatccttagagcaacagacggccccgggaattgtactaaaagcagaaatagactacatggtaggaataagagaatcccactttgtcttctcttcgtcactttcctggacaatctacgctaatacaggtgacgcaatcgcccagaactccaattctccctcgccagcttggtcccagagattggagacttacaaaccccgctaccgaagatttcgcgccactattgtcgacatagtctccaaggtgatgagaaaagctgtcgctggctttgagaatcaagagaagctagacgacgatgatgccgatacgtgcatgatggatcgagtgttacgtcgtcagatcctggaagcaaagaaattgggcaagactccagcagatccaacaaaggacgaaaggatgttagatgaattatttgttatcctcgtcgggggctacgattcgacatcgaacacactggcgtggtttgtcacattcatggaagcatacccagaaaaacagacaaagttacgagcggcgctgagggaggcgtttcctgctggactctcttcggtagaagagattatggaaacgcacatcccctatctcgatgcggcgtgcgaggaaactgtacgtctctctggaacggcaaaggcgagtttgcgacaagctgtggtagacacggagattcttggatgcaagataccgaaaggtgctgagatcttgatgaactttcataatgattacacacctctgcttgtagatccagctcgaagacatggtagtagtcgcgcgactctggaaactcgaggagatgggtttaggggaattgctgggcgagacatcgcgcgctttgagccgagcagatggctggtcaaagacgagtctggaaatgagaagttcgatgcctatgcgttgccacagctcattttcggcggcggctatcgtgggtgttcagggcgcagacttgccaccatggagctacgaatcatcatcgtgctgcttgttctgaactttgagttttcgaagttgcctgacgagctttgcaatacgcgcgcagtcgagacaatattcagaatgccggagaagtcttatgttaatattcgaccgttataa

SEQ ID NO: 1110 - protein, 587 aa, Muscodor strobelii
  misc_feature: SGI Peptide ID NO. 559960
  misc_feature (43)..(585): Pfam Id: PF00067 Pfam Desc: Cytochrome P450
  misc_feature (360)..(460): Pfam Id: PF00067 Pfam Desc: Cytochrome P450
  misc_feature (527)..(585): Pfam Id: PF00067 Pfam Desc: Cytochrome P450
  misc_feature (7)..(587): NCBI GI: 171683027 Blast Desc: protein product [Podospora anserina] gi|170941473|emb|CAP67124.1| protein product [Podospora anserina]
  misc_feature (18)..(521): NCBI GI: 116201423 Blast Desc: CHGG_08596 [Chaetomium globosum CBS 148.51] gi|88177114|gb|EAQ84582.1| CHGG_08596 [Chaetomium globosum CBS 148.51]
  misc_feature (23)..(584): NCBI GI: 145606867 Blast Desc: MGG_03811 [Magnaporthe grisea 70-15] gi|145014497|gb|EDJ99065.1| MGG_03811 [Magnaporthe grisea 70-15]
  misc_feature (5)..(587): NCBI GI: 121711960 Blast Desc: Cytochrome P450 oxidoreductase, [Aspergillus clavatus NRRL 1] gi|119401747|gb|EAW12169.1| Cytochrome P450 oxidoreductase, [Aspergillus clavatus NRRL 1]
  misc_feature (12)..(584): NCBI GI: 269856267 Blast Desc: cytochrome P450 monooxygenase [Fusarium sp. NRRL 13405]
  misc_feature (9)..(584): NCBI GI: 18026284 Blast Desc: cytochrome P450 [Gibberella zeae]
  misc_feature (9)..(584): NCBI GI: 18026282 Blast Desc: cytochrome P450 [Gibberella zeae]
  misc_feature (5)..(584): NCBI GI: 189191520 Blast Desc: cytochrome P450 monooxygenase [Pyrenophora tritici-repentis Pt-1C-BFP] gi|187973705|gb|EDU41204.1| cytochrome P450 monooxygenase [Pyrenophora tritici-repentis
  misc_feature (2)..(587): NCBI GI: 238845007 Blast Desc: cytochrome P450 monooxygenase [Microsporum canis CBS 113480]
  misc_feature (9)..(584): NCBI GI: 20475383 Blast Desc: cytochrome p450 monooxygenase [Gibberella zeae]
MMSYTLSCVALVVILAILFVKPRLYPAPYPGIPYNKPSATRLMGDVPDLLPIAQDTKEFSISVLTLTTRKLGTPIAQFLFPALRRPLIVLEDPYEIEDIIVRRGREFDKAPSAVVMFGSAFPKGTLSQFATPELKAQKRLWAEALSHEFLRKTAAANIYASALELIELWRLKATSLYKDKSFEAHGDLQNTGLDAIWVTVANEQAGLNRHEINKLQRQIKGRDIGSLEQQTAPGIVLKAEIDYMVGIRESHFVFSSSLSWTIYANTGDAIAQNSNSPSPAWSQRLETYKPRYRRFRATIVDIVSKVMRKAVAGFENQEKLDDDDADTCMMDRVLRRQILEAKKLGKTPADPTKDERMLDELFVILVGGYDSTSNTLAWFVTFMEAYPEKQTKLRAALREAFPAGLSSVEEIMETHIPYLDAACEETVRLSGTAKASLRQAVVDTEILGCKIPKGAEILMNFHNDYTPLLVDPARRHGSSRATLETRGDGFRGIAGRDIARFEPSRWLVKDESGNEKFDAYALPQLIFGGGYRGCSGRRLATMELRIIIVLLVLNFEFSKLPDELCNTRAVETIFRMPEKSYVNIRPL

SEQ ID NO: 1111 - DNA, 1617 bp, Muscodor strobelii
  misc_feature: SGI EST ID NO. CUFF.3051.0
  misc_feature: Variant of the nucleotide sequence at SEQ ID NO 1109
cagaactccaattctccctcgccagcttggtcccagagattggagacttacaaaccccgctaccgaagatttcgcgccactattgtcgacatagtctccaaggtgatgagaaaagctgtcgctggctttgagaatcaagagaagctagacgacgatgatgccgatacgtgcatgatggatcgagtgttacgtcgtcagatcctggaagcaaagaaattgggcaagactccagcagatccaacaaaggacgaaaggatgttagatgaattatttgttatcctcgtcgggggctacgattcgacatcgaacacactggcgtggtttgtcacattcatggaagcatacccagaaaaacagacaaagttacgagcggcgctgagggaggcgtttcctgctggactctcttcggtagaagagattatggaaacgcacatcccctatctcgatgcggcgtgcgaggaaactgtacgtctctctggaacggcaaaggcgagtttgcgacaagctgtggtagacacggagattcttggatgcaagataccgaaaggtgctgagatcttgatgaactttcataatgattacacacctctgcttgtagatccagctcgaagacatggtagtagtcgcgcgactctggaaactcgaggagatgggtttaggggaattgctgggcgagacatcgcgcgctttgagccgagcagatggctggtcaaagacgagtctggaaatgagaagttcgatgcctatgcgttgccacagctcattttcggcggcggctatcgtgggtgttcagggcgcagacttgccaccatggagctacgaatcatcatcgtgctgcttgttctgaactttgagttttcgaagttgcctgacgagctttgcaatacgcgcgcagtcgagacaatattcagaatgccggagaagtcttatgttaatattcgaccgttataatcgacaggataatctttgttacgcggcgcattatattcgttgcattctcccgtaggagagtcaatctttaggggctagaagcgtacggattattctttaagtgcttgttgtcacggaggcaatctccttgaactcgggaaaggtgcgagtaggagatatcagtggtctacagagaacttctctatcacattggtagctcgacacaaaacatcattgacgcgatacgtagacacaacgctataatatgactgtctacatttcatcgtctccgataggtgccgttcttccgatggggttcgcatcggccatgaaggaccctgatgtttgcgatgttgactattgccaagccgggcacacggcgcccgatttgggaagctgccgaataaggatactcaaatccacgagtcaacggaaggttacacgcgtcggttttgaactaacagacccggtgtgaggatccgctctagatacgacgaagccctgctccatagtgatctccggatgaaatctgggaaatttcattagacggggtagatggagaatggcgagtggagatatattcacgtttcaaataattgataggtggataattcgagatagtttgttcccagtttcaatgtcttggcatttggtggctccttatcttgctgtctcgtgagggcatcg

SEQ ID NO: 1112 - DNA, 1803 bp, Muscodor strobelii
  misc_feature: SGI cDNA ID NO. 559961
  misc_feature: Encodes the peptide sequence at SEQ ID NO 1113
atgatgagctacaccctcagctgtgttgccttggtggttatattggcaatactgtttgtcaaacctaggctgtacccagctccatatccgggcattccctacaataagccttcggcgacccgcctgatgggcgacgtccctgatctcttaccgatcgcacaagacacgaaggagttttctatctcggttcttactttgaccacgcggaaactaggcacaccgattgcacagtttctatttcctgcgcttcgacgtccgttgattgttttagaggacccgtatgaaatcgaggacatcatagttcgtcgcggccgggaatttgacaaggcgccgtctgccgtggtcatgtttggctccgcgtttccgaaaggcacactcagtcaattcgcaacgccagaactaaaagcgcagaaacggctatgggctgaagcactgagccatgaattcttgcgaaagactgccgctgcgaatatttacgcctcagctctggagttgatagaactttggcggctgaaagcgaccagcctatacaaagacaaatcgtttgaggctcacggggatttgcagaatactggtctagacgccatttgggtcactgtggcaaacgaacaagcaggactgaaccgacatgaaatcaataaactgcaaagacaaatcaaagggcgcgatatcggatccttagagcaacagacggccccgggaattgtactaaaagcagaaatagactacatggtaggaataagagaatcccactttgtcttctcttcgtcactttcctggacaatctacgctaatacgtatcctagtgacgcaatcgcccagaactccaattctccctcgccagcttggtcccagagattggagacttacaaaccccgctaccgaagatttcgcgccactattgtcgacatagtctccaaggtgatgagaaaagctgtcgctggctttgagaatcaagagaagctagacgacgatgatgccgatacgtgcatgatggatcgagtgttacgtcgtcagatcctggaagcaaagaaattgggcaagactccagcagatccaacaaaggacgaaaggatgttagatgaattatttgttatcctcgtcgggggctacgattcgacatcgaacacactggcgtggtttgtcacattcatggaagcatacccagaaaaacagacaaagttacgagcggcgctgagggaggcgtttcctgctggactctcttcggtaaacgctattgatatgaaattgttgaaatacagagaagagattatggaaacgcacatcccctatctcgatgcggcgtgcgaggaaactgtacgtctctctggaacggcaaaggcgagtttgcgacaagctgtggtagacacggagattcttggatgcaagataccgaaaggtgctgagatcttgatgaactttcataatgattacacacctctgcttgtagatccagctcgaagacatggtagtagtcgcgcgactctggaaactcgaggagatgggtttaggggaattgctgggcgagacatcgcgcgctttgagccgagcagatggctggtcaaagacgagtctggaaatgagaagttcgatgcctatgcgttgccacagctcattttcggcggcggctatcgtgggtgttcagggcgcagacttgccaccatggagctacgaatcatcatcgtgctgcttgttctgaactttgagttttcgaagttgcctgacgagctttgcaatacgcgcgcagtcgagacaatattcagaatgccggagaagtcttatgttaatattcgaccgttataa

SEQ ID NO: 1113 - protein, 600 aa, Muscodor strobelii
  misc_feature: SGI Peptide ID NO. 559961
  misc_feature (43)..(598): Pfam Id: PF00067 Pfam Desc: Cytochrome P450
  misc_feature (362)..(473): Pfam Id: PF00067 Pfam Desc: Cytochrome P450
  misc_feature (540)..(598): Pfam Id: PF00067 Pfam Desc: Cytochrome P450
  misc_feature (7)..(600): NCBI GI: 171683027 Blast Desc: protein product [Podospora anserina] gi|170941473|emb|CAP67124.1| protein product [Podospora anserina]
  misc_feature (18)..(534): NCBI GI: 116201423 Blast Desc: CHGG_08596 [Chaetomium globosum CBS 148.51] gi|88177114|gb|EAQ84582.1| CHGG_08596 [Chaetomium globosum CBS 148.51]
  misc_feature (23)..(597): NCBI GI: 145606867 Blast Desc: MGG_03811 [Magnaporthe grisea 70-15] gi|145014497|gb|EDJ99065.1| MGG_03811 [Magnaporthe grisea 70-15]
  misc_feature (5)..(600): NCBI GI: 121711960 Blast Desc: Cytochrome P450 oxidoreductase, [Aspergillus clavatus NRRL 1] gi|119401747|gb|EAW12169.1| Cytochrome P450 oxidoreductase, [Aspergillus clavatus NRRL 1]
  misc_feature (9)..(597): NCBI GI: 18026284 Blast Desc: cytochrome P450 [Gibberella zeae]
  misc_feature (9)..(597): NCBI GI: 18026282 Blast Desc: cytochrome P450 [Gibberella zeae]
  misc_feature (12)..(597): NCBI GI: 269856267 Blast Desc: cytochrome P450 monooxygenase [Fusarium sp. NRRL 13405]
  misc_feature (5)..(597): NCBI GI: 189191520 Blast Desc: cytochrome P450 monooxygenase [Pyrenophora tritici-repentis Pt-1C-BFP] gi|187973705|gb|EDU41204.1| cytochrome P450 monooxygenase [Pyrenophora tritici-repentis
  misc_feature (9)..(597): NCBI GI: 20475383 Blast Desc: cytochrome p450 monooxygenase [Gibberella zeae]
  misc_feature (2)..(600): NCBI GI: 238845007 Blast Desc: cytochrome P450 monooxygenase [Microsporum canis CBS 113480]
MMSYTLSCVALVVILAILFVKPRLYPAPYPGIPYNKPSATRLMGDVPDLLPIAQDTKEFSISVLTLTTRKLGTPIAQFLFPALRRPLIVLEDPYEIEDIIVRRGREFDKAPSAVVMFGSAFPKGTLSQFATPELKAQKRLWAEALSHEFLRKTAAANIYASALELIELWRLKATSLYKDKSFEAHGDLQNTGLDAIWVTVANEQAGLNRHEINKLQRQIKGRDIGSLEQQTAPGIVLKAEIDYMVGIRESHFVFSSSLSWTIYANTYPSDAIAQNSNSPSPAWSQRLETYKPRYRRFRATIVDIVSKVMRKAVAGFENQEKLDDDDADTCMMDRVLRRQILEAKKLGKTPADPTKDERMLDELFVILVGGYDSTSNTLAWFVTFMEAYPEKQTKLRAALREAFPAGLSSVNAIDMKLLKYREEIMETHIPYLDAACEETVRLSGTAKASLRQAVVDTEILGCKIPKGAEILMNFHNDYTPLLVDPARRHGSSRATLETRGDGFRGIAGRDIARFEPSRWLVKDESGNEKFDAYALPQLIFGGGYRGCSGRRLATMELRIIIVLLVLNFEFSKLPDELCNTRAVETIFRMPEKSYVNIRPL

SEQ ID NO: 1114 - DNA, 1617 bp, Muscodor strobelii; identical to SEQ ID NO: 1111
  misc_feature: SGI EST ID NO. CUFF.3051.0
  misc_feature: Variant of the nucleotide sequence at SEQ ID NO 1112

SEQ ID NO: 1115 - DNA, 993 bp, Muscodor strobelii
  misc_feature: SGI cDNA ID NO. 559962
  misc_feature: Encodes the peptide sequence at SEQ ID NO 1116
atggaatctttttcctccacgaagactgcgcaacaacaagaagtcatcctgtccctaccggccacgagggagacacccttcttcccttttagcgactttcctgctgagatccgacttctcatatgggaattctactttgactcattcttcaagacacctagactacacaccttcaatggatcgtttattcgttgggacggccatctaggcaagatagtgcaacagggtgtgttgtggagcctgctagccgatcgttatggttggcgcgaacgtaaccttccacgcatgcgttggaaaacaataatacacgatgtctcgccacatccagcaaaggtatatttcacggatcagcggcttaacttctggccggctttaaatccaatgatcaattccgaggctttaaaagtggccaaaaaatgctgcgaggactttcagctcgttgatctctggctcgacgcagacaccgcaaatgtggcacaaccagcggtggccaatgtcgcatcagacatattccgctttgctgttggcaaaaatacaaccccgagcgaaatcgagtccactgcgtggctaaatggcattcgccgtcttgccatcggacctttgctctccagtcaatccaacacactagttcccctagatcaaatgctgaaccaagttgaagacttgaatgaagtttacattctactcccaccctcgatcattcactcctgtgctacgctgggtactgaaccgtgcgactgtgtactgggcgaacacatgctacagcaacagactggcctaactttggttgagataaatccaactgaggagttccttgggtcatattggctttggctatacgatgcgattgagaggatcctatccctgctaggaaagagaaacgataatccgaacattctatacgcagttttggattgcgaggaggtgctaagcgagacaatctcatcgaagactcctttcggagacgtatgtgcatctgcgtctggaagatga

SEQ ID NO: 1116 - protein, 330 aa, Muscodor strobelii
  misc_feature: SGI Peptide ID NO. 559962
MESFSSTKTAQQQEVILSLPATRETPFFPFSDFPAEIRLLIWEFYFDSFFKTPRLHTFNGSFIRWDGHLGKIVQQGVLWSLLADRYGWRERNLPRMRWKTIIHDVSPHPAKVYFTDQRLNFWPALNPMINSEALKVAKKCCEDFQLVDLWLDADTANVAQPAVANVASDIFRFAVGKNTTPSEIESTAWLNGIRRLAIGPLLSSQSNTLVPLDQMLNQVEDLNEVYILLPPSIIHSCATLGTEPCDCVLGEHMLQQQTGLTLVEINPTEEFLGSYWLWLYDAIERILSLLGKRNDNPNILYAVLDCEEVLSETISSKTPFGDVCASASGR

SEQ ID NO: 1117 - DNA, 804 bp, Muscodor strobelii
  misc_feature: SGI cDNA ID NO. 559963
  misc_feature: Encodes the peptide sequence at SEQ ID NO 1118
atgccacccccaaccacggacgggcaaccgcccataccgatctccatcaccatctgcggcgacggcggctgcggcaaatcctccatcacgctgcgtctcgtgcgctcagaatggacatccgactacgaccccaccatcgaagacagctacagcatcacgcggcgcatcgacggcacgacctaccacctctcgctcaccgacacagccggtcaggaagaataccgcggcatgtgggcctcctccaacctcggcgccgacgccttcctcctcgtctacgacatcacatctgccgactcgctcgacgcgctgggccacttcaacgacctgatagacatggaggccgagacgcgcatggacaacgcgacccgggctaggcgcgcgggtctgagcgtcagcgcagatcacgggaggaccataccacccgtcaagatcgtcgcggggaataagtgcgatctgcagcaatcccgtgttgtgcctgccgcgcagggcttagagtgggcgaggaaacgcggttgtggcttcatggagacgagtgctagattggaagtcaacattgaggagaccttcgcccttatcgtccgccgcgtggtggagggcagacgattggcggagatgggtgtcatggatagcatgcagatggatagacggggcgtcacgaaacctcttacgccgctaccgaacgagagcgagggggacgtcacgacggacgagaaacgggggcctggcgttaggggtccgaggattgacgggtcgacgggacggagagggggacagggcttctggaagagtttccggtgctggtaa

SEQ ID NO: 1118 - protein, 267 aa, Muscodor strobelii
  misc_feature: SGI Peptide ID NO. 559963
  misc_feature (15)..(119): Pfam Id: PF08477 Pfam Desc: Miro-like protein
  misc_feature (15)..(198): Pfam Id: PF00071 Pfam Desc: Ras family
  misc_feature (16)..(103): Pfam Id: PF08477 Pfam Desc: Miro-like protein
  misc_feature (20)..(198): Pfam Id: PF00071 Pfam Desc: Ras family
  misc_feature (5)..(267): NCBI GI: 145606927 Blast Desc: MGG_12077 [Magnaporthe grisea 70-15] gi|145014557|gb|EDJ99125.1| MGG_12077 [Magnaporthe grisea 70-15]
  misc_feature (5)..(267): NCBI GI: 256733041 Blast Desc: [Nectria haematococca mpVI 77-13-4]
  misc_feature (9)..(267): NCBI GI: 46125293 Blast Desc: FG07024.1 [Gibberella zeae PH-1]
  misc_feature (9)..(267): NCBI GI: 85094902 Blast Desc: NCU06111 [Neurospora crassa OR74A] gi|28921431|gb|EAA30737.1| NCU06111 [Neurospora crassa OR74A]
  misc_feature (9)..(267): NCBI GI: 116203661 Blast Desc: CHGG_09714 [Chaetomium globosum CBS 148.51] gi|88175842|gb|EAQ83310.1| CHGG_09714 [Chaetomium globosum CBS 148.51]
  misc_feature (14)..(205): NCBI GI: 119195383 Blast Desc: CIMG_02066 [Coccidioides immitis RS]
  misc_feature (14)..(205): NCBI GI: 240104947 Blast Desc: Ras family protein [Coccidioides posadasii C735 delta SOWgp]
  misc_feature (14)..(202): NCBI GI: 225559555 Blast Desc: GTPase Ras2p [Ajellomyces capsulatus G186AR]
  misc_feature (14)..(263): NCBI GI: 242814444 Blast Desc: RAS small monomeric GTPase, [Talaromyces stipitatus ATCC 10500] gi|218714709|gb|EED14132.1| RAS small monomeric GTPase, [Talaromyces stipitatus ATCC 10500]
  misc_feature (11)..(244): NCBI GI: 169779920 Blast Desc: [Aspergillus oryzae RIB40] gi|83773164|dbj|BAE63291.1| protein product [Aspergillus oryzae]
MPPPTTDGQPPIPISITICGDGGCGKSSITLRLVRSEWTSDYDPTIEDSYSITRRIDGTTYHLSLTDTAGQEEYRGMWASSNLGADAFLLVYDITSADSLDALGHFNDLIDMEAETRMDNATRARRAGLSVSADHGRTIPPVKIVAGNKCDLQQSRVVPAAQGLEWARKRGCGFMETSARLEVNIEETFALIVRRVVEGRRLAEMGVMDSMQMDRRGVTKPLTPLPNESEGDVTTDEKRGPGVRGPRIDGSTGRRGGQGFWKSFRCW

SEQ ID NO: 1119 - DNA, 2170 bp, Muscodor strobelii
  misc_feature: SGI EST ID NO. CUFF.3325.0
  misc_feature: Variant of the nucleotide sequence at SEQ ID NO 1117
tcctcttcgtatatttcttttcttgttatcccttctaattgctgctttctattgctcgagctggtccttgatatcgcatcacgcattccctgtgcgattgtcaccggctttgtagtttccgatcacaacgatagggtgctgaaacaaacagcacacattccagcacttgcttctgcgcaatccagctagcagtcacgtctatcacatcggaccctaaacaaaaatctgccgagtctgtcacaaatgcgcgtttcatgacgacagatacactcggcaattcctaaagcggcgtggaggcactttacagcttgcagctcggcagcttttgacaggacccttttcgtgggaccgtgccgcctcatcaatccagaccgttggccgttggccgttggtgggctgggcacggtagcgtccactgttagtgccgctccagatctcccaagctcgctaagcttcgggcaacggctcccaaatccgtcaagtgaagcaacgaaaagaaaagcgaagggaaggaaaaagggaaggggacgaaggtttgaaagattgcgcgatcctcgtcacagatccaccggccctccgtcacggagcaggaaaccttgtctaccttggcagtcgtattcctgcaatccgtcattcatttctccggcccttctttccttgcgttcattcatgatcctcgccaattgaccgacttccaaccccaacaccagcgtcagacattcgtcatttactctactaggagtgcttcgagcttgccaaacgacaacaaaactgtgtagattgcttgaatagacgtacaaattcgagaaccgagcgctcaaaccaaacaataagcccctccattggcatcgcgaccactttagaacattgcatagaagccaccgagtccacccacaacgtcactcactgcgtaacaaacacaagatgccacccccaaccacggacgggcaaccgcccataccgatctccatcaccatctgcggcgacggcggctgcggcaaatcctccatcacgctgcgtctcgtgcgctcagaatggacatccgactacgaccccaccatcgaagacagctacagcatcacgcggcgcatcgacggcacgacctaccacctctcgctcaccgacacagccggtcaggaagaataccgcggcatgtgggcctcctccaacctcggcgccgacgccttcctcctcgtctacgacatcacatctgccgactcgctcgacgcgctgggccacttcaacgacctgatagacatggaggccgagacgcgcatggacaacgcgacccgggctaggcgcgcgggtctgagcgtcagcgcagatcacgggaggaccataccacccgtcaagatcgtcgcggggaataagtgcgatctgcagcaatcccgtgttgtgcctgccgcgcagggcttagagtgggcgaggaaacgcggttgtggcttcatggagacgagtgctagattggaagtcaacattgaggagaccttcgcccttatcgtccgccgcgtggtggagggcagacgattggcggagatgggtgtcatggatagcatgcagatggatagacggggcgtcacgaaacctcttacgccgctaccgaacgagagcgagggggacgtcacgacggacgagaaacgggggcctggcgttaggggtccgaggattgacgggtcgacgggacggagagggggacagggcttctggaagagtttccggtgctggtaagaggaacatgagtgcgtaaggaagagttgagcaacgacgaacacgaggagcgttcacacgcatatgagaaggagcgagtaatgagcgggttgttgagtataacgctgtctgaagacgttgcgtttgttggtctgatcatgttgaacgcgagcaggaaccgtttcgcttcattgtgtctattaatgtcttatgccgatgctacatatcaaacatccgcggagtacatcggcgtctgagtagggggtgcggcgcattgtatcttgtttcacggtgtctacgaaggcatgttttttacggactggcagggtagcgttctctcatatatactgaattcatgaattcctggactcctatctgactgaatatgatatttgtgtgatactaacgggttttcttcgccctaggttaggaggcaaggcaagtattccgcaatgcactcgtc

SEQ ID NO: 1120 - DNA, 2499 bp, Muscodor strobelii
  misc_feature: SGI cDNA ID NO. 559964
  misc_feature: Encodes the peptide sequence at SEQ ID NO 1121
atggcagggccgacgacgtttcatgtgttgggtcatgtcttcgcggctttggggatgggcttcgcgttcggagaggcggcgtcgatacagaaccagaagatgcatggcgttcatgcggcgggaatcagtgtgaacgccacgaacttcttcaagagctccggtcaagttttgacggtgcccctgaagcgctttgatcatcatggtgttgcgactccaagcatcgcgaagcggttcttcaaggcagatattctcggagtatacggagccgcttatcttgctgaattaacaattggaacgagcaccaatggagatgcccaagttgtcgatgttcttattgacacaggctctttcgaattgtgggttgatccggactgcgcagcctcgaacgtgccgcagttttgtacagcttttgggtactacgatccagcaaagtcctcttcctcgaaaaagctgcctggcgctggatttgatattcagtatggatccggccaggcaacgggcccctattatacggacgatatatacatatcaggtgcaaaggtttcggaccaacaatttggtgtggccaactcttccgatctcgtatggttcgggatcatgggacttggccatgggcaaggaaacggcttcattgactaccccataatcatcgattcacttgccgatcaaggctttacaaacactaagttgtttagtattgatttgggcggccaggccgccccaggagctgttatcacgggtgagatggtctttggtggtgtagacacgagcaaatatggcggcttcttaaaaaaagttccgactgatcctcaagatccccactataaggtgacagtcaattctatcggggttaagccaccagggtcaaccgtctcgacacccttggtggacacgaacatacctcttgacgtgatcctcgattcgggtactacgttatcgcttctccctgaatctattgtgttagacttggcagcaaagttccctggagctgagtctgatggcaatggtggataccgtgtcgactgttcattccaggaccaggacgggtctgtggactttgagttcttggccggtagcagtactgtcacgatcaatgtcgcatacaaggacttcgtatggaacagcggcggtgattgttttcttggcgcttggtacagtgatgatcttggaatctggatcttaggcgatacctttttgagaggggcgtatgtcacgttcgatcaaacgaataatgcagtcttcatgggtaactatcagacctgcactggcggttctctagttgcggtcccggccggtcccaatgctgctggcaatatccagggggcatgtgcagtggctagcagtgtccagtctactccctcttcaagccctccggcgtcgcttgcgtcatccaattccgtctcgagtactgtgattccatctgctgcatcaactcttgggccttctttgaatcccgtgggcccttccataagctcatcctcatcgtctggagtaccctcgtctactccttcagcttcttcgttggcatcgagcacttcatctttcccgctttcctcagtttctcctcccactacaagcaccagctccagacaccttgctacacctgcgactggaactgtcccactcaataacccgactgatatcccaccgggcgccccagctcaaggtgggccagatcctgatggcgttgacggatctaacagtgtaggcgagggtgccgccgcagatatcatcgcatctctggatccagtagatccggcagcacccacaaatggagtcagtggaagcggaaatggaaatagtgaaaatggtggcggtagtggtcctggaatcggagccgccgctttgacggaagtcaccacgacaataacaactacgatttcccgcgcagtgatctacacggtaacagtctgtccagactctgttaaggattgtcctctgcggggacaagtagctacgagcttcgaacaagtgatcacggaatactgcccgggacatgagaccgctcctccaaatgtgataacggtttatcagggctcgccagatgctcccatcacaaagaccagcggcccagctgcaacgacagtcgtcgtggttcagccagctcaaggcggaggcgaagttgtgactgttacggaacagcagagaccggtcacgacgatttttgaggtcaagtcttgtgacccggcggaggatagctgtacgattggtatgacgacaacgcgaaccatgactattgttgagacagtgagagttgagcctgtccctgatgttacacccactgcggcgaggccatcgattgtgcccgggaatcagattgtgtatgggtctggtaactcgaccctgagtgcttgtggtacggcttgtaggggaaatgccgccgcccctacgaccgagatccagatcggggctgcgagcgcagttgatgacggattgctggataggagataccttggcgttgcttttggacttgtttggggaatcatgatcttgttgtga

SEQ ID NO: 1121 - protein, 832 aa, Muscodor strobelii
  misc_feature: SGI Peptide ID NO. 559964
  misc_feature (90)..(418): Pfam Id: PF00026 Pfam Desc: Eukaryotic aspartyl protease
  misc_feature (90)..(413): Pfam Id: PF00026 Pfam Desc: Eukaryotic aspartyl protease
  misc_feature (67)..(443): NCBI GI: 39948622 Blast Desc: MGG_08698 [Magnaporthe grisea 70-15] gi|145009241|gb|EDJ93952.1| MGG_08698 [Magnaporthe grisea 70-15]
  misc_feature (88)..(497): NCBI GI: 171682894 Blast Desc: protein product [Podospora anserina] gi|170941406|emb|CAP67057.1| protein product [Podospora anserina]
  misc_feature (67)..(405): NCBI GI: 85090078 Blast Desc: NCU09155 [Neurospora crassa OR74A] gi|28919587|gb|EAA29011.1| conserved [Neurospora crassa OR74A]
  misc_feature (88)..(443): NCBI GI: 46116266 Blast Desc: FG03975.1 [Gibberella zeae PH-1]
  misc_feature (88)..(443): NCBI GI: 256722247 Blast Desc: NECHADRAFT_21517 [Nectria haematococca mpVI 77-13-4]
  misc_feature (76)..(443): NCBI GI: 116205573 Blast Desc: CHGG_10670 [Chaetomium globosum CBS 148.51] gi|88176798|gb|EAQ84266.1| CHGG_10670 [Chaetomium globosum CBS 148.51]
  misc_feature (76)..(530): NCBI GI: 171680938 Blast Desc: protein product [Podospora anserina] gi|170940427|emb|CAP65654.1| protein product [Podospora anserina]
  misc_feature (106)..(488): NCBI GI: 116191517 Blast Desc: CHGG_05476 [Chaetomium globosum CBS 148.51] gi|88181389|gb|EAQ88857.1| CHGG_05476 [Chaetomium globosum CBS 148.51]
  misc_feature (75)..(552): NCBI GI: 116205756 Blast Desc: CHGG_02171 [Chaetomium globosum CBS 148.51] gi|88182768|gb|EAQ90236.1| CHGG_02171 [Chaetomium globosum CBS 148.51]
  misc_feature (76)..(443): NCBI GI: 171678197 Blast Desc: protein product [Podospora anserina] gi|170937168|emb|CAP61825.1| protein product [Podospora anserina]
MAGPTTFHVLGHVFAALGMGFAFGEAASIQNQKMHGVHAAGISVNATNFFKSSGQVLTVPLKRFDHHGVATPSIAKRFFKADILGVYGAAYLAELTIGTSTNGDAQVVDVLIDTGSFELWVDPDCAASNVPQFCTAFGYYDPAKSSSSKKLPGAGFDIQYGSGQATGPYYTDDIYISGAKVSDQQFGVANSSDLVWFGIMGLGHGQGNGFIDYPIIIDSLADQGFTNTKLFSIDLGGQAAPGAVITGEMVFGGVDTSKYGGFLKKVPTDPQDPHYKVTVNSIGVKPPGSTVSTPLVDTNIPLDVILDSGTTLSLLPESIVLDLAAKFPGAESDGNGGYRVDCSFQDQDGSVDFEFLAGSSTVTINVAYKDFVWNSGGDCFLGAWYSDDLGIWILGDTFLRGAYVTFDQTNNAVFMGNYQTCTGGSLVAVPAGPNAAGNIQGACAVASSVQSTPSSSPPASLASSNSVSSTVIPSAASTLGPSLNPVGPSISSSSSSGVPSSTPSASSLASSTSSFPLSSVSPPTTSTSSRHLATPATGTVPLNNPTDIPPGAPAQGGPDPDGVDGSNSVGEGAAADIIASLDPVDPAAPTNGVSGSGNGNSENGGGSGPGIGAAALTEVTTTITTTISRAVIYTVTVCPDSVKDCPLRGQVATSFEQVITEYCPGHETAPPNVITVYQGSPDAPITKTSGPAATTVVVVQPAQGGGEVVTVTEQQRPVTTIFEVKSCDPAEDSCTIGMTTTRTMTIVETVRVEPVPDVTPTAARPSIVPGNQIVYGSGNSTLSACGTACRGNAAAPTTEIQIGAASAVDDGLLDRRYLGVAFGLVWGIMILL

SEQ ID NO: 1122 - DNA, 1999 bp, Muscodor strobelii
  misc_feature: SGI EST ID NO. CUFF.3072.0
  misc_feature: Variant of the nucleotide sequence at SEQ ID NO 1120
ggtgacagtcaattctatcggggttaagccaccagggtcaaccgtctcgacacccttggtggacacgaacatacctcttgacgtgatcctcgattcgggtactacgttatcgcttctccctgaatctattgtgttagacttggcagcaaagttccctggagctgagtctgatggcaatggtggataccgtgtcgactgttcattccaggaccaggacgggtctgtggactttgagttcttggccggtagcagtactgtcacgatcaatgtcgcatacaaggacttcgtatggaacagcggcggtgattgttttcttggcgcttggtacagtgatgatcttggaatctggatcttaggcgatacctttttgagaggggcgtatgtcacgttcgatcaaacgaataatgcagtcttcatgggtaactatcagacctgcactggcggttctctagttgcggtcccggccggtcccaatgctgctggcaatatccagggggcatgtgcagtggctagcagtgtccagtctactccctcttcaagccctccggcgtcgcttgcgtcatccaattccgtctcgagtactgtgattccatctgctgcatcaactcttgggccttctttgaatcccgtgggcccttccataagctcatcctcatcgtctggagtaccctcgtctactccttcagcttcttcgttggcatcgagcacttcatctttcccgctttcctcagtttctcctcccactacaagcaccagctccagacaccttgctacacctgcgactggaactgtcccactcaataacccgactgatatcccaccgggcgccccagctcaaggtgggccagatcctgatggcgttgacggatctaacagtgtaggcgagggtgccgccgcagatatcatcgcatctctggatccagtagatccggcagcacccacaaatggagtcagtggaagcggaaatggaaatagtgaaaatggtggcggtagtggtcctggaatcggagccgccgctttgacggaagtcaccacgacaataacaactacgatttcccgcgcagtgatctacacggtaacagtctgtccagactctgttaaggattgtcctctgcggggacaagtagctacgagcttcgaacaagtgatcacggaatactgcccgggacatgagaccgctcctccaaatgtgataacggtttatcagggctcgccagatgctcccatcacaaagaccagcggcccagctgcaacgacagtcgtcgtggttcagccagctcaaggcggaggcgaagttgtgactgttacggaacagcagagaccggtcacgacgatttttgaggtcaagtcttgtgacccggcggaggatagctgtacgattggtatgacgacaacgcgaaccatgactattgttgagacagtgagagttgagcctgtccctgatgttacacccactgcggcgaggccatcgattgtgcccgggaatcagattgtgtatgggtctggtaactcgaccctgagtgcttgtggtacggcttgtaggggaaatgccgccgcccctacgaccgagatccagatcggggctgcgagcgcagttgatgacggattgctggataggagataccttggcgttgcttttggacttgtttggggaatcatgatcttgttgtgagagcgaggtggactacagatgaaaagattggcaaactacctactgtcctcaaggatagtccgggatgagacgagaccaaggcgtcccacctagcagaaggagatgtctacctccatgcaccccaccacggtagacacccttgacacgagatacaacgagacaatagttgatgacggcaagctgctttgtaggattagcagggtgggggagataccggggatgacactgtattttcaaggtcgttggagatgaagatggaaatgtgggtgtgattttgatttgttcacaacacggttttgcaacgggtagatatctccttcacgtttg

SEQ ID NO: 1123 - DNA, 786 bp, Muscodor strobelii
  misc_feature: SGI cDNA ID NO. 559965
  misc_feature: Elevated expression when VOC is produced
  misc_feature: Encodes the peptide sequence at SEQ ID NO 1124
atggcagcgactactgcacactgcatcttttgttttgagagtctggctgcccacctcgaaaaccgcaagccaatgacccttgaggatgtagaggcgtcatggactaaataccaagcttctcagaagccatctcctacctcgcgtctcatcgccgaagccactaattccgcttccacgctttcgacgccttcttccggctcgagcatgtctctgggcgcagacacgcctgcaacatctacctcctcactgcctgcggaacagccggccatcgtagagtcgcctctttttgtcacttggaacacagtctcttccgtccccggccaagagtcggccctccgcggctgcatcggcaccttcgaggcccaagagctcgacgagggcctctcctcatacgccctcacctcggccctgcacgacatgcgcttcgaccccatcaccaagcgcgagctcccctctctcgaggtcgccgtcactctcctgcacgacttcgaagactgcgacgatgccatggactgggagatcggcacccacggcttacgcatttccttcttcgaccgcggccgccgctacggctcgacctacctccccgacgtcgcactcgagcagggctggactaaggaacagacgctggtgagcctcatgcgcaaggctggctgggttggccgcaaggacaagtggcaggaagtcgacctcaaggtggtgcgctaccagggccagaagatagacttggagtatcccgtctataagaagtggagagactgggttgctgccaccaaagacgcatga

SEQ ID NO: 1124 - protein, 261 aa, Muscodor strobelii
  misc_feature: SGI Peptide ID NO. 559965
  misc_feature (64)..(246): Pfam Id: PF01871 Pfam Desc: AMMECR1
  misc_feature (94)..(246): Pfam Id: PF01871 Pfam Desc: AMMECR1
  misc_feature (3)..(254): NCBI GI: 39943714 Blast Desc: MGG_03868 [Magnaporthe grisea 70-15] gi|145014556|gb|EDJ99124.1| MGG_03868 [Magnaporthe grisea 70-15]
  misc_feature (3)..(255): NCBI GI: 189200759 Blast Desc: ammecr1 family protein [Pyrenophora tritici-repentis Pt-1C-BFP] gi|187983815|gb|EDU49303.1| ammecr1 family protein [Pyrenophora tritici-repentis Pt-1C-BFP]
  misc_feature (3)..(259): NCBI GI: 85094910 Blast Desc: NCU06113 [Neurospora crassa OR74A] gi|28921433|gb|EAA30739.1| conserved [Neurospora crassa OR74A]
  misc_feature (3)..(255): NCBI GI: 171679441 Blast Desc: protein product [Podospora anserina] gi|170939346|emb|CAP64574.1| protein product [Podospora anserina]
  misc_feature (3)..(253): NCBI GI: 256732596 Blast Desc: [Nectria haematococca mpVI 77-13-4]
  misc_feature (3)..(255): NCBI GI: 169617518 Blast Desc: SNOG_11939 [Phaeosphaeria nodorum SN15] gi|111059231|gb|EAT80351.1| SNOG_11939 [Phaeosphaeria nodorum SN15]
  misc_feature (3)..(257): NCBI GI: 46125295 Blast Desc: FG07025.1 [Gibberella zeae PH-1]
  misc_feature (1)..(219): NCBI GI: 261361208 Blast Desc: AMME syndrome candidate gene 1 protein [Verticillium albo-atrum VaMs.102]
  misc_feature (71)..(255): NCBI GI: 156039181 Blast Desc: SS1G_11727 [Sclerotinia sclerotiorum 1980] gi|154697464|gb|EDN97202.1| SS1G_11727 [Sclerotinia sclerotiorum 1980]
  misc_feature (3)..(261): NCBI GI: 67525213 Blast Desc: AN3064.2 [Aspergillus nidulans FGSC A4] gi|40744459|gb|EAA63635.1| AN3064.2 [Aspergillus nidulans FGSC A4] gi|259485989|tpe|CBF83475.1| TPA: AMMECR1 family protein FGSC
  misc_feature: Useful for introducing or modulating the production of volatile compounds
MAATTAHCIFCFESLAAHLENRKPMTLEDVEASWTKYQASQKPSPTSRLIAEATNSASTLSTPSSGSSMSLGADTPATSTSSLPAEQPAIVESPLFVTWNTVSSVPGQESALRGCIGTFEAQELDEGLSSYALTSALHDMRFDPITKRELPSLEVAVTLLHDFEDCDDAMDWEIGTHGLRISFFDRGRRYGSTYLPDVALEQGWTKEQTLVSLMRKAGWVGRKDKWQEVDLKVVRYQGQKIDLEYPVYKKWRDWVAATKDA

SEQ ID NO: 1125 - DNA, 1441 bp, Muscodor strobelii
  misc_feature: SGI EST ID NO. CUFF.3080.0
  misc_feature: Variant of the nucleotide sequence at SEQ ID NO 1123
aggggtagtgggcacacgctagtaaacggttagctgcatccagcgtaccggtaggccgacgctcactgctgtaagctcccactttatcctctggcacatgctgcatcacgtcacatccatgcacggctcgggattcactccttatcacgggcttaattagacactacgtgaacttatcggatgcagcaggagagcggggtgaacatgatggatgatgacaactctggtagcttaggtaggcagtcacgtttaggtcgttgatgaggcactgattgtttcatacttgcacttcacctcttgacttctgaccttttgtctttgccgtctttctctcttgtccctcggcgaccccctttccccaatcctcatcctcctcatatccacactctctcttactcttggagtcactgccgcctggcggagcttaacaatggcagcgactactgcacactgcatcttttgttttgagagtctggctgcccacctcgaaaaccgcaagccaatgacccttgaggatgtagaggcgtcatggactaaataccaagcttctcagaagccatctcctacctcgcgtctcatcgccgaagccactaattccgcttccacgctttcgacgccttcttccggctcgagcatgtctctgggcgcagacacgcctgcaacatctacctcctcactgcctgcggaacagccggccatcgtagagtcgcctctttttgtcacttggaacacagtctcttccgtccccggccaagagtcggccctccgcggctgcatcggcaccttcgaggcccaagagctcgacgagggcctctcctcatacgccctcacctcggccctgcacgacatgcgcttcgaccccatcaccaagcgcgagctcccctctctcgaggtcgccgtcactctcctgcacgacttcgaagactgcgacgatgccatggactgggagatcggcacccacggcttacgcatttccttcttcgaccgcggccgccgctacggctcgacctacctccccgacgtcgcactcgagcagggctggactaaggaacagacgctggtgagcctcatgcgcaaggctggctgggttggccgcaaggacaagtggcaggaagtcgacctcaaggtggtgcgctaccagggccagaagatagacttggagtatcccgtctataagaagtggagagactgggttgctgccaccaaagacgcatgaggaaggcctgcatcggatatgttgtcagtctgtatgctcagggtatcagctcccaaggaaaagctgccattcttgacttggcgtaaggaggagttgaggcgaatgggttgggtatagcgaagcaattggtttcgagaccatttgatacaggtagatgggtctccctgctgaaatcataggttgatctcatctcagaaatacaacaaattcaccacacgctcgcgc

SEQ ID NO: 1126 - DNA, 417 bp, Muscodor strobelii
  misc_feature: SGI cDNA ID NO. 559966
  misc_feature: Encodes the peptide sequence at SEQ ID NO 1127
atggcctcggaagatcccaagtacgaccgaagtcgacctctcccatctctcgaaatagcattccagaacaagatcggcaatgctcccggcaagacaattctcggaatgatagttacgtttccgccgaacgcttcgacgccgccgcatagacatggcggcacgtcagtgacagcatatgtacttgagggcacgttgctgaacaagatgaacgacgagccgacccaagtcattgcggctggtggtacctggtacgaagcaccgggctgccaccataagatcagcgacaatcatagcaagacagagtcagcaaagctgctagcaaccttcattatagatacagaggtgcttgaggctgaaggcatgggcgcgttgcttcaggtcgatgaggagtacaaggatgtcaagctgggaggttga

SEQ ID NO: 1127 - protein, 138 aa, Muscodor strobelii
  misc_feature: SGI Peptide ID NO. 559966
  misc_feature (36)..(109): Pfam Id: PF07883 Pfam Desc: Cupin domain
  misc_feature (1)..(134): NCBI GI: 225559855 Blast Desc: cupin domain-containing protein [Ajellomyces capsulatus G186AR] gi|240276269|gb|EER39781.1| cupin domain-containing protein [Ajellomyces capsulatus H143]
  misc_feature (1)..(134): NCBI GI: 154287468 Blast Desc: [Ajellomyces capsulatus NAm1] gi|150408170|gb|EDN03711.1| [Ajellomyces capsulatus NAm1]
  misc_feature (4)..(132): NCBI GI: 145243732 Blast Desc: An11g03810 [Aspergillus niger] gi|134079060|emb|CAK48369.1| protein product [Aspergillus niger]
  misc_feature (4)..(134): NCBI GI: 242795170 Blast Desc: cupin domain protein [Talaromyces stipitatus ATCC 10500] gi|218719113|gb|EED18533.1| cupin domain protein [Talaromyces stipitatus ATCC 10500]
  misc_feature (4)..(131): NCBI GI: 119483778 Blast Desc: cupin domain protein [Neosartorya fischeri NRRL 181] gi|119409948|gb|EAW19895.1| cupin domain protein [Neosartorya fischeri NRRL 181]
  misc_feature (4)..(132): NCBI GI: 255933680 Blast Desc: Pc12g14130 [Penicillium chrysogenum Wisconsin 54-1255] gi|211582838|emb|CAP81040.1| Pc12g14130 [Penicillium chrysogenum Wisconsin 54-1255]
  misc_feature (1)..(134): NCBI GI: 226285150 Blast Desc: cupin domain-containing protein [Paracoccidioides brasiliensis Pb01]
  misc_feature (4)..(132): NCBI GI: 146323486 Blast Desc: cupin domain protein [Aspergillus fumigatus Af293] gi|129558266|gb|EAL92224.2| cupin domain protein [Aspergillus fumigatus Af293] gi|159127279|gb|EDP52394.1| cupin domain protein
  misc_feature (4)..(134): NCBI GI: 115385234 Blast Desc: [Aspergillus terreus NIH2624] gi|114196856|gb|EAU38556.1| [Aspergillus terreus NIH2624]
  misc_feature (4)..(134): NCBI GI: 121700487 Blast Desc: cupin domain protein [Aspergillus clavatus NRRL 1] gi|119396651|gb|EAW07082.1| cupin domain protein [Aspergillus clavatus NRRL 1]
MASEDPKYDRSRPLPSLEIAFQNKIGNAPGKTILGMIVTFPPNASTPPHRHGGTSVTAYVLEGTLLNKMNDEPTQVIAAGGTWYEAPGCHHKISDNHSKTESAKLLATFIIDTEVLEAEGMGALLQVDEEYKDVKLGG

SEQ ID NO: 1128 - DNA, 1320 bp, Muscodor strobelii
  misc_feature: SGI EST ID NO. CUFF.3087.0
  misc_feature: Variant of the nucleotide sequence at SEQ ID NO 1126
caatgagtctcccaaaggggatgttctttgacatgcttaatgccgcgaacagaaaggcatgtactatcctcgaacctagaacagaattagcattaatcaatgcattgacctcttgaataagaaataataaaagctcggcgaacctttgggtggtatttcaagctgccgatacttggctccaccatgtccagatgggaagccggttgtccccggatagccttcccggaagacgggagcatcaagaaatggagcagaacagagatcccaacaaaatcgatgacctttccccttcacccgtttctcgtaaggtaagcccatagaaacagactgctgaaagcaatgctatctattggtatctaattcgtagagagtcgggaacctgttgtaaattgctataaagtcaaggggagctctcatctaaacacggcgcatctattcatgaattacgttccaacttcgctattatttcaagtatctgcacaaccacaaactcttgagagaattcggaagcacggggattaagccttaaacatcatggcctcggaagatcccaagtacgaccgaagtcgacctctcccatctctcgaaatagcattccagaacaagatcggcaatgctcccggcaagacaattctcggaatgatagttacgtttccgccgaacgcttcgacgccgccgcatagacatggcggcacgtcagtgacagcatatgtacttgagggcacgttgctgaacaagatgaacgacgagccgacccaagtcattgcggctggtggtacctggtacgaagcaccgggctgccaccataagatcagcgacaatcatagcaagacagagtcagcaaagctgctagcaaccttcattatagatacagaggtgcttgaggctgaaggcatgggcgcgttgcttcaggtcgatgaggagtacaaggatgtcaagctgggaggttgatgcgcgtttagggatgtctggctacgctcgtctcttcctagctgcgttcaagtagaactatttcacatttttttgcccatcacatttagtaggtggccatggaacacactgcactgccaatgcaattgcagtcgcaaacgatgcagcctgcaatagatctgctgggtatttgaaatgtcttgatccggggaaaggcttgttggtcaaaacgtcgcagacagttgggcactattggcgcaactactggcttcttgaatgatacaccggttgcgaaaaaaatcgattaagctggtagccatctattcaagatatgtccatggagctcagccttatgtatagttggatagttatccaagagtataatgaaac

SEQ ID NO: 1129 - DNA, 759 bp, Muscodor strobelii
  misc_feature: SGI cDNA ID NO. 559967
  misc_feature: Encodes the peptide sequence at SEQ ID NO 1130
atggtccaactctctatcctcgtagccgccgcgctgacagcggccatacctgctcacgcaaacggtttcggcaatggctgggacgaccgaagcgaaacctcctggattacacacttctcgaccaacattgtcgtacccaaggcacccagcccacaacaggactggctagtcctctggcccgcgctccagtccccaaaagctctcatgcagcccattctagggagttacaacagcccaccctgttgcgcaggcaacggtcaatggtgttcattcacatacacactcctcctcccgtccaacacagtcaagcaaggcccgaccctagtccccgtcggggcaggcacacatctccacatcgccatccaacacattccatccatccaaggctaccagcagacaatccgcagaggcggcgcctccgggaacgtgatctcgcacagatccgacaagaatgtaggccaggcccatcgcgctgagttctacgtcgaatgcgatctacagttctcgcggcctacacctcgccacgtctacacagatacgactatcgtatttgcggagaaagtccatgactttaaaggccatgccggtcttcacaaaaacgttgagctctctggtttttcgagccccgatggcgggaagacctggcatatcaagaagctggtcgtgaagcagggagactgtacgcccgacggccgagctgggtcagtctttgctcttggctcggggacggcgactggtggcaatggtacggatatttga

SEQ ID NO: 1130 - protein, 252 aa, Muscodor strobelii
  misc_feature: SGI Peptide ID NO. 559967
  misc_feature (22)..(222): NCBI GI: 256723305 Blast Desc: NECHADRAFT_97189 [Nectria haematococca mpVI 77-13-4]
  misc_feature (22)..(224): NCBI GI: 67904660 Blast Desc: AN9317.2 [Aspergillus nidulans FGSC A4] gi|40747228|gb|EAA66384.1| AN9317.2 [Aspergillus nidulans FGSC A4] gi|259488152|tpe|CBF87391.1| TPA: conserved [Aspergillus FGSC
  misc_feature (1)..(220): NCBI GI: 46115884 Blast Desc: FG03784.1 [Gibberella zeae PH-1]
  misc_feature (22)..(223): NCBI GI: 255939850 Blast Desc: Pc16g03280 [Penicillium chrysogenum Wisconsin 54-1255] gi|211585317|emb|CAP92998.1| Pc16g03280 [Penicillium chrysogenum Wisconsin 54-1255]
  misc_feature (10)..(222): NCBI GI: 145234841 Blast Desc: An03g01670 [Aspergillus niger] gi|134057743|emb|CAK38140.1| protein product [Aspergillus niger]
  misc_feature (23)..(95): NCBI GI: 169778093 Blast Desc: [Aspergillus oryzae RIB40] gi|238495360|ref|XP_002378916.1| conserved [Aspergillus flavus NRRL3357] gi|83772249|dbj|BAE62379.1| protein product oryzae]
  misc_feature (33)..(222): NCBI GI: 256722849 Blast Desc: NECHADRAFT_87081 [Nectria haematococca mpVI 77-13-4]
  misc_feature (33)..(222): NCBI GI: 154296200 Blast Desc: BC1G_12927 [Botryotinia fuckeliana B05.10] gi|150843491|gb|EDN18684.1| BC1G_12927 [Botryotinia fuckeliana B05.10]
  misc_feature (18)..(228): NCBI GI: 238501204 Blast Desc: conserved [Aspergillus flavus NRRL3357] gi|220692073|gb|EED48420.1| conserved [Aspergillus flavus NRRL3357]
  misc_feature (4)..(215): NCBI GI: 256729252 Blast Desc: NECHADRAFT_84034 [Nectria haematococca mpVI 77-13-4]
MVQLSILVAAALTAAIPAHANGFGNGWDDRSETSWITHFSTNIVVPKAPSPQQDWLVLWPALQSPKALMQPILGSYNSPPCCAGNGQWCSFTYTLLLPSNTVKQGPTLVPVGAGTHLHIAIQHIPSIQGYQQTIRRGGASGNVISHRSDKNVGQAHRAEFYVECDLQFSRPTPRHVYTDTTIVFAEKVHDFKGHAGLHKNVELSGFSSPDGGKTWHIKKLVVKQGDCTPDGRAGSVFALGSGTATGGNGTDI

SEQ ID NO: 1131 - DNA, 918 bp, Muscodor strobelii
  misc_feature: SGI EST ID NO. CUFF.3104.0
  misc_feature: Variant of the nucleotide sequence at SEQ ID NO 1129
cgagcgcatttccatccacatgatggaaatcaacatgtttcttcaaaagtcctaagaatatggaccttcggtgaagttgtaaatatataatatgtatgtttcgcttagattcacgaaacacgattcgggaggacatcaagtcgcctcattgtcaccctgaacactcacaacacttatcacactgaagcggatatttccagaacaccatggtccaactctctatcctcgtagccgccgcgctgacagcggccatacctgctcacgcaaacggtttcggcaatggctgggacgaccgaagcgaaacctcctggattacacacttctcgaccaacattgtcgtacccaaggcacccagcccacaacaggactggctagtcctctggcccgcgctccagtccccaaaagctctcatgcagcccattctagggagttacaacagcccaccctgttgcgcaggcaacggtcaatggtgttcattcacatacacactcctcctcccgtccaacacagtcaagcaaggcccgaccctagtccccgtcggggcaggcacacatctccacatcgccatccaacacattccatccatccaaggctaccagcagacaatccgcagaggcggcgcctccgggaacgtgatctcgcacagatccgacaagaatgtaggccaggcccatcgcgctgagttctacgtcgaatgcgatctacagttctcgcggcctacacctcgccacgtctacacagatacgactatcgtatttgcggagaaagtccatgactttaaaggccatgccggtcttcacaaaaacgttgagctctctggtttttcgagccccgatggcgggaagacctggcatatcaagaagctggtcgtgaagcagggagactgtacgcccgacggccgagctgggtcagtctttg

SEQ ID NO: 1132 - DNA, 1347 bp, Muscodor strobelii
  misc_feature: SGI cDNA ID NO. 559968
  misc_feature: Encodes the peptide sequence at SEQ ID NO 1133
atgttggtatctcatcgggacaactccaatttcacccgtgcgcaatggaagaagagaataattctgccatgctgggccgttcaagttattgttatttgcgcgctgatagggatattttcttatcgtctctcacacactctagctacgtggaaagaagaggacgaaaaagggactgtgcccgtcgtggaacttgtctgggaagcggtcaatatcggattctcgctgatatcgctcgtcatcacactggtggcggtagcgagattcattgctgaggtcttaacgcctgttccattactattcggttgcatcttaaacgttgtgttatcgattgccgtgttggcactagatgttgtcatctatattcagcgatcagacaggaatttttcattaataggactcggtcttgacgctgccttaataatcttttctataatcccactattctatgcgataaagatataccgccgcctcttgacatacgacgactaccatttgccatacaatcacaaggggtatggatttgcaggtgccgaaggaggtgttgacgaggtgtcctcgatgtatacaatggaccaaatgcccccaactccctacgaccctacgaacgcatcatacggaaattcaacgacagtcactgtcgctcccgtagaatcacgatcgcgcgctagttctctatcacaagctagccgccgtatctcacagaccttcaacctcagcacctccccacaaccctcaccgccaatcccctcgccggccctcgatcagcgacgtacgagctacgaccacaaacgggacacgcagttcgaagactatctggcgcgacgacagagcacccgctctagcggccatgttcgaaacagctttgatagcagcaatatctctctacacgaagacgttaaacgagctatggggactgaatttggatggacagatagaccatcgcctccgggatccatgaagtcgagtaaatctggcgataaggttcgcccaggagccgcacatgcagtggacaggtcgcagcacggccctatcggacggcatgcaagcgtcgaggcgtttgtctcttcaccaaacccgatgggcagcccgagcctcacggtcacggtcacaacaccaccagatgagggcccacagcagcacggacatagtctgattatggttccggagtcacatgaggaagaggatcataatgaagcgctaccgaagagtggaaagccgcgagttggagacagtcgtaggtcgagcgggagtggaagtggcagagtaagcccgacaactcgcattgagcaagtggaagggcttgaagacgttgcgcttggagataggaaacgtagacgagactcatga

SEQ ID NO: 1133 - protein, 448 aa, Muscodor strobelii
  misc_feature: SGI Peptide ID NO. 559968
  misc_feature (2)..(283): NCBI GI: 261361210 Blast Desc: conserved [Verticillium albo-atrum VaMs.102]
  misc_feature (4)..(277): NCBI GI: 46125299 Blast Desc: FG07027.1 [Gibberella zeae PH-1]
  misc_feature (4)..(277): NCBI GI: 256733040 Blast Desc: [Nectria haematococca mpVI 77-13-4]
  misc_feature (7)..(140): NCBI GI: 116203655 Blast Desc: CHGG_09711 [Chaetomium globosum CBS 148.51] gi|88175839|gb|EAQ83307.1| CHGG_09711 [Chaetomium globosum CBS 148.51]
  misc_feature (13)..(165): NCBI GI: 171679445 Blast Desc: protein product [Podospora anserina] gi|170939348|emb|CAP64576.1| protein product [Podospora anserina]
  misc_feature (2)..(164): NCBI GI: 145606923 Blast Desc: [Magnaporthe grisea 70-15] gi|145014552|gb|EDJ99120.1| [Magnaporthe grisea 70-15]
  misc_feature (90)..(197): NCBI GI: 85094921 Blast Desc: NCU06116 [Neurospora crassa OR74A] gi|28921436|gb|EAA30742.1| [Neurospora crassa OR74A]
MLVSHRDNSNFTRAQWKKRIILPCWAVQVIVICALIGIFSYRLSHTLATWKEEDEKGTVPVVELVWEAVNIGFSLISLVITLVAVARFIAEVLTPVPLLFGCILNVVLSIAVLALDVVIYIQRSDRNFSLIGLGLDAALIIFSIIPLFYAIKIYRRLLTYDDYHLPYNHKGYGFAGAEGGVDEVSSMYTMDQMPPTPYDPTNASYGNSTTVTVAPVESRSRASSLSQASRRISQTFNLSTSPQPSPPIPSPALDQRRTSYDHKRDTQFEDYLARRQSTRSSGHVRNSFDSSNISLHEDVKRAMGTEFGWTDRPSPPGSMKSSKSGDKVRPGAAHAVDRSQHGPIGRHASVEAFVSSPNPMGSPSLTVTVTTPPDEGPQQHGHSLIMVPESHEEEDHNEALPKSGKPRVGDSRRSSGSGSGRVSPTTRIEQVEGLEDVALGDRKRRRDS

SEQ ID NO: 1134 - DNA, 1627 bp, Muscodor strobelii
  misc_feature: SGI EST ID NO. CUFF.3114.0
  misc_feature: Variant of the nucleotide sequence at SEQ ID NO 1132
gctttgcccagatggagttggcttgggcgaacaacaaggcaaatcggtctgatccaattccgagaaaaggtcagcgcccacttgcctggacagaacctaggtactcctaattgtcattataatggatttccctcaggacttcgaatatgcatggtgtaattcagtgcttatctctttctgtctccatgctagccggggcgtacctagtccagtgccatccaatttcgccaggaatattgcctggtttgccattgtttgtcacttgtacgagtacgtcgtgacactgcaccaagctgtgcaatgggcgatggatgcttgcgtgctgtgaggctatgtagatatccactgagctgagctgagctagacacgttcgtcgatcctagacccgatcattggctcccgtcttccgatatatatgtagaaaaagaccagtccatcgctgctcttgcgagctgctctattcgccgctgggcttgacgtcgccaccaaacaccacgcctttctcctaacgcacgcaccaaataatcgtacacgaatcaatgacattaaaacaacgatgatgataatgagtatctcgcaacactaaagtacaaacgagtcagagggccacgattcggaagaggaaacttgagaactgcaatttgggagtgacccaacacgatctcgacctgagagctactcctagcagcacagggtcaaagtcgtatcaacatcgcgacctgaagcgtcatatctgagactcacaatacgaaagccataatgttggtatctcatcgggacaactccaatttcacccgtgcgcaatggaagaagagaataattctgccatgctgggccgttcaagttattgttatttgcgcgctgatagggatattttcttatcgtctctcacacactctagctacgtggaaagaagaggacgaaaaagggactgtgcccgtcgtggaacttgtctgggaagcggtcaatatcggattctcgctgatatcgctcgtcatcacactggtggcggtagcgagattcattgctgaggtcttaacgcctgttccattactattcggttgcatcttaaacgttgtgttatcgattgccgtgttggcactagatgttgtcatctatattcagcgatcagacaggaatttttcattaataggactcggtcttgacgctgccttaataatcttttctataatcccactattctatgcgataaagatataccgccgcctcttgacatacgacgactaccatttgccatacaatcacaaggggtatggatttgcaggtgccgaaggaggtgttgacgaggtgtcctcgatgtatacaatggaccaaatgcccccaactccctacgaccctacgaacgcatcatacggaaattcaacgacagtcactgtcgctcccgtagaatcacgatcgcgcgctagttctctatcacaagctagccgccgtatctcacagaccttcaacctcagcacctccccacaaccctcaccgccaatcccctcgccggccctcgatcagcgacgtacgagctacgaccacaaacgggacacgcagttcgaagactatctggcgcgacgacagagcacccgctctagcggccatgttcgaaacagctttgata

SEQ ID NO: 1135 - DNA, 990 bp, Muscodor strobelii
  misc_feature: SGI cDNA ID NO. 559969
  misc_feature: Encodes the peptide sequence at SEQ ID NO 1136
atgtcccgctacgcagaaacattcaaagacccccgagggcctggtgatgatcgccctacagctcttcagatcatcaaagatgaggaacgcgtgatggacatggaaaacaaggttttcatcattactgggtgctcttccggtctggggatcgaaacggcacgtgctctcgcagcgacgggtggccgtgtatatggtctcgtacggaatatggatgccgcgagggaagcatgtgcttcattcctcgagaccggccgcgttgaactcatagcctgcgatctatcttctctcgattctgttcgcacggccgtcgccgagttcaagtcaagatcatccacgctcaacgtgcttgttgccaacgccgccgtcatgtcaatcccgcaacgtgaggtgtcagtagacggcttcgaaaaacacctagccacgaactatctcggccactttttgttgttttatctgttgaaagacatgatgatccagtcggcaacacccgaatttgcgtcacgactggtgcaagtgtcgagcggcagccatcatgtttccgagatcaagttcgatgacattaacttgaatgagacttacgatccgaaggcggcttacgcgcaagcaaagctggcacaaatttaccttgccaattacgttgataggcatttcgggtcacagggtatccgtggattgagcttgatgcctggtggtattcggactaatatcctgcgttacgtgcccactgctcttgtcgacaagatgatggctgcaaatgagttcttgcaaaaatggtataagagcccggagcaaggtgccgctacaacagtcatagctgccgttggacgggagtatgagggcaaaggaggcgtgtatcttgaggattgtgcagtggctcagactcatctaattattccacaggtccgcggagtgaaagagtacgcattcgatgttgagaagcaagagaggctttggcaagttactttagacctgttgaagcttagaacttga

SEQ ID NO: 1136 - protein, 329 aa, Muscodor strobelii
  misc_feature: SGI Peptide ID NO. 559969
  misc_feature (37)..(183): Pfam Id: PF00106 Pfam Desc: short chain dehydrogenase
  misc_feature (37)..(176): Pfam Id: PF00106 Pfam Desc: short chain dehydrogenase
  misc_feature (1)..(327): NCBI GI: 119173201 Blast Desc: CIMG_10118 [Coccidioides immitis RS]
  misc_feature (1)..(327): NCBI GI: 240111776 Blast Desc: oxidoreductase,short chain dehydrogenase, [Coccidioides posadasii C735 delta SOWgp]
  misc_feature (2)..(327): NCBI GI: 225558401 Blast Desc: short-chain dehydrogenase [Ajellomyces capsulatus G186AR]
  misc_feature (2)..(327): NCBI GI: 240274834 Blast Desc: short-chain dehydrogenase [Ajellomyces capsulatus H143]
  misc_feature (3)..(327): NCBI GI: 255931831 Blast Desc: Pc12g06300 [Penicillium chrysogenum Wisconsin 54-1255] gi|211582091|emb|CAP80257.1| Pc12g06300 [Penicillium chrysogenum Wisconsin 54-1255]
  misc_feature (2)..(328): NCBI GI: 169773903 Blast Desc: [Aspergillus oryzae RIB40] gi|238491930|ref|XP_002377202.1| short-chain dehydrogenase/reductase, [Aspergillus flavus NRRL3357] protein
  misc_feature (2)..(327): NCBI GI: 154314108 Blast Desc: BC1G_04997 [Botryotinia fuckeliana B05.10] gi|150849143|gb|EDN24336.1| BC1G_04997 [Botryotinia fuckeliana B05.10]
  misc_feature (2)..(328): NCBI GI: 145236972 Blast Desc: An07g00400 [Aspergillus niger] gi|134075598|emb|CAK39264.1| protein product [Aspergillus niger]
  misc_feature (1)..(327): NCBI GI: 256721804 Blast Desc: NECHADRAFT_97586 [Nectria haematococca mpVI 77-13-4]
  misc_feature (3)..(327): NCBI GI: 256734856 Blast Desc: NECHADRAFT_75545 [Nectria haematococca mpVI 77-13-4]
  misc_feature (40)..(327): SWISSPROT Homolog: EC 1.3.1.33 Protochlorophyllide reductase
MSRYAETFKDPRGPGDDRPTALQIIKDEERVMDMENKVFIITGCSSGLGIETARALAATGGRVYGLVRNMDAAREACASFLETGRVELIACDLSSLDSVRTAVAEFKSRSSTLNVLVANAAVMSIPQREVSVDGFEKHLATNYLGHFLLFYLLKDMMIQSATPEFASRLVQVSSGSHHVSEIKFDDINLNETYDPKAAYAQAKLAQIYLANYVDRHFGSQGIRGLSLMPGGIRTNILRYVPTALVDKMMAANEFLQKWYKSPEQGAATTVIAAVGREYEGKGGVYLEDCAVAQTHLIIPQVRGVKEYAFDVEKQERLWQVTLDLLKLRT

SEQ ID NO: 1137 - DNA, 2589 bp, Muscodor strobelii
  misc_feature: SGI EST ID NO. CUFF.3188.0
  misc_feature: Variant of the nucleotide sequence at SEQ ID NO 1135
gccgccttctgcctcggattttcccgaccctgattggtccaaaatcaagagcccctacacaactgttgagcgcatcttatcggcaatgctcctactcttgcatcctgtattgcctaattcatctcgccgatctcacacacgtatcctacgaccaattttcacgtcattccaggctggagaatctcttctgctagaaggtccctatggaacccatgagcttcggcgccagcgccggacaaaagatcaataatgatggatttgacaaagcatataaagagctgcaaagttccgaacatatcgcctggatttgaatgaacaatcatctacacattttcgacgcattaaaccagccgcttctcaagctccaaatttgcttcaccatgtcccgctacgcagaaacattcaaagacccccgagggcctggtgatgatcgccctacagctcttcagatcatcaaagatgaggaacgcgtgatggacatggaaaacaaggttttcatcattactgggtgctcttccggtctggggatcgaaacggcacgtgctctcgcagcgacgggtggccgtgtatatggtctcgtacggaatatggatgccgcgagggaagcatgtgcttcattcctcgagaccggccgcgttgaactcatagcctgcgatctatcttctctcgattctgttcgcacggccgtcgccgagttcaagtcaagatcatccacgctcaacgtgcttgttgccaacgccgccgtcatgtcaatcccgcaacgtgaggtgtcagtagacggcttcgaaaaacacctagccacgaactatctcggccactttttgttgttttatctgttgaaagacatgatgatccagtcggcaacacccgaatttgcgtcacgactggtgcaagtgtcgagcggcagccatcatgtttccgagatcaagttcgatgacattaacttgaatgagacttacgatccgaaggcggcttacgcgcaagcaaagctggcacaaatttaccttgccaattacgttgataggcatttcgggtcacagggtatccgtggattgagcttgatgcctggtggtattcggactaatatcctgcgttacgtgcccactgctcttgtcgacaagatgatggctgcaaatgagttcttgcaaaaatggtataagagcccggagcaaggtgccgctacaacagtcatagctgccgttggacgggagtatgagggcaaaggaggcgtgtatcttgaggattgtgcagtggctcagactcatctaattattccacaggtccgcggagtgaaagagtacgcattcgatgttgagaagcaagagaggctttggcaagttactttagacctgttgaagcttagaacttgacataaccatgcaagacaaccggcacactctgtacgatcctagaaatagctcgaatccagcgtgccccaattcatcactccttattgtttagtatgggcgatatggacttctagcaacagatctgattcactattgcaacacgacattacgacttaactggtccgtattcatctctagtcattttagccttacgtgcgtacacatcaagtcaattgttgtgtggaagtgggtctatcgacaccgttcttgattgctgctattatttactttgtcttgccctctaaaaggtgtatcgcgagattcggcgctgatcatggtgcgcacattggtatatttgctcaagggagccatcgtggcataacccgcagaggccgactgttggttgactcgaatgtgtaatcatcctgtaatagccatcccactttcttcttgggccgatgtctttcctgctctccgatgccatttcttaagtttgcatcactgacgggctcataggccagagtcggtggcagccttgtagactttcgtggagtcgaatggaacgacatttccagatgcatccgtcatcgcaccagtttggacagtgacactgttctgccgagggacttttactgatgaatatgtcagtcataattatagtcttcgaagatgattttaagctgaacgtaccgaactggcccatggcaacggtgaagagggcaaagatagcgactgagtacttcattttgaatgagatttgttgatgcttcgaagctaaatgagagatagaggtcggccggcgacgagcaagtcaagtatgtatacgaagaagaaagaaagcttgttattgaaatggatagagagatgagaaaacaaccttggcaaaggcggctgcatctatgtttttgtatggctatgcgaccccattactccggctgatcagtgcgaaagcttttgctttcaaaggggctatacacggcgccccgtcatactgatcttcgacaacaataagcagtgctgagacagaaccgagaggctgacaacattgaagccagaaacaaaccttggctaaacatgatcagatcctagctcggcaaagattcaagattgcaggtatcaagattcaaaataaacaatcggcatatccagagaatagtgacgtctcattggccaaggtggtttagtttgcatcatgcccaaaatttagagcaacggcttggcctgtcgtgtttcatggccg

SEQ ID NO: 1138 - DNA, 1338 bp, Muscodor strobelii
  misc_feature: SGI cDNA ID NO. 559970
  misc_feature: Encodes the peptide sequence at SEQ ID NO 1139
atgtctacaattgacctaggtgcggtcgaccttcttgccaacacgcgatactctgtcttgctgtctagtggcaaacgcatcatcttatttcgactaccacagatcaaggctatgaatgaatcattcataggccatagggatgaatggagttactatgctatggaggctcaatgtcctcatgccggtggacccatggccgaagctcaagttgacattgaggactcgtcgtactacgttgcgtcatgtccatggcatgcgtatgatttcaatcttgagactggcgagtcaagctatggtctcaaagcctgcacatttcctgttgatatccaagctggtcgagtaatattgcgatttccggaagcaggagtgcggctatcaaaaattgagccggtgagcgagaaggtcaagttcaagcatggccgagagaaaagtacaaccccgtcacactacttgagtgacgatgccacactgtgcgaatggtgtgcacatattctaaatactcccgaccctgagcagaagattgaacttacgacacatctcttctcgttatttgctacacgggaacagtcactgtcacccatgccactgggtgcaggcactgttacagcccctgaagagcctccgcgcaccgatctgcggcaggtcaatcctgggcagatgcctaaagctgggaagggtggtaccctcaagagcaggatcaccatgttacatgctctcgctaacattgagcaatgggcaatcgacctagcgattgatatatgtgtgagattcgccaccgccaccttctctaccactgctagcgaccactcgctaccccggaatctaccacggactttctactatgattggctcaaagtagctaacgatgaagcaaaacacttctcactactacgtgctaggcttgaagaacttgggagccatttcggagcattgccagtccatcatggactttgggagtctgctgcgagaacaagccacgatttacgggcgcgaatcagcgtcatagcgctcgtccacgaagctcggggtttggacgtcaatccgcttacaatcgagaagttccgggtcgcaaaagatcatgagagtgtggacgtcatgaatatcatccataacgatgagatcacccatgtcacaacaggccataggtggttgacgtggatatgtcaacaagaaggtaccgatcctgttcaagttttcagacgcaatgttcaaacccatttctacggtgcactcaaaggaccgttcaatacggatgcgcgacttcaggctgggatggacagaagctactacgaaaatctccgaggacagccgggaggagaggtcatagctgggggataa

SEQ ID NO: 1139 - protein, 445 aa, Muscodor strobelii
  misc_feature: SGI Peptide ID NO. 559970
  misc_feature (165)..(438): Pfam Id: PF04305 Pfam Desc: Domain of function (DUF455)
  misc_feature (25)..(112): Pfam Id: PF00355 Pfam Desc: Rieske [2Fe-2S] domain
  misc_feature (204)..(438): Pfam Id: PF04305 Pfam Desc: Domain of function (DUF455)
  misc_feature (50)..(95): Pfam Id: PF00355 Pfam Desc: Rieske [2Fe-2S] domain
  misc_feature (1)..(436): NCBI GI: 159123391 Blast Desc: conserved [Aspergillus fumigatus A1163]
  misc_feature (1)..(436): NCBI GI: 119483184 Blast Desc: NFIA_027970 [Neosartorya fischeri NRRL 181] gi|119409775|gb|EAW19723.1| conserved [Neosartorya fischeri NRRL 181]
  misc_feature (1)..(436): NCBI GI: 70986703 Blast Desc: Rieske [2Fe-2S] domain protein [Aspergillus fumigatus Af293] gi|66846471|gb|EAL86803.1| Rieske [2Fe-2S] domain protein [Aspergillus fumigatus Af293]
  misc_feature (4)..(432): NCBI GI: 255931955 Blast Desc: Pc12g06970 [Penicillium chrysogenum Wisconsin 54-1255] gi|211582153|emb|CAP80324.1| Pc12g06970 [Penicillium chrysogenum Wisconsin 54-1255]
  misc_feature (1)..(433): NCBI GI: 67900754 Blast Desc: AN7364.2 [Aspergillus nidulans FGSC A4] gi|40742545|gb|EAA61735.1| AN7364.2 [Aspergillus nidulans FGSC A4] gi|259483279|tpe|CBF78536.1| TPA: beta-1,4-xylosidase FGSC
  misc_feature (1)..(436): NCBI GI: 121711785 Blast Desc: DUF455 domain protein [Aspergillus clavatus NRRL 1] gi|119401659|gb|EAW12082.1| DUF455 domain protein [Aspergillus clavatus NRRL 1]
  misc_feature (1)..(437): NCBI GI: 238492433 Blast Desc: Rieske [2Fe-2S] domain protein [Aspergillus flavus NRRL3357] gi|220695947|gb|EED52289.1| Rieske [2Fe-2S] domain protein [Aspergillus flavus NRRL3357]
  misc_feature (1)..(433): NCBI GI: 115400375 Blast Desc: conserved [Aspergillus terreus NIH2624] gi|114191442|gb|EAU33142.1| conserved [Aspergillus terreus NIH2624]
  misc_feature (3)..(431): NCBI GI: 242771557 Blast Desc: Rieske [2Fe-2S] domain protein [Talaromyces stipitatus ATCC 10500] gi|218721485|gb|EED20903.1| Rieske [2Fe-2S] domain protein [Talaromyces stipitatus ATCC 10500]
  misc_feature (3)..(432): NCBI GI: 225683077 Blast Desc: conserved [Paracoccidioides brasiliensis Pb03]
MSTIDLGAVDLLANTRYSVLLSSGKRIILFRLPQIKAMNESFIGHRDEWSYYAMEAQCPHAGGPMAEAQVDIEDSSYYVASCPWHAYDFNLETGESSYGLKACTFPVDIQAGRVILRFPEAGVRLSKIEPVSEKVKFKHGREKSTTPSHYLSDDATLCEWCAHILNTPDPEQKIELTTHLFSLFATREQSLSPMPLGAGTVTAPEEPPRTDLRQVNPGQMPKAGKGGTLKSRITMLHALANIEQWAIDLAIDICVRFATATFSTTASDHSLPRNLPRTFYYDWLKVANDEAKHFSLLRARLEELGSHFGALPVHHGLWESAARTSHDLRARISVIALVHEARGLDVNPLTIEKFRVAKDHESVDVMNIIHNDEITHVTTGHRWLTWICQQEGTDPVQVFRRNVQTHFYGALKGPFNTDARLQAGMDRSYYENLRGQPGGEVIAGG

SEQ ID NO: 1140 - DNA, 2376 bp, Muscodor strobelii
  misc_feature: SGI EST ID NO. CUFF.3128.0
  misc_feature: Variant of the nucleotide sequence at SEQ ID NO 1138
cagaatcttggcactcatgtgcgtatattacctatactatgatcaagccactgtgccagggctcatgtcgatacggtcgcaaggggctcaaaactcatcttcaaaacatcgagaacgcgtcagtcagaactcggattttagtaacgctaagctcagcttgtctcttgctcaattctagtgagcatggactgcgtcgcagaatgcgtagatggattgtgggtggaatcgatagcgaaagaccaaccagaccaccgcacgcgtcgtcccttcttttggcacatgtagtcaggcatccagccgcaaattttaagggttcatcccatacacttcagcctgcgtgacttgctgagccacaattttacactgctaagccactttgaaatctcgaatctgaaaccaggtagattaggtaggtatcggtcgtccattgaagccactgtttagaggtgcgagagaggtgttcactaaacaccatgcatccgaacaacaagccccggccgtcatgaaaatatgcagtgacgcgcaacaaatctgaactacattctacattaacctgatcccgatcatcatgcttgaactccacaatccgaatcgatcgagcccgtgttaaaatttagataggctaggaggtgtaaccatttccgaatctgcccatgatgtctacaattgacctaggtgcggtcgaccttcttgccaacacgcgatactctgtcttgctgtctagtggcaaacgcatcatcttatttcgactaccacagatcaaggctatgaatgaatcattcataggccatagggatgaatggagttactatgctatggaggctcaatgtcctcatgccggtggacccatggccgaagctcaagttgacattgaggactcgtcgtactacgttgcgtcatgtccatggcatgcgtatgatttcaatcttgagactggcgagtcaagctatggtctcaaagcctgcacatttcctgttgatatccaagctggtcgagtaatattgcgatttccggaagcaggagtgcggctatcaaaaattgagccggtgagcgagaaggtcaagttcaagcatggccgagagaaaagtacaaccccgtcacactacttgagtgacgatgccacactgtgcgaatggtgtgcacatattctaaatactcccgaccctgagcagaagattgaacttacgacacatctcttctcgttatttgctacacgggaacagtcactgtcacccatgccactgggtgcaggcactgttacagcccctgaagagcctccgcgcaccgatctgcggcaggtcaatcctgggcagatgcctaaagctgggaagggtggtaccctcaagagcaggatcaccatgttacatgctctcgctaacattgagcaatgggcaatcgacctagcgattgatatatgtgtgagattcgccaccgccaccttctctaccactgctagcgaccactcgctaccccggaatctaccacggactttctactatgattggctcaaagtagctaacgatgaagcaaaacacttctcactactacgtgctaggcttgaagaacttgggagccatttcggagcattgccagtccatcatggactttgggagtctgctgcgagaacaagccacgatttacgggcgcgaatcagcgtcatagcgctcgtccacgaagctcggggtttggacgtcaatccgcttacaatcgagaagttccgggtcgcaaaagatcatgagagtgtggacgtcatgaatatcatccataacgatgagatcacccatgtcacaacaggccataggtggttgacgtggatatgtcaacaagaaggtaccgatcctgttcaagttttcagacgcaatgttcaaacccatttctacggtgcactcaaaggaccgttcaatacggatgcgcgacttcaggctgggatggacagaagctactacgaaaatctccgaggacagccgggaggagaggtcatagctgggggataatcaaaggtcgaaacttgcctaagaaaacgcaaggcttagtgtgataggctatagtcccttcgaacctctcggcgtcgtgatgcctctggagggaatagcaaacacgaattgacgttctagcaacgttggacatttccgtcggctatatatatgcgtgaaacacaaaaggtagccggtcaacgcgagtcaagtttacctcctatgaacaggatagtagcgctcctattgtaggcatgcgtcgcttttgtggcctattcattcagcctttcggagtcaagtcgacatgtttcttggagcatgatacggaggtttagagatgtatatatactagcgttcctcgcctgtctattcagtagttagttaaaaaatcatttcattatcg

SEQ ID NO: 1141 - DNA, 690 bp, Muscodor strobelii
  misc_feature: SGI cDNA ID NO. 559971
  misc_feature: Encodes the peptide sequence at SEQ ID NO 1142
atggcaaccaacgacagccttgtcgcaatcgccgagaaagaacgcgctcgtctcgataacttctatcggaaatacgaagagcttcgacggcaagggtggccattctcgggggtaagaaccactgcgcacaatgctggagaaaaagtcgattctggcaacacacagatccagctgaagcggcccacgaacaagaggcaggtcgaacgagacgatgacgacaacggaggagaggcaaagagggccaaggttgccgctgtcatgactgatgaggagatcgcagagcacaacgccaagactccagatttggacaaaaaccttaccaaacttttcagtcaatacactgcagagctgaataaggaactggatgatgtgagcagaaacctagaggcgaaaatgaacgaagacatcaccaacatcaaagctgagctcagggatatgctcaaggttcaactgaaggatacgctcaaggttcaactcttgactaaactcaaggccgagatcaagtttcaactcatggatgaactcaaggctgagctgaaggacgagatcaaagctgagctcgaggcagagcttaaggctgctgtcagagctgacgtggatgaccttagggataagttttcgggttgggctgcgagggcccatagaggtatggacattctactggatgagctggatgggaggcgacgataa

SEQ ID NO: 1142 - protein, 229 aa, Muscodor strobelii
  misc_feature: SGI Peptide ID NO. 559971
  misc_feature (133)..(199): NCBI GI: 124505183 Blast Desc: ATP-dept. acyl-coa synthetase [Plasmodium falciparum 3D7] gi|23498141|emb|CAD49109.1| acyl-CoA synthetase, PfACS6 [Plasmodium falciparum 3D7]
MATNDSLVAIAEKERARLDNFYRKYEELRRQGWPFSGVRTTAHNAGEKVDSGNTQIQLKRPTNKRQVERDDDDNGGEAKRAKVAAVMTDEEIAEHNAKTPDLDKNLTKLFSQYTAELNKELDDVSRNLEAKMNEDITNIKAELRDMLKVQLKDTLKVQLLTKLKAEIKFQLMDELKAELKDEIKAELEAELKAAVRADVDDLRDKFSGWAARAHRGMDILLDELDGRRR

SEQ ID NO: 1143 - DNA, 2949 bp, Muscodor strobelii
  misc_feature: SGI cDNA ID NO. 559972
  misc_feature: Encodes the peptide sequence at SEQ ID NO 1144
atgtcgtcccatggcggctctcaagccggaggacgttcctcccggccctcgtctcgtccaggttctcaagccggttctcccccccgaccttccacacaggtgccaactggcccgacccctggattccgtggcgaccccgccaggaaggagttgactccaactcaaatcattggcaagcgtgttgacctgcctgcagatgcttatctcagtgcaactaacaagcaccgttttactgtccgtcctggcttcaacactaccggcatggagatccaggtccagctcaacgtcttctctatcttgagctatggtaaccaggacatctaccagtacgacattgctttgtccccctgcgacgagaacacctcgcgcggaaagtacaagaaatgttggatggaccaggtcgttcaggaattcattgcccaaagcggtggtgtctggatttacgacggccacaagcaagcctggtgctcaaagcccatccgcgaggcacgtatgaaagttgatctcgatcgcaaccatcccaaccccaagaaaagaaacgggaagggcgtcagctatgtcatgatcaagccgaccacaaagatcagactttcataccttgagcagtatctcaggggtactactccctgggacgagcaggttttgcaggcaatgaacttcctggaccactgcatgagacagggtccgtccgagagaatggtcgccatcaagcgtaacttctaccccgctgatgccaaaaccatgaaactcggcgagtatctgcaggttcgaaagggcctctattcggcttttagacttagcgagtccatcaagtccggtggcacaggcctcatggtcaatgtggacgtcgccaacactgctttctggctgcctttgtccatggccgacgttgcaatgcatctaattcaggagggcaaccccaaattcgccaggaaacgagtgacaatggccgacgttatccagggcttgcttcccatccgagaccaagatgctggcttcaagaagtcacctgatttcctgctcatgaagaagttggaccgagtgaagttcaccgtcacccatcgcaacaaacaggacaacaatcaggtttacacctgcaagtatctgctgttcgagaagaaatatggcgaacgtggcgtcaatgcccacacacacacgttcgacttgaaacagccagacggcacaaccagaaagatgtccatcttccagtatttccagatgaagtacaacattcgcctgcgttttcctgatctgccccttgtctatactgacaggtatggtacatttccgatggaggtctgcaccatcgcgaaagatcagcgatacccatacaagttgaacgcagatcagacttcctcgatgatcaagttcgccgtgacccctccacccgttcgcaagggcgatatcatgtccagtgctcaggccctgagtttccagaccgaccgctacttgagagaattcgatgtcaaggttgactctaacatgagggtcaccaaggcccgcctccttcagggcccgcagatcatatttggcggcgctggcgacaaggcaaactgcgatcccaagcgaatgggcttcaagtgggacatcagaggcagacgtttcctcgagcccaatactcgaaagctcaccgcgtggggcttcatcatctgcggcggttgtgtcgcaaaggatcaagccgaggcattcgccagcaagtttacctcaagttatcgtggatacggtggccaaatcatggccaatcctgccgtcgtcgaggttcctttcaatacggactacggtgagatcgtcgcgagaggacgccgtctgataggggaacgcttcaagcagatgcctgagttcatcttcatcgttgtcccagacaagaactctactgcatatgagcgcatcaagaagagcatggactgccgttttatcacaccttcacaagttcttcagcgcgaccacgtctccaaaggcaaccttcagtatatcggcaatgtctgcatgaaagtaaatgcaaagctcggtggcgtcacttgcagggtcaaacccgctgttgccaacaaaggcccattcagcattcccacaatgatcattggagctgatgtttcccacggctctccaggctcgggtcaaccttccatggccgcgatgagcgtgtctatggacaagttcgcgacaaaatatgctggagtctgtcagaccaacagttaccgtactgagatcatcataggagagcacctgaaagccatgctcaagaaacacgtcaacaattggagggctatcaacggatgcgaccccaagcacatctattacttccgtgatggagttgacgaaggctctttcgacgccgtcttgaggaccgaaatcggagccctcgaggatctgctaaagtctctcaacatgtctagaccacatatcaccgtcatcattgccaccaagcgacaccatattcgctttttccccaagccgggcgacaagaagactggcgataacaatggaaacccattgccgggaacccttgtcgaacgggactgcacgcatccttaccacttcgacttctacatgtgctctcatgtagccatcaagggcaccgcgcgaccggtgcactacaacgtcattcgagatgacgccaagatctctcccgatgctctacagaagatgatctatgagcaatgctaccagtattgtcgatccacgacaattgtctctcttcacccggccgtgtactatgctcatctgatttccaaccgtgctcgatctcatgagaatatccacgcgagccagagagagcttcccatgttgaagggcggccaccccgtcgccaaagcaggctcagatgtctactcggaccattctaggcaccagcctggtgttgaagctcctccagtgctcgagatgattggcgagcaaaatgcaaacggcgcagacatcaagttcatgaataccactatgtggtacgtttaa

SEQ ID NO: 1144 - protein, 982 aa, Muscodor strobelii
  misc_feature: SGI Peptide ID NO. 559972
  misc_feature (234)..(291): Pfam Id: PF08699 Pfam Desc: Domain of function (DUF1785)
  misc_feature (330)..(461): Pfam Id: PF02170 Pfam Desc: PAZ domain
  misc_feature (614)..(918): Pfam Id: PF02171 Pfam Desc: Piwi domain
  misc_feature (381)..(461): Pfam Id: PF02170 Pfam Desc: PAZ domain
  misc_feature (2)..(982): NCBI GI: 39940842 Blast Desc: MGG_11029 [Magnaporthe grisea 70-15] gi|145010371|gb|EDJ95027.1| MGG_11029 [Magnaporthe grisea 70-15]
  misc_feature (5)..(982): NCBI GI: 262215895 Blast Desc: argonaute-like protein [Cryphonectria parasitica]
  misc_feature (6)..(918): NCBI GI: 85090790 Blast Desc: NCU09434 [Neurospora crassa OR74A] gi|23452214|gb|AAN32951.1| suppressor of meiotic silencing [Neurospora crassa] gi|28919960|gb|EAA29350.1| [Neurospora crassa
  misc_feature (26)..(982): NCBI GI: 46105440 Blast Desc: FG00348.1 [Gibberella zeae PH-1]
  misc_feature (40)..(982): NCBI GI: 256734604 Blast Desc: NECHADRAFT_65720 [Nectria haematococca mpVI 77-13-4]
  misc_feature (59)..(917): NCBI GI: 154310037 Blast Desc: BC1G_06939 [Botryotinia fuckeliana B05.10] gi|150851727|gb|EDN26920.1| BC1G_06939 [Botryotinia fuckeliana B05.10]
  misc_feature (1)..(982): NCBI GI: 261355027 Blast Desc: argonaute [Verticillium albo-atrum VaMs.102]
  misc_feature (80)..(961): NCBI GI: 258563942 Blast Desc: conserved [Uncinocarpus reesii 1704] gi|237908223|gb|EEP82624.1| conserved [Uncinocarpus reesii 1704]
  misc_feature (80)..(922): NCBI GI: 240108173 Blast Desc: Piwi domain containing protein [Coccidioides posadasii C735 delta SOWgp]
  misc_feature (80)..(982): NCBI GI: 119187499 Blast Desc: CIMG_03797 [Coccidioides immitis RS]
MSSHGGSQAGGRSSRPSSRPGSQAGSPPRPSTQVPTGPTPGFRGDPARKELTPTQIIGKRVDLPADAYLSATNKHRFTVRPGFNTTGMEIQVQLNVFSILSYGNQDIYQYDIALSPCDENTSRGKYKKCWMDQVVQEFIAQSGGVWIYDGHKQAWCSKPIREARMKVDLDRNHPNPKKRNGKGVSYVMIKPTTKIRLSYLEQYLRGTTPWDEQVLQAMNFLDHCMRQGPSERMVAIKRNFYPADAKTMKLGEYLQVRKGLYSAFRLSESIKSGGTGLMVNVDVANTAFWLPLSMADVAMHLIQEGNPKFARKRVTMADVIQGLLPIRDQDAGFKKSPDFLLMKKLDRVKFTVTHRNKQDNNQVYTCKYLLFEKKYGERGVNAHTHTFDLKQPDGTTRKMSIFQYFQMKYNIRLRFPDLPLVYTDRYGTFPMEVCTIAKDQRYPYKLNADQTSSMIKFAVTPPPVRKGDIMSSAQALSFQTDRYLREFDVKVDSNMRVTKARLLQGPQIIFGGAGDKANCDPKRMGFKWDIRGRRFLEPNTRKLTAWGFIICGGCVAKDQAEAFASKFTSSYRGYGGQIMANPAVVEVPFNTDYGEIVARGRRLIGERFKQMPEFIFIVVPDKNSTAYERIKKSMDCRFITPSQVLQRDHVSKGNLQYIGNVCMKVNAKLGGVTCRVKPAVANKGPFSIPTMIIGADVSHGSPGSGQPSMAAMSVSMDKFATKYAGVCQTNSYRTEIIIGEHLKAMLKKHVNNWRAINGCDPKHIYYFRDGVDEGSFDAVLRTEIGALEDLLKSLNMSRPHITVIIATKRHHIRFFPKPGDKKTGDNNGNPLPGTLVERDCTHPYHFDFYMCSHVAIKGTARPVHYNVIRDDAKISPDALQKMIYEQCYQYCRSTTIVSLHPAVYYAHLISNRARSHENIHASQRELPMLKGGHPVAKAGSDVYSDHSRHQPGVEAPPVLEMIGEQNANGADIKFMNTTMWYV

SEQ ID NO: 1145 - DNA, 3306 bp, Muscodor strobelii
  misc_feature: SGI cDNA ID NO. 559973
  misc_feature: Reduced expression when VOC is produced
  misc_feature: Encodes the peptide sequence at SEQ ID NO 1146
atggcatcagaggctccagaggagacttggtctcaggagctcgaagacggagtcgagaatagcgaccagcagcatgtggaagacggtgcagacgagcaggaggcttactcccccacacagcccgacctcgccaacgactctgatgcttcagtggacatggtcggggatgaggaggaagacgaagactccgccgagtatgacccagagtacgatcctgaatccgtatctctccaaggcgctccatacgaccccgaagctaccgctgcggcgcaacctctcctcgccctccctattcccgaagagcgcagcgcatctgcagcttcatcccgacctgcgaagaaacccaagacagctggaggcttcctcgtgggatcctctgacgacgaagacgatgcccacaaccctccctcacgcgcttcggtccccaccacccagatacctgcggctatcgatgcgcaagcccacactctcactcactctcccctccaacagtccaacaccgccccagaagctgcctccttccagtcactccagccacccaatggcgcccaaagcgctacagtcgatcaagctgccgttgacgccgctgcaccagtctcgaaatcccggcttcctgccgatatcatagggtctctggaagatcgtgtgcaggaagaccccaagggcgacacggatgcctggttcacgctgattggcgagttcaagcgccgccatcaggtcgttgatgcgagaaatgtctatgagcggttcttcgaggtgttccctcaagcagctgagatctgggttgaatacctggacatggaactcaatctcgaaaacttccccgatgccgaggctctctttggccgcactctattctccgtccctcacgtatccatgtggactgcctatctcgactacatccgccgtcgaaacgatctgctcaacgatccctccggccaggcccgacagacggtcagccaagcttacgagtttgtgctcaacaacatcggacacgaccgagatgcaggcaacatttggcaggactacatcgccttcatcaagagcggtcctggtcaagtaggtgggaacagctggcaggaccaacaaaagatggatctccttcgcaaggcatatcagcgcgccatctgcgtacctatggcgaatctcaatgctttctggaaggagtatgattcgttcgagatgggcctgaacaagatgacgggccggaagcacattcaggaacgctcgccggcgtacatgacggcccgcagcgcgaacacagctctcgagaacatcactcgtggtctgcaccggaccaccgtagcccgactgccaccggctcctggatttgatggtgaccaggagtatcaagatcaagtcaagctttggaaagcttggatcgcatgggagaaggacgatccgcttgtactcaagtctgaagacctagcagcctatcaacaacggatcatgcatgtttacaagcatgctttgatggccctgagattctggcctgagatgtgggtcgatgcagctgaatggtgtctcgacaatgacatcaacaaagatgggaagagtactggattggggttcctcgtcgatggcgccgatgccaatcccgaaagtgttctactggcactcaaacatgccgactacatcgagctgaatcagcgcactggcgaggacgaaaacgcaaaggctgcccttgcccaggccgttcgagccccctatgacaaaactctcgatagtctgtatgccatgactaagaaactaaagcagagagaagagactgctgtccagaagatgcaggaagccaacattccggactttccgatgaatatgggtgcaccggctgaggaagaagatgatgaaggcgaaatcaaagaaaacaacgcttccacaaatgcaaaagaagggataattaaggccgtgagagacggatttgcgatccagcaactccatgtcgatcagaccatttcatatctctggattgccctcacccgcgcgtttaggcgattgcaagggcagggtcgaatgtcgccccctactggcctccgaggaatattcatggaagcacgtggcaaaggtcgtttgaaatctgatgtctacattgccattgcgcaccttgaatgggaggtctatcaagatcccgttgcgaccaagctcttcgaaagaggttcgaagctcttcccagacgacgaggtctttttcgtggagtacctaaagcacctccatctcatacgcgactcgaccaatgcccgagttgtcttctcgcagacagtcaaacgattaagggagcgtctcgagcgtgagcccggagtcttgacgaagttaaagcctttatatgcatatttccattcgtacgaagcgaagtacggcgaattagcacaagtcaaagagctcgagaaacagatggctgaacttttccctgatgaatctaccattgcaccgttcgcggctagacttgcaacgaagacatttgatccggtcaatacgaggatcatcatttcccaagctcagcaaatgcgcccgaaagcaactatcatgccgtcagttgagcacgcctcatccccttctgttcgagccacaccacaacctatagtacaaatcgatcggagcccacgtcctcaatacgtgccacttcccacaggaaacctgaactcccccaaacgtccttaccaagctgatgacgcggatgattataacccaccacgcaaagtggccagaggagtgtcaccgctcaagggtgctgcaggtcgtcgtttggaccagcagcgtcgacaaggcggtgtctcaacgggacctgtagtatcaattccccgagatatttcattccttcttggtttgatcccatcggcggaggacttcaactctttccgattcctgcctgatcgaatgaccagactcattcgagataccaacgtccctgactattcggaatggaagacacgacaggagctcgcgaaccggtctggaacgcgtccgacatcctcagactatccgccctaccacggcacagggcgggattcacctggagtcacaggcagacccgctagtccgtatggcggtgcagctgctcgtgtagctcagtcggcaggttatcgaaattcgcctctccggcccggatccagcagcgcatatgaacctgcgccttctgcatatcagccacccggaccttctcctttcaatcctcttgcccagcttcaagccacgatggctaatgcctatcctaactggcagcagggctcctacgctgacaataatgctcaatggccccctaatcaagcgcagtcacagcaaccctacaatggatactatcaaaactag

SEQ ID NO: 1146 - protein, 1101 aa, Muscodor strobelii
  misc_feature: SGI Peptide ID NO. 559973
  misc_feature (653)..(814): Pfam Id: PF05843 Pfam Desc: Suppressor of forked protein (Suf)
  misc_feature (59)..(1016): NCBI GI: 145608240 Blast Desc: MGG_03265 [Magnaporthe grisea 70-15] gi|145015734|gb|EDK00224.1| MGG_03265 [Magnaporthe grisea 70-15]
  misc_feature (1)..(1050): NCBI GI: 46105442 Blast Desc: FG00349.1 [Gibberella zeae PH-1] gi|110816473|sp|Q4IR09.1|RNA14_GIBZE RecName: Full=mRNA 3'-end-processing protein RNA14
  misc_feature (1)..(1055): NCBI GI: 256734603 Blast Desc: [Nectria haematococca mpVI 77-13-4]
  misc_feature (19)..(1056): NCBI GI: 85090792 Blast Desc: NCU09435 [Neurospora crassa OR74A] gi|74614969|sp|Q7S1Y0.1|RNA14_NEUCR RecName: Full=mRNA 3'-end-processing protein rna-14 gi|28919961|gb|EAA29351.1|
  misc_feature (79)..(1043): NCBI GI: 156037931 Blast Desc: SS1G_11721 [Sclerotinia sclerotiorum 1980] gi|154697458|gb|EDN97196.1| SS1G_11721 [Sclerotinia sclerotiorum 1980]
  misc_feature (69)..(969): NCBI GI: 116203595 Blast Desc: CHGG_09681 [Chaetomium globosum CBS 148.51] gi|88175809|gb|EAQ83277.1| CHGG_09681 [Chaetomium globosum CBS 148.51]
  misc_feature (82)..(979): NCBI GI: 154310041 Blast Desc: BC1G_06941 [Botryotinia fuckeliana B05.10] gi|150851729|gb|EDN26922.1| BC1G_06941 [Botryotinia fuckeliana B05.10]
  misc_feature (204)..(1050): NCBI GI: 171679523 Blast Desc: protein product [Podospora anserina] gi|170939387|emb|CAP64615.1| protein product [Podospora anserina]
  misc_feature (126)..(1009): NCBI GI: 70999600 Blast Desc: CFIA complex component Rna14 [Aspergillus fumigatus Af293] gi|74674358|sp|Q4WXX4.1|RNA14_ASPFU RecName: Full=mRNA 3'-end-processing protein rna14 gi|66852154|gb|EAL92479.1| CFIA
  misc_feature (195)..(978): NCBI GI: 212527604 Blast Desc: CFIA complex component Rna14, [Penicillium marneffei ATCC 18224] gi|210073357|gb|EEA27444.1| CFIA complex component Rna14, [Penicillium marneffei ATCC 18224]
  misc_feature: Useful for introducing or modulating the production of volatile compounds
MASEAPEETWSQELEDGVENSDQQHVEDGADEQEAYSPTQPDLANDSDASVDMVGDEEEDEDSAEYDPEYDPESVSLQGAPYDPEATAAAQPLLALPIPEERSASAASSRPAKKPKTAGGFLVGSSDDEDDAHNPPSRASVPTTQIPAAIDAQAHTLTHSPLQQSNTAPEAASFQSLQPPNGAQSATVDQAAVDAAAPVSKSRLPADIIGSLEDRVQEDPKGDTDAWFTLIGEFKRRHQVVDARNVYERFFEVFPQAAEIWVEYLDMELNLENFPDAEALFGRTLFSVPHVSMWTAYLDYIRRRNDLLNDPSGQARQTVSQAYEFVLNNIGHDRDAGNIWQDYIAFIKSGPGQVGGNSWQDQQKMDLLRKAYQRAICVPMANLNAFWKEYDSFEMGLNKMTGRKHIQERSPAYMTARSANTALENITRGLHRTTVARLPPAPGFDGDQEYQDQVKLWKAWIAWEKDDPLVLKSEDLAAYQQRIMHVYKHALMALRFWPEMWVDAAEWCLDNDINKDGKSTGLGFLVDGADANPESVLLALKHADYIELNQRTGEDENAKAALAQAVRAPYDKTLDSLYAMTKKLKQREETAVQKMQEANIPDFPMNMGAPAEEEDDEGEIKENNASTNAKEGIIKAVRDGFAIQQLHVDQTISYLWIALTRAFRRLQGQGRMSPPTGLRGIFMEARGKGRLKSDVYIAIAHLEWEVYQDPVATKLFERGSKLFPDDEVFFVEYLKHLHLIRDSTNARVVFSQTVKRLRERLEREPGVLTKLKPLYAYFHSYEAKYGELAQVKELEKQMAELFPDESTIAPFAARLATKTFDPVNTRIIISQAQQMRPKATIMPSVEHASSPSVRATPQPIVQIDRSPRPQYVPLPTGNLNSPKRPYQADDADDYNPPRKVARGVSPLKGAAGRRLDQQRRQGGVSTGPVVSIPRDISFLLGLIPSAEDFNSFRFLPDRMTRLIRDTNVPDYSEWKTRQELANRSGTRPTSSDYPPYHGTGRDSPGVTGRPASPYGGAAARVAQSAGYRNSPLRPGSSSAYEPAPSAYQPPGPSPFNPLAQLQATMANAYPNWQQGSYADNNAQWPPNQAQSQQPYNGYYQN

SEQ ID NO: 1147 - DNA, 4397 bp, Muscodor strobelii
  misc_feature: SGI EST ID NO. CUFF.3162.0
  misc_feature: Variant of the nucleotide sequence at SEQ ID NO 1145
caaacccaagtagactcatcctcactcactttgccagaggaccctgtgtgagcgcgcgcggctttgccatcttcaaccacagccttgcgcgcctggcttgtgtcaacatcttctttctcattgcgtctttactcacacatctctaccaccagcccaggtagcaagcaagcagtatctaatactcagacatccaaactctgtctctctttcatggccgcctaactcgcgtcgtgcaatccgtcccattgtccgtcccgctcccttgttctctctccatcccgactctgtgaatgtcattgcctcggtcttgtgctaccagtgacaaacctctctgtaactcatgcgccattgaccttttccactgtcaccatctaccctgccctaccctgctttgccctactctaccctcttaacttgaccacaacctcattgcccatctgtcccgtgtcgtcgcgccccttgcctttgtcttgccacctcagccacttactagccatcaaccctcagccaagtattgtgcgcgcgacagacacgatggcatcagaggctccagaggagacttggtctcaggagctcgaagacggagtcgagaatagcgaccagcagcatgtggaagacggtgcagacgagcaggaggcttactcccccacacagcccgacctcgccaacgactctgatgcttcagtggacatggtcggggatgaggaggaagacgaagactccgccgagtatgacccagagtacgatcctgaatccgtatctctccaaggcgctccatacgaccccgaagctaccgctgcggcgcaacctctcctcgccctccctattcccgaagagcgcagcgcatctgcagcttcatcccgacctgcgaagaaacccaagacagctggaggcttcctcgtgggatcctctgacgacgaagacgatgcccacaaccctccctcacgcgcttcggtccccaccacccagatacctgcggctatcgatgcgcaagcccacactctcactcactctcccctccaacagtccaacaccgccccagaagctgcctccttccagtcactccagccacccaatggcgcccaaagcgctacagtcgatcaagctgccgttgacgccgctgcaccagtctcgaaatcccggcttcctgccgatatcatagggtctctggaagatcgtgtgcaggaagaccccaagggcgacacggatgcctggttcacgctgattggcgagttcaagcgccgccatcaggtcgttgatgcgagaaatgtctatgagcggttcttcgaggtgttccctcaagcagctgagatctgggttgaatacctggacatggaactcaatctcgaaaacttccccgatgccgaggctctctttggccgcactctattctccgtccctcacgtatccatgtggactgcctatctcgactacatccgccgtcgaaacgatctgctcaacgatccctccggccaggcccgacagacggtcagccaagcttacgagtttgtgctcaacaacatcggacacgaccgagatgcaggcaacatttggcaggactacatcgccttcatcaagagcggtcctggtcaagtaggtgggaacagctggcaggaccaacaaaagatggatctccttcgcaaggcatatcagcgcgccatctgcgtacctatggcgaatctcaatgctttctggaaggagtatgattcgttcgagatgggcctgaacaagatgacgggccggaagcacattcaggaacgctcgccggcgtacatgacggcccgcagcgcgaacacagctctcgagaacatcactcgtggtctgcaccggaccaccgtagcccgactgccaccggctcctggatttgatggtgaccaggagtatcaagatcaagtcaagctttggaaagcttggatcgcatgggagaaggacgatccgcttgtactcaagtctgaagacctagcagcctatcaacaacggatcatgcatgtttacaagcatgctttgatggccctgagattctggcctgagatgtgggtcgatgcagctgaatggtgtctcgacaatgacatcaacaaagatgggaagagtactggattggggttcctcgtcgatggcgccgatgccaatcccgaaagtgttctactggcactcaaacatgccgactacatcgagctgaatcagcgcactggcgaggacgaaaacgcaaaggctgcccttgcccaggccgttcgagccccctatgacaaaactctcgatagtctgtatgccatgactaagaaactaaagcagagagaagagactgctgtccagaagatgcaggaagccaacattccggactttccgatgaatatgggtgcaccggctgaggaagaagatgatgaaggcgaaatcaaagaaaacaacgcttccacaaatgcaaaagaagggataattaaggccgtgagagacggatttgcgatccagcaactccatgtcgatcagaccatttcatatctctggattgccctcacccgcgcgtttaggcgattgcaagggcagggtcgaatgtcgccccctactggcctccgaggaatattcatggaagcacgtggcaaaggtcgtttgaaatctgatgtctacattgccattgcgcaccttgaatgggaggtctatcaagatcccgttgcgaccaagctcttcgaaagaggttcgaagctcttcccagacgacgaggtctttttcgtggagtacctaaagcacctccatctcatacgcgactcgaccaatgcccgagttgtcttctcgcagacagtcaaacgattaagggagcgtctcgagcgtgagcccggagtcttgacgaagttaaagcctttatatgcatatttccattcgtacgaagcgaagtacggcgaattagcacaagtcaaagagctcgagaaacagatggctgaacttttccctgatgaatctaccattgcaccgttcgcggctagacttgcaacgaagacatttgatccggtcaatacgaggatcatcatttcccaagctcagcaaatgcgcccgaaagcaactatcatgccgtcagttgagcacgcctcatccccttctgttcgagccacaccacaacctatagtacaaatcgatcggagcccacgtcctcaatacgtgccacttcccacaggaaacctgaactcccccaaacgtccttaccaagctgatgacgcggatgattataacccaccacgcaaagtggccagaggagtgtcaccgctcaagggtgctgcaggtcgtcgtttggaccagcagcgtcgacaaggcggtgtctcaacgggacctgtagtatcaattccccgagatatttcattccttcttggtttgatcccatcggcggaggacttcaactctttccgattcctgcctgatcgaatgaccagactcattcgagataccaacgtccctgactattcggaatggaagacacgacaggagctcgcgaaccggtctggaacgcgtccgacatcctcagactatccgccctaccacggcacagggcgggattcacctggagtcacaggcagacccgctagtccgtatggcggtgcagctgctcgtgtagctcagtcggcaggttatcgaaattcgcctctccggcccggatccagcagcgcatatgaacctgcgccttctgcatatcagccacccggaccttctcctttcaatcctcttgcccagcttcaagccacgatggctaatgcctatcctaactggcagcagggctcctacgctgacaataatgctcaatggccccctaatcaagcgcagtcacagcaaccctacaatggatactatcaaaactagagcgagcagccaggactcacgatggtccttgggatacactcgcacacaatgagaagctgcagacaagctgcagagaagctacctctctcacgcttcccacaaaacatgacaaccgattgatctcacaagtagcatggaatatgcagatcgttagagacacttctctagccaatcaaaaatgggcaaaagcggcagacagaccctaatctgggcatgcatggttgggcgtttaggcaggaaacgattttgaacctgaactttgtgataataggcatggcttgtgctttgtgcagaagagtggtcgggcaggtgaagatatccaggaaatctttcgattgcttttgctgcccatcaaggaaaaataaaataaaattgatcccaagtgtgctcttctatttctatgcagggtgaggtccgttagatagtctcactggcttggctacctgtataacgatggagggataacctcaagccaagttacgaaccagagtcagactggtctgcattagtagatcgccatagatgacttatgctataataaaatccttaaaatgagc

SEQ ID NO: 1148 - DNA, 1257 bp, Muscodor strobelii
  misc_feature: SGI cDNA ID NO. 559974
  misc_feature: Encodes the peptide sequence at SEQ ID NO 1149
atgtctgatattccccagatccagattcttgacaagaagaattatttcacccaggccctcctcagtctctccgatgctgtaccctttccgccgttacaagattcttcactacgcatcaggacagtcgtacttacaatatcgctgaatacaatcgcgaatgccaccaaaagcgaagtcctgtcatcatggacagtctatccgcagccccaaaatactcctgcaccctacaatgatacctctaaatacggctgcatcaacatctggggatacgggcaagtgatcgagtcaacatttgcgagcgtgagcaaaggctcttacgtgtacggatatcttcctatcgggacgctgccatttgacattacggtggagaatagacctgaggtgcaaggtcacgtcttggccacgaacgcgtcccgccagcacctattgcccatctataatcgatacatagtacattcagaagaagaactagctggtgagatcgacagaaaatcacccacgctcgcgttcgattgcgcgttccgtgtcatgcacgagtcggcctttgtgctgaacaaatgggcatatgcacctaatccggaacatagcgtccccctaagcgggttacacaagtctttcaagcctgaatcgacagatctcagcgacgctaccgtcatcgttcttgctcccgggtcgaagatagcattggctttcgcctggatgctccggaatgagcgatctgaagctggcgctgtgcagcccaggcaggttatcggtgtcgcaagcgaacattctattgactttgttaggggcactggattctatgacgaaagtgttttggcgagtgaagaccctaagttactgctaaggtcttgggacgttctggaagacaagaacgtcgttctcgttgactttggtgggcgtgcaggtgcaggcaataggtgggcaaccgcacttaagaccatttaccccaagttcaggttcgccatggtcggagtcgaggccctagaagggtcgactggcgatgcaacgcgcacggcactcggtttaggaggagtgccgttcaacctttcccacgcacgtgatacagctatggaaaagtgcggagaggctgcatacttcgaatcagtagctaagtcgcttcgatctttccgactagtccacattcctgggttcgaagcgcaattcgaggagggtatggaggccgtcctagaggggtaccaggctttctgtacatctaagacgaggcctaacgttggctttgtatataaagtctag

SEQ ID NO: 1149 - protein, 418 aa, Muscodor strobelii
  misc_feature: SGI Peptide ID NO. 559974
  misc_feature (5)..(418): NCBI GI: 239612136 Blast Desc: conserved [Ajellomyces dermatitidis ER-3]
  misc_feature (5)..(418): NCBI GI: 261202228 Blast Desc: conserved [Ajellomyces dermatitidis SLH14081] gi|239590425|gb|EEQ73006.1| conserved [Ajellomyces dermatitidis SLH14081]
  misc_feature (7)..(418): NCBI GI: 119485264 Blast Desc: NFIA_099010 [Neosartorya fischeri NRRL 181] gi|119410320|gb|EAW20267.1| conserved [Neosartorya fischeri NRRL 181]
  misc_feature (7)..(418): NCBI GI: 159128638 Blast Desc: conserved [Aspergillus fumigatus A1163]
  misc_feature (1)..(418): NCBI GI: 171681048 Blast Desc: protein product [Podospora anserina] gi|170940482|emb|CAP65710.1| protein product [Podospora anserina]
  misc_feature (7)..(418): NCBI GI: 146322716 Blast Desc: conserved [Aspergillus fumigatus Af293] gi|129556767|gb|EAL87186.2| conserved [Aspergillus fumigatus Af293]
  misc_feature (1)..(418): NCBI GI: 169780430 Blast Desc: [Aspergillus oryzae RIB40] gi|83773419|dbj|BAE63546.1| protein product [Aspergillus oryzae]
  misc_feature (1)..(418): NCBI GI: 238505422 Blast Desc: conserved [Aspergillus flavus NRRL3357] gi|220690054|gb|EED46404.1| conserved [Aspergillus flavus NRRL3357]
  misc_feature (7)..(418): NCBI GI: 121719566 Blast Desc: conserved [Aspergillus clavatus NRRL 1] gi|119404680|gb|EAW15056.1| conserved [Aspergillus clavatus NRRL 1]
  misc_feature (7)..(304): NCBI GI: 115389550 Blast Desc: [Aspergillus terreus NIH2624] gi|114194676|gb|EAU36376.1| [Aspergillus terreus NIH2624]
MSDIPQIQILDKKNYFTQALLSLSDAVPFPPLQDSSLRIRTVVLTISLNTIANATKSEVLSSWTVYPQPQNTPAPYNDTSKYGCINIWGYGQVIESTFASVSKGSYVYGYLPIGTLPFDITVENRPEVQGHVLATNASRQHLLPIYNRYIVHSEEELAGEIDRKSPTLAFDCAFRVMHESAFVLNKWAYAPNPEHSVPLSGLHKSFKPESTDLSDATVIVLAPGSKIALAFAWMLRNERSEAGAVQPRQVIGVASEHSIDFVRGTGFYDESVLASEDPKLLLRSWDVLEDKNVVLVDFGGRAGAGNRWATALKTIYPKFRFAMVGVEALEGSTGDATRTALGLGGVPFNLSHARDTAMEKCGEAAYFESVAKSLRSFRLVHIPGFEAQFEEGMEAVLEGYQAFCTSKTRPNVGFVYKV

SEQ ID NO: 1150 - DNA, 1869 bp, Muscodor strobelii
  misc_feature: SGI EST ID NO. CUFF.3207.0
  misc_feature: Variant of the nucleotide sequence at SEQ ID NO 1148
ggaagacttgaaattcgaggtggcaactggctttagcccaagtatgactactcgactgatcaagggagacaagcacccagctctatcagtagttcatctggacataatgtttcaatatgtctgatattccccagatccagattcttgacaagaagaattatttcacccaggccctcctcagtctctccgatgctgtaccctttccgccgttacaagattcttcactacgcatcaggacagtcgtacttacaatatcgctgaatacaatcgcgaatgccaccaaaagcgaagtcctgtcatcatggacagtctatccgcagccccaaaatactcctgcaccctacaatgatacctctaaatacggctgcatcaacatctggggatacgggcaagtgatcgagtcaacatttgcgagcgtgagcaaaggctcttacgtgtacggatatcttcctatcgggacgctgccatttgacattacggtggagaatagacctgaggtgcaaggtcacgtcttggccacgaacgcgtcccgccagcacctattgcccatctataatcgatacatagtacattcagaagaagaactagctggtgagatcgacagaaaatcacccacgctcgcgttcgattgcgcgttccgtgtcatgcacgagtcggcctttgtgctgaacaaatgggcatatgcacctaatccggaacatagcgtccccctaagcgggttacacaagtctttcaagcctgaatcgacagatctcagcgacgctaccgtcatcgttcttgctcccgggtcgaagatagcattggctttcgcctggatgctccggaatgagcgatctgaagctggcgctgtgcagcccaggcaggttatcggtgtcgcaagcgaacattctattgactttgttaggggcactggattctatgacgaaagtgttttggcgagtgaagaccctaagttactgctaaggtcttgggacgttctggaagacaagaacgtcgttctcgttgactttggtgggcgtgcaggtgcaggcaataggtgggcaaccgcacttaagaccatttaccccaagttcaggttcgccatggtcggagtcgaggccctagaagggtcgactggcgatgcaacgcgcacggcactcggtttaggaggagtgccgttcaacctttcccacgcacgtgatacagctatggaaaagtgcggagaggctgcatacttcgaatcagtagctaagtcgcttcgatctttccgactagtccacattcctgggttcgaagcgcaattcgaggagggtatggaggccgtcctagaggggtaccaggctttctgtacatctaagacgaggcctaacgttggctttgtatataaagtctaggtgtctttgctcacttgatatatatatgtagtcataaaggctcttggctcgcgagagggctttgacgagtagagatttctgtatagatgttaatcattccgcttcagaacatttctgcgcgtgtttgccagctactatagtaccgctagtcgaagccaccttcaagacctgtcgggcagttgacgtcttttaatgtttgtttgacacttggttcattatttcgcattacggttgcggaaccacactcctggtgcttggagaccgtcgggtttttgcgcaagggctggagggcattctgaataccctgcaagtttcacacgaggagcttgtgcgcaggaagttatcgcaagactaccatgtcttgaacgggaactttcgtatctggcgccttcaatgcagaatatgagctcgggtggacggtgagcctcctcgttgaagataacgacgaaggtcaatatttcatagttcctctactttcgaagtccgactgattagc

SEQ ID NO: 1151 - DNA, 798 bp, Muscodor strobelii
  misc_feature: SGI cDNA ID NO. 559975
  misc_feature: Encodes the peptide sequence at SEQ ID NO 1152
atgatctcatccagggtgtcccaggacaaggatgccaaacatgacttctactctttcgtcgcggattcttttaagaacaagggcagaggaggagacttatggctcgaggccatattctttctagttgctgggggcgatactgcaggaaccgcaatgtgcggaaccttcttttacctgtcccgaaacccattgtgctataaaaagctagcgacagaaattcgctccagcttcaccaatggacgcgacataagatctggtccacaactggccggctgccattatctccgagcatgcatcgacgagtccatgaggatgtcgccacccatctcgaccacactctggcgggagcaggccgagagcgacaacagcaaggagcctctgatcattgacggccacatcataccacgaggtgccctggtcggtgtcaacacatatgccctacaccataacgcggagtacttcccagacccgttcgcgtacaagcccgaacgctgggtccacggccaggacatggtccaccacgccgccttcgcgcccttctccgttggcgctcgcgcgtgtgccgggaagagcctggcctacttggagacgagtctcctcgtcgcaaagatcctgtggtatttcgacttcacgcctgccgccggagacctcgggaaactcggtggcgggacgccaggcctcaagaatggccgcgacaggcaatacgagtaccagctggaggacattttcacgtcgagacatgtagggccgcacctcgtgttcacgtgccgcggcgaggcctggaaggatctccattga

SEQ ID NO: 1152 - protein, 265 aa, Muscodor strobelii
  misc_feature: SGI Peptide ID NO. 559975
  misc_feature (40)..(212): Pfam Id: PF00067 Pfam Desc: Cytochrome P450
  misc_feature (1)..(264): NCBI GI: 156056276 Blast Desc: SS1G_05490 [Sclerotinia sclerotiorum 1980] gi|154703274|gb|EDO03013.1| SS1G_05490 [Sclerotinia sclerotiorum 1980]
  misc_feature (1)..(265): NCBI GI: 156060449 Blast Desc: SS1G_02363 [Sclerotinia sclerotiorum 1980] gi|154699771|gb|EDN99509.1| SS1G_02363 [Sclerotinia sclerotiorum 1980]
  misc_feature (1)..(257): NCBI GI: 189196570 Blast Desc: cytochrome P450 4A5 precursor [Pyrenophora tritici-repentis Pt-1C-BFP] gi|187980502|gb|EDU47128.1| cytochrome P450 4A5 precursor [Pyrenophora tritici-repentis
  misc_feature (24)..(257): NCBI GI: 145256217 Blast Desc: An10g00660 [Aspergillus niger CBS 513.88] gi|134078632|emb|CAK40505.1| protein product [Aspergillus niger]
  misc_feature (1)..(257): NCBI GI: 255954725 Blast Desc: Pc21g10830 [Penicillium chrysogenum Wisconsin 54-1255] gi|211589826|emb|CAP95980.1| Pc21g10830 [Penicillium chrysogenum Wisconsin 54-1255]
  misc_feature (29)..(258): NCBI GI: 258572362 Blast Desc: conserved [Uncinocarpus reesii 1704] gi|237905213|gb|EEP79614.1| conserved [Uncinocarpus reesii 1704]
  misc_feature (1)..(257): NCBI GI: 169603764 Blast Desc: SNOG_04890 [Phaeosphaeria nodorum SN15] gi|111066161|gb|EAT87281.1| SNOG_04890 [Phaeosphaeria nodorum SN15]
  misc_feature (4)..(257): NCBI GI: 145608110 Blast Desc: MGG_03375 [Magnaporthe grisea 70-15] gi|145015610|gb|EDK00100.1| MGG_03375 [Magnaporthe grisea 70-15]
  misc_feature (1)..(257): NCBI GI: 169782556 Blast Desc: [Aspergillus oryzae RIB40] gi|83774484|dbj|BAE64607.1| protein product [Aspergillus oryzae]
  misc_feature (29)..(257): NCBI GI: 121710976 Blast Desc: benzoate 4-monooxygenase cytochrome P450 [Aspergillus clavatus NRRL 1] gi|119401254|gb|EAW11678.1| benzoate 4-monooxygenase cytochrome P450 [Aspergillus clavatus NRRL 1]
  misc_feature (3)..(211): SWISSPROT Homolog: EC 1.14.14.1 Unspecific monooxygenase
MISSRVSQDKDAKHDFYSFVADSFKNKGRGGDLWLEAIFFLVAGGDTAGTAMCGTFFYLSRNPLCYKKLATEIRSSFTNGRDIRSGPQLAGCHYLRACIDESMRMSPPISTTLWREQAESDNSKEPLIIDGHIIPRGALVGVNTYALHHNAEYFPDPFAYKPERWVHGQDMVHHAAFAPFSVGARACAGKSLAYLETSLLVAKILWYFDFTPAAGDLGKLGGGTPGLKNGRDRQYEYQLEDIFTSRHVGPHLVFTCRGEAWKDLH

SEQ ID NO: 1153 - DNA, 597 bp, Muscodor strobelii
  misc_feature: SGI cDNA ID NO. 559976
  misc_feature: Encodes the peptide sequence at SEQ ID NO 1154
atgtggcaatctaacatagggagcttgattgcagagctcctcgtgtatggactgctggtctattggctagcattggggagctatagagtacttttgcaccctctgcgtcagtacccggggccgtttctggcgaagcttactcaggcgtatgcgggcttcttcgccgcaaagaagcggcttcacatagaagttcatcaataccatttgaaatatgctacggtgctcggcccagttgttcgagtagggcccgaccgactcagcttcaacaccgtcaccgctctcaaggagatctattccaacgaacgcgtcaccaaagcatcgatatacctcgtcaccacccggaacaatgtcttcaatgtcttctccgcgatcgacaaccacctgcaccgccagaaacgacaagtcatcggccaagcgctcagcgaccgctcgatacgatcattcgaacccactttgcttgaaaagctagacatagctcttcaacagatacttgagtctacccgaacttcctccccggttgatatcaccgagaagtcaagatatctggcacttgacattgttggccagctcgcgtttggctacgacttaaatatatag

SEQ ID NO: 1154 - protein, 198 aa, Muscodor strobelii
  misc_feature: SGI Peptide ID NO. 559976
  misc_feature (19)..(193): NCBI GI: 212529440 Blast Desc: benzoate 4-monooxygenase cytochrome P450, [Penicillium marneffei ATCC 18224] gi|210074275|gb|EEA28362.1| benzoate 4-monooxygenase cytochrome P450, [Penicillium marneffei ATCC
  misc_feature (18)..(198): NCBI GI: 169782556 Blast Desc: [Aspergillus oryzae RIB40] gi|83774484|dbj|BAE64607.1| protein product [Aspergillus oryzae]
  misc_feature (15)..(193): NCBI GI: 169603764 Blast Desc: SNOG_04890 [Phaeosphaeria nodorum SN15] gi|111066161|gb|EAT87281.1| SNOG_04890 [Phaeosphaeria nodorum SN15]
  misc_feature (21)..(193): NCBI GI: 256733020 Blast Desc: [Nectria haematococca mpVI 77-13-4]
  misc_feature (18)..(198): NCBI GI: 238492179 Blast Desc: cytochrome P450, [Aspergillus flavus NRRL3357] gi|220695820|gb|EED52162.1| cytochrome P450, [Aspergillus flavus NRRL3357]
  misc_feature (20)..(193): NCBI GI: 154313085 Blast Desc: BC1G_05544 [Botryotinia fuckeliana B05.10] gi|150849629|gb|EDN24822.1| BC1G_05544 [Botryotinia fuckeliana B05.10]
  misc_feature (29)..(198): NCBI GI: 189206195 Blast Desc: cytochrome P450 3A31 [Pyrenophora tritici-repentis Pt-1C-BFP] gi|187975525|gb|EDU42151.1| cytochrome P450 3A31 [Pyrenophora tritici-repentis Pt-1C-BFP]
  misc_feature (16)..(198): NCBI GI: 255954725 Blast Desc: Pc21g10830 [Penicillium chrysogenum Wisconsin 54-1255] gi|211589826|emb|CAP95980.1| Pc21g10830 [Penicillium chrysogenum Wisconsin 54-1255]
  misc_feature (29)..(193): NCBI GI: 121712150 Blast Desc: benzoate 4-monooxygenase cytochrome P450 [Aspergillus clavatus NRRL 1] gi|119401842|gb|EAW12264.1| benzoate 4-monooxygenase cytochrome P450 [Aspergillus clavatus NRRL 1]
  misc_feature (29)..(198): NCBI GI: 169596678 Blast Desc: SNOG_01106 [Phaeosphaeria nodorum SN15] gi|111071481|gb|EAT92601.1| SNOG_01106 [Phaeosphaeria nodorum SN15]
MWQSNIGSLIAELLVYGLLVYWLALGSYRVLLHPLRQYPGPFLAKLTQAYAGFFAAKKRLHIEVHQYHLKYATVLGPVVRVGPDRLSFNTVTALKEIYSNERVTKASIYLVTTRNNVFNVFSAIDNHLHRQKRQVIGQALSDRSIRSFEPTLLEKLDIALQQILESTRTSSPVDITEKSRYLALDIVGQLAFGYDLNI

SEQ ID NO: 1155 - DNA, 479 bp, Muscodor strobelii
  misc_feature: SGI EST ID NO. CUFF.3211.0
  misc_feature: Variant of the nucleotide sequence at SEQ ID NO 1153
gagctatagagtacttttgcaccctctgcgtcagtacccggggccgtttctggcgaagcttactcaggcgtatgcgggcttcttcgccgcaaagaagcggcttcacatagaagttcatcaataccatttgaaatatgctacggtgctcggtcattgcccaattcgaggactctttactgatgcgattacgatggcgaaggcccagttgttcgagtagggcccgaccgactcagcttcaacaccgtcaccgctctcaaggagatctattccaacgaacgcgtcaccaaagcatcgatatacctcgtcaccacccggaacaatgtcttcaatgtcttctccgcgatcgacaaccacctgcaccgccagaaacgacaagtcatcggccaagcgctcagcgaccgctcgatacgatcattcgaacccactttgcttgaaaagctagacatagctcttcaacagatacttgagtctacccgaac

SEQ ID NO: 1156 - DNA, 1050 bp, Muscodor strobelii
  misc_feature: SGI cDNA ID NO. 559977
  misc_feature: Encodes the peptide sequence at SEQ ID NO 1157
atgagcgggcaaaacgggacgtttcttgtcacaggcgccaatggcggtcttggcaccgccatcgtcgaacagtttgtaacagactctgcttttagcgactaccatggactctacgcagtccgtgaagcggactcgacatcaatgttgaaagcgatgttgtcccgtgccgaagctctctcctttccccatgatatcattgaactagatcttgtcaatctcgaaactgtccgtcgggtggccggtataatcaacacccgcgtcgcttcaggagacatccctcccatcaagcttctcatactgaatgccgcattccaagatttcggcaagcagagttggacatcagacgacctggataggaccttctgtacgaattatcttggccattggctcttgaccttgcttttgctgcggagtatggataaggaatcgtgtcgcatagttatcattggcagccaagcccacgatcccaacgctaaacagagcgttgcaagtcgcgcttttgaggccgacgaatacaagactttcattcacgacgaatacagcatcgacgcaattgcaaaaggaacatggagctcggcaaaggaagatccgtcgtggcgaagtggatttcggcgctatggtgcatctaaattgttcttgatcatgatgatgtatgaactccaacggcgtcttgatagggatccaattctgaacaaagtctcagttgttggagccgacccaggccgtatgagtacaggattacagcgtcatgcgccttggttcatccgcgtgcttttgatgaaaattgtctatcccctgatcacctggcttgtgccgaacgggccgctgagaagcacgcatgagtcggcgtcacaggttcttgaagctgcgactcgcatggatggtcaaggagatgggtcaattcctgaaccgttgtattattttgatggtgaagtggttgatactagtgttgagtcgaaagacacaaagaaacaagactgggtttggcagaaaagtatcaagtatacacatctctctcaagaagaaactggtttgagagcgtggaattga

SEQ ID NO: 1157 - protein, 349 aa, Muscodor strobelii
  misc_feature: SGI Peptide ID NO. 559977
  misc_feature (6)..(348): NCBI GI: 212538423 Blast Desc: short-chain dehydrogenase, [Penicillium marneffei ATCC 18224] gi|210069109|gb|EEA23200.1| short-chain dehydrogenase, [Penicillium marneffei ATCC 18224]
  misc_feature (5)..(348): NCBI GI: 242765007 Blast Desc: short-chain dehydrogenase, [Talaromyces stipitatus ATCC 10500] gi|218724083|gb|EED23500.1| short-chain dehydrogenase, [Talaromyces stipitatus ATCC 10500]
  misc_feature (6)..(348): NCBI GI: 242764805 Blast Desc: short-chain dehydrogenase, [Talaromyces stipitatus ATCC 10500] gi|218724042|gb|EED23459.1| short-chain dehydrogenase, [Talaromyces stipitatus ATCC 10500]
  misc_feature (6)..(348): NCBI GI: 212528992 Blast Desc: short-chain dehydrogenase, [Penicillium marneffei ATCC 18224] gi|210074051|gb|EEA28138.1| short-chain dehydrogenase, [Penicillium marneffei ATCC 18224]
  misc_feature (6)..(348): NCBI GI: 39942728 Blast Desc: MGG_03444 [Magnaporthe grisea 70-15] gi|145010010|gb|EDJ94666.1| MGG_03444 [Magnaporthe grisea 70-15]
  misc_feature (5)..(345): NCBI GI: 238840352 Blast Desc: conserved [Microsporum canis CBS 113480]
  misc_feature (1)..(348): NCBI GI: 46108216 Blast Desc: FG00990.1 [Gibberella zeae PH-1]
  misc_feature (1)..(348): NCBI GI: 256735183 Blast Desc: NECHADRAFT_74766 [Nectria haematococca mpVI 77-13-4]
  misc_feature (31)..(348): NCBI GI: 154323033 Blast Desc: BC1G_00859 [Botryotinia fuckeliana B05.10] gi|150848193|gb|EDN23386.1| BC1G_00859 [Botryotinia fuckeliana B05.10]
  misc_feature (5)..(347): NCBI GI: 238842886 Blast Desc: oxidoreductase [Microsporum canis CBS 113480]
  misc_feature (4)..(339): SWISSPROT Homolog: EC 1.3.1.33 Protochlorophyllide reductase
MSGQNGTFLVTGANGGLGTAIVEQFVTDSAFSDYHGLYAVREADSTSMLKAMLSRAEALSFPHDIIELDLVNLETVRRVAGIINTRVASGDIPPIKLLILNAAFQDFGKQSWTSDDLDRTFCTNYLGHWLLTLLLLRSMDKESCRIVIIGSQAHDPNAKQSVASRAFEADEYKTFIHDEYSIDAIAKGTWSSAKEDPSWRSGFRRYGASKLFLIMMMYELQRRLDRDPILNKVSVVGADPGRMSTGLQRHAPWFIRVLLMKIVYPLITWLVPNGPLRSTHESASQVLEAATRMDGQGDGSIPEPLYYFDGEVVDTSVESKDTKKQDWVWQKSIKYTHLSQEETGLRAWN

SEQ ID NO: 1158 - DNA, 1311 bp, Muscodor strobelii
  misc_feature: SGI cDNA ID NO. 559978
  misc_feature: Encodes the peptide sequence at SEQ ID NO 1159
atgaagcccttccgttgcataccatgcaacaagtcctttaatagacagagtgatctcgatcaacatttacgggactcacctaaacatcaaccaactgctcgcaacccgccgtcaacaataccatccggcccgagtgtctctaaggcgacagaacctgttgttcagaccctctctcaagatgcgaaatcgccctggtcacgaattgcggagggcgaatacgcgacaccactcatcgagctatctgcacactgccattcaatggacgagctcgaggagcgcggttatatcgtccgtccgtacaatctactggattacgctgacgcaggggtctgcacgcaatgtcaccgcaaacaaatacacataattagccaacaatgcgtcttccatccgtccaaacggaacaaatggaaaaagaagaagccgtataagtgttgcgatgccatcgccgccggcggcggctgtaggactttgccggcgcacgatttccaactaccccagcgcgccccagcgcatcgggatttccaacatacaccaggggcttccgcggagttgagacttccagcagtggcgattgattgtgagatggggggcgttgctggcgtaggtagtgaggtcatcttgctctgcgctaccgactacgttaccggggcggtgctcatcaaccgattcgtgtgcccgagcgtggcaataactgatatgcggacccgaatccacggtatcacgaaatccacactcgatcaatcgattgcgcaaggacaggcgctggccggctgggagggggctcgatccgagctgtggaaatacatcgatgataggacgatcctggtgggccatgcgttggagcacgacttgggtgcgctgaggatgatccatccccgcgtcgtggattccagcatcttgacgacagtcgcagtagggacacaacacattcgattcgggctacacaagctctcctctgaactctccgggatcgagatcaggaagggtaaggggggcgttcatgactgcatggaggatgtgctcgcgacgcgagaggtcgtactattctgtacccgcgcccgcagcaaggcagctttcaagagttgggttgaatcggaaaagcgcaagcacatgcgcttggaggcggaacgggaggcgagacgagggaaaaccaaccggcgtcacaggaccagggccggtattggtggtggaaacagcggctacttctttgaatcggatgatgactatgaagaacatctgcattggtctgatatcgcagaagattgtggatggccgcatcctgacactggatacgatccgtggtctgattag

SEQ ID NO: 1159 - protein, 436 aa, Muscodor strobelii
  misc_feature: SGI Peptide ID NO. 559978
  misc_feature (188)..(347): Pfam Id: PF00929 Pfam Desc: Exonuclease
  misc_feature (6)..(436): NCBI GI: 154296804 Blast Desc: BC1G_12491 [Botryotinia fuckeliana B05.10] gi|150843145|gb|EDN18338.1| BC1G_12491 [Botryotinia fuckeliana B05.10]
  misc_feature (2)..(377): NCBI GI: 258570479 Blast Desc: [Uncinocarpus reesii 1704] gi|237904313|gb|EEP78714.1| [Uncinocarpus reesii 1704]
  misc_feature (65)..(386): NCBI GI: 159122914 Blast Desc: RNA exonuclease, [Aspergillus fumigatus A1163]
  misc_feature (65)..(386): NCBI GI: 70982630 Blast Desc: RNA exonuclease [Aspergillus fumigatus Af293] gi|66844467|gb|EAL84805.1| RNA exonuclease, [Aspergillus fumigatus Af293]
  misc_feature (37)..(386): NCBI GI: 119488542 Blast Desc: RNA exonuclease, [Neosartorya fischeri NRRL 181] gi|119410879|gb|EAW20824.1| RNA exonuclease, [Neosartorya fischeri NRRL 181]
  misc_feature (24)..(389): NCBI GI: 121709567 Blast Desc: RNA exonuclease, [Aspergillus clavatus NRRL 1] gi|119400605|gb|EAW11030.1| RNA exonuclease, [Aspergillus clavatus NRRL 1]
  misc_feature (170)..(436): NCBI GI: 238493423 Blast Desc: exonuclease, [Aspergillus flavus NRRL3357] gi|220696442|gb|EED52784.1| exonuclease, [Aspergillus flavus NRRL3357]
  misc_feature (6)..(367): NCBI GI: 119173327 Blast Desc: CIMG_10157 [Coccidioides immitis RS]
  misc_feature (204)..(436): NCBI GI: 169783596 Blast Desc: [Aspergillus oryzae RIB40] gi|83775004|dbj|BAE65127.1| protein product [Aspergillus oryzae]
  misc_feature (46)..(378): NCBI GI: 67528318 Blast Desc: AN4357.2 [Aspergillus nidulans FGSC A4] gi|40741328|gb|EAA60518.1| AN4357.2 [Aspergillus nidulans FGSC A4] gi|259482833|tpe|CBF77690.1| TPA: RNA exonuclease, nidulans
MKPFRCIPCNKSFNRQSDLDQHLRDSPKHQPTARNPPSTIPSGPSVSKATEPVVQTLSQDAKSPWSRIAEGEYATPLIELSAHCHSMDELEERGYIVRPYNLLDYADAGVCTQCHRKQIHIISQQCVFHPSKRNKWKKKKPYKCCDAIAAGGGCRTLPAHDFQLPQRAPAHRDFQHTPGASAELRLPAVAIDCEMGGVAGVGSEVILLCATDYVTGAVLINRFVCPSVAITDMRTRIHGITKSTLDQSIAQGQALAGWEGARSELWKYIDDRTILVGHALEHDLGALRMIHPRVVDSSILTTVAVGTQHIRFGLHKLSSELSGIEIRKGKGGVHDCMEDVLATREVVLFCTRARSKAAFKSWVESEKRKHMRLEAEREARRGKTNRRHRTRAGIGGGNSGYFFESDDDYEEHLHWSDIAEDCGWPHPDTGYDPWSD

SEQ ID NO: 1160 - DNA, 2673 bp, Muscodor strobelii
  misc_feature: SGI cDNA ID NO. 559979
  misc_feature: Encodes the peptide sequence at SEQ ID NO 1161
atgactctagaagactggctggacgaactatgcgtccgattcatcataaacctcccgcgcgaggacctctcctccgtcgcccgcatctgcttccaaattgaagaggcccaatggttctacgaagacttcatccgaccgctcgaccccaccctcccctccatgtccctccgcaccttcagcctcaagatgttccagcactgcccgctgctcgcctctttctccgccgacatacacatcaaggccttcgatgagtttatgcagtacaagactcgcgtcccagtgcgtggcgccatcatgctcaacgatgatatggatgccgcagtgttagtccgcggctacaagaagggagccagctggagtttccccagaggcaagatcaacaagaacgaagatgatctggactgtgccgttcgcgaagtctacgaagagacaggctacgatttgcgggctgccgggttggttgagaagaacgctcccgtacatccgcttgaagtcactatgcatgatcaacaggtgcgcctctatgttttccgcggcatcccagaggacaccatctttgagacaaggacgaggaaggaaattggagccatcaaatggtacaaagtctccgaccttccagcctatcgcaagaaaaaggcagccaaaggtccagagcaacagccgtcgtcgtcggacaggttctacatggttgcacccttcatggtccacctgagacagtgggttcttaagcagaagaagctagatatgcagaatgctccggcccaccctggtcacgaccaccctgtgtcctactacgaggagaacgggacagacgataacatgctgcaagagccgcctgccgtcgaggccagcacgcagcccgagatattcgagagcgcaaccaaggaactgcaccgtctactcaagatcaagcccccaacccaaggcctgcagctgccatcgccaatatccgagcaacaggctggccagagcttgatgtccatactacagccgagcgggccacagtcacgagtagcaaccggccaaagccagcgctttatccagccacaaactccccgtgaccaggaggtgacagttgcggctcaaccgcacgcaccacacccccatcatcccactcagctacagcctctatcaaactactcaacacccccagccttccccattgctcctgacgcaaacaacaacacaaactaccagtcacatgtgatccagcagcaagcaccacagcagagagctcggcctcacgtttacgtggaccatcaggtacatcaccatatacatcatacccagcattatcagaatcaaccaccgcctgcacatcccttacctaatccacccgtccaactcttgcatccgcaaccactcccaccccaggttcagaaggcaatgctgttccgcgacatggcatctccgcccaatgctgtcaatcctaacagtcgtgctggtccgccaaccatgccgcagccatcgctactgtcaggtcagagtatgcatcaccaaccctcaactgttcataatcagcaaccggcctcgaagccctcgacacagttgccagcccattctgcaaatctactgaacgtgctcaaaggaagtggttcggcaaaaccatcatcccaagaacccccgagccaccccttaccatctctgcctagttctcatcatcatcacgtgccccaaggtagtgtggatcattcgcggaacgggccaggcccatctattgcacaggataagtttgcgttgccctatcgatcgtctctaccacctactactcgtcccgctgccaccatgactgcccctgcaccgttctcgaccacggcttctcgcatgaatgcaccaacagatgtgcatcgtgctggcctgctcgatatattcaagcggcaaggctctcctaaagtggccgcgaatcccatgggtggcgcgagcacgtcatcacatttatctcattcccagcttgacacagtccagtcgcccagataccaaggccagaagaaaggctcgccagcggcacaaattcttagaaatgctgccgaagagactgggaagccgattcaaatgaaccccgagactaaccttccatacggggctcactctatcctagcacgcccgcgtcgacagctgagtgggacatcggcccacagccctgcactgtctagacaaggttccaatgactcccacggtcatgttcccactagttcgcggcctagtcctgaagcatttcggcggcaacgatcgccgtaccaggcgcaagcacacttacagagtatgcattcaccacagcgccgcactccgcagacggaggcgtacactggctctgcctatgcatactccaaccaaggcagtatgcccaatccacttgcccagaatgcgccaactggtggaggaatgcctggacccggcaacttgaagcctcgaacgaattcgacaacagatcagcagaagaacctcctcgcgattctcggcggcaaagcccacggtggtacggagcagagcaaggggaaggagacaatgagcccagcactgtctggccacggggctccagcacctcgatcaaggctggcgtcattcgcatcaaatgactcgggacgtgccagcgctgctgcgatttcctcggcggatcgcaattttctcctagatttcttaggaaatgcagctagtaatggcaagaagaactag

SEQ ID NO: 1161 - protein, 890 aa, Muscodor strobelii
  misc_feature: SGI Peptide ID NO. 559979
  misc_feature (90)..(221): Pfam Id: PF00293 Pfam Desc: NUDIX domain
  misc_feature (4)..(89): Pfam Id: PF05026 Pfam Desc: Dcp2, box A domain
  misc_feature (90)..(213): Pfam Id: PF00293 Pfam Desc: NUDIX domain
  misc_feature (1)..(886): NCBI GI: 46122067 Blast Desc: FG05411.1 [Gibberella zeae PH-1]
  misc_feature (1)..(889): NCBI GI: 256729758 Blast Desc: NECHADRAFT_47056 [Nectria haematococca mpVI 77-13-4]
  misc_feature (1)..(395): NCBI GI: 39977015 Blast Desc: MGG_06410 [Magnaporthe grisea 70-15] gi|145016177|gb|EDK00667.1| MGG_06410 [Magnaporthe grisea 70-15]
  misc_feature (1)..(880): NCBI GI: 164424143 Blast Desc: NCU07889 [Neurospora crassa OR74A] gi|157070393|gb|EAA33586.2| conserved [Neurospora crassa OR74A]
  misc_feature (1)..(330): NCBI GI: 171687078 Blast Desc: protein product [Podospora anserina] gi|170943500|emb|CAP69153.1| protein product [Podospora anserina]
  misc_feature (54)..(888): NCBI GI: 116191733 Blast Desc: CHGG_05584 [Chaetomium globosum CBS 148.51] gi|88181497|gb|EAQ88965.1| CHGG_05584 [Chaetomium globosum CBS 148.51]
  misc_feature (1)..(316): NCBI GI: 259489750 Blast Desc: TPA: decapping enzyme Dcp2, (AFU_orthologue; AFUA_5G12420) [Aspergillus nidulans FGSC A4]
  misc_feature (1)..(315): NCBI GI: 67515557 Blast Desc: AN0060.2 [Aspergillus nidulans FGSC A4] gi|40746082|gb|EAA65238.1| AN0060.2 [Aspergillus nidulans FGSC A4]
  misc_feature (1)..(464): NCBI GI: 156058960 Blast Desc: SS1G_03492 [Sclerotinia sclerotiorum 1980] gi|154701279|gb|EDO01018.1| SS1G_03492 [Sclerotinia sclerotiorum 1980]
  misc_feature (1)..(248): NCBI GI: 145249928 Blast Desc: An14g06800 [Aspergillus niger] gi|134081988|emb|CAK46673.1| protein product [Aspergillus niger]
MTLEDWLDELCVRFIINLPREDLSSVARICFQIEEAQWFYEDFIRPLDPTLPSMSLRTFSLKMFQHCPLLASFSADIHIKAFDEFMQYKTRVPVRGAIMLNDDMDAAVLVRGYKKGASWSFPRGKINKNEDDLDCAVREVYEETGYDLRAAGLVEKNAPVHPLEVTMHDQQVRLYVFRGIPEDTIFETRTRKEIGAIKWYKVSDLPAYRKKKAAKGPEQQPSSSDRFYMVAPFMVHLRQWVLKQKKLDMQNAPAHPGHDHPVSYYEENGTDDNMLQEPPAVEASTQPEIFESATKELHRLLKIKPPTQGLQLPSPISEQQAGQSLMSILQPSGPQSRVATGQSQRFIQPQTPRDQEVTVAAQPHAPHPHHPTQLQPLSNYSTPPAFPIAPDANNNTNYQSHVIQQQAPQQRARPHVYVDHQVHHHIHHTQHYQNQPPPAHPLPNPPVQLLHPQPLPPQVQKAMLFRDMASPPNAVNPNSRAGPPTMPQPSLLSGQSMHHQPSTVHNQQPASKPSTQLPAHSANLLNVLKGSGSAKPSSQEPPSHPLPSLPSSHHHHVPQGSVDHSRNGPGPSIAQDKFALPYRSSLPPTTRPAATMTAPAPFSTTASRMNAPTDVHRAGLLDIFKRQGSPKVAANPMGGASTSSHLSHSQLDTVQSPRYQGQKKGSPAAQILRNAAEETGKPIQMNPETNLPYGAHSILARPRRQLSGTSAHSPALSRQGSNDSHGHVPTSSRPSPEAFRRQRSPYQAQAHLQSMHSPQRRTPQTEAYTGSAYAYSNQGSMPNPLAQNAPTGGGMPGPGNLKPRTNSTTDQQKNLLAILGGKAHGGTEQSKGKETMSPALSGHGAPAPRSRLASFASNDSGRASAAAISSADRNFLLDFLGNAASNGKKN

SEQ ID NO: 1162 - DNA, 3906 bp, Muscodor strobelii
  misc_feature: SGI EST ID NO. CUFF.3259.0
  misc_feature: Variant of the nucleotide sequence at SEQ ID NO 1160
gcagaggccaggccgcgacgggagttgggcatcgccgacaatgttggtgtagtgatgctccacgttgcccgcgtcgcatgccacctcaccacgcattcaccagccgccacgcagcctgctcccacgctcactctcaacaacattgtgccaccaaaacactccaattgctgacattactagagtatcgtcacggacgtagtcactagaatcattaattccgccattattctaccagcgcagcgcaatcttggggctgcaccttgggctaaggtagtctgcggcgcaatcggctgccccgccaaagcacgatatcatagccacagacacgtccctttctgcacttttcactttctcaaccacgcctttctccgtattgcctctctgcgccgcgtatcgttgttgccgactaggtcattctatcaaccgccactcgcgcggccttgacgacgatagtggaggtcatgcaaacccgtcgcaactcacagagcacgagacaaaatgactctagaagactggctggacgaactatgcgtccgattcatcataaacctcccgcgcgaggacctctcctccgtcgcccgcatctgcttccaaattgaagaggcccaatggttctacgaagacttcatccgaccgctcgaccccaccctcccctccatgtccctccgcaccttcagcctcaagatgttccagcactgcccgctgctcgcctctttctccgccgacatacacatcaaggccttcgatgagtttatgcagtacaagactcgcgtcccagtgcgtggcgccatcatgctcaacgatgatatggatgccgcagtgttagtccgcggctacaagaagggagccagctggagtttccccagaggcaagatcaacaagaacgaagatgatctggactgtgccgttcgcgaagtctacgaagagacaggctacgatttgcgggctgccgggttggttgagaagaacgctcccgtacatccgcttgaagtcactatgcatgatcaacaggtgcgcctctatgttttccgcggcatcccagaggacaccatctttgagacaaggacgaggaaggaaattggagccatcaaatggtacaaagtctccgaccttccagcctatcgcaagaaaaaggcagccaaaggtccagagcaacagccgtcgtcgtcggacaggttctacatggttgcacccttcatggtccacctgagacagtgggttcttaagcagaagaagctagatatgcagaatgctccggcccaccctggtcacgaccaccctgtgtcctactacgaggagaacgggacagacgataacatgctgcaagagccgcctgccgtcgaggccagcacgcagcccgagatattcgagagcgcaaccaaggaactgcaccgtctactcaagatcaagcccccaacccaaggcctgcagctgccatcgccaatatccgagcaacaggctggccagagcttgatgtccatactacagccgagcgggccacagtcacgagtagcaaccggccaaagccagcgctttatccagccacaaactccccgtgaccaggaggtgacagttgcggctcaaccgcacgcaccacacccccatcatcccactcagctacagcctctatcaaactactcaacacccccagccttccccattgctcctgacgcaaacaacaacacaaactaccagtcacatgtgatccagcagcaagcaccacagcagagagctcggcctcacgtttacgtggaccatcaggtacatcaccatatacatcatacccagcattatcagaatcaaccaccgcctgcacatcccttacctaatccacccgtccaactcttgcatccgcaaccactcccaccccaggttcagaaggcaatgctgttccgcgacatggcatctccgcccaatgctgtcaatcctaacagtcgtgctggtccgccaaccatgccgcagccatcgctactgtcaggtcagagtatgcatcaccaaccctcaactgttcataatcagcaaccggcctcgaagccctcgacacagttgccagcccattctgcaaatctactgaacgtgctcaaaggaagtggttcggcaaaaccatcatcccaagaacccccgagccaccccttaccatctctgcctagttctcatcatcatcacgtgccccaaggtagtgtggatcattcgcggaacgggccaggcccatctattgcacaggataagtttgcgttgccctatcgatcgtctctaccacctactactcgtcccgctgccaccatgactgcccctgcaccgttctcgaccacggcttctcgcatgaatgcaccaacagatgtgcatcgtgctggcctgctcgatatattcaagcggcaaggctctcctaaagtggccgcgaatcccatgggtggcgcgagcacgtcatcacatttatctcattcccagcttgacacagtccagtcgcccagataccaaggccagaagaaaggctcgccagcggcacaaattcttagaaatgctgccgaagagactgggaagccgattcaaatgaaccccgagactaaccttccatacggggctcactctatcctagcacgcccgcgtcgacagctgagtgggacatcggcccacagccctgcactgtctagacaaggttccaatgactcccacggtcatgttcccactagttcgcggcctagtcctgaagcatttcggcggcaacgatcgccgtaccaggcgcaagcacacttacagagtatgcattcaccacagcgccgcactccgcagacggaggcgtacactggctctgcctatgcatactccaaccaaggcagtatgcccaatccacttgcccagaatgcgccaactggtggaggaatgcctggacccggcaacttgaagcctcgaacgaattcgacaacagatcagcagaagaacctcctcgcgattctcggcggcaaagcccacggtggtacggagcagagcaaggggaaggagacaatgagcccagcactgtctggccacggggctccagcacctcgatcaaggctggcgtcattcgcatcaaatgactcgggacgtgccagcgctgctgcgatttcctcggcggatcgcaattttctcctagatttcttaggaaatgcagctagtaatggcaagaagaactaggcttgatgtacagatggtgacgatctcggcggacagggataccagtcggatagggatgtcgcctgggcgtgtgagcgtgacataaaagagagaccctcgacggacatctacataattctcgttacttggcagcgttcagcaggtatttgctacgaaagcgaaaataggttgtagatactctaggtctggctctgataggtgaaaaaacagaagaaaatgaacaggagttgctcctatgttttatgtgtctatacgcgcgcgagtacgtggtatgaactgtgagcggtctggcgcttgacttcgaataggattgggatatgtgaatgaggatggtttgggacagacagacaaattggcccaatgcaccgattggcaagccgcatctttaattattggccgtgatgtggatagcccaaggctgtagttttgggatagatggaagtgttggtggcgggatgatcgagagacaacaaagcggaatgtagtggcagcctgcaggtagccgctcgaaggacctcagcggcgcgtacagcgcgtgtagcaatgacagcgtcgtagttggggcctgtcttcctcctcatgtgcctttgtcacatccgaggtcgcttgctacccttgacttactctactactccgatcaagttggaggctatgacccttcattccgccacaatccctcaagaatattcaaaccagacgctgttttcattccactctattcgaccatgaagccct

SEQ ID NO: 1163 - DNA, 624 bp, Muscodor strobelii
  misc_feature: SGI cDNA ID NO. 559980
  misc_feature: Encodes the peptide sequence at SEQ ID NO 1164
atggagacaagaacagaacaagccgagcaagttagcacgacggccagagagagcgtgccacccttcatctggatcaatggctatccaggtgtcggtaagctcacagtagccaaggagttacgcacaatgctagaaaagtccaaagtgctcgataaccacctgttaattgatcccgtcgcagccgtattcgacagatcagacccagaataccaacccgcacgcacaagattacgacgaatgatgctaggctccatcgccgagtctgagtctaagaagcacataacctggatcttcacagatcaacgatcaggccctgaagggcgcgagggagctgaggactaccaacatgccgcggccaggaaaggcgctccgttcatcccggtaatacttgattgcgaacgagatgaacatttcagaagggtcgtcagtgatggtagaggcaagaccaacaccaagcttaccgacctcgtgatcttgtcgagtatcttggagggagaggagagttggcggtttcggatcccgtatgaacttgagctggatgtcacgcatttgactccaatagaagcggcaaggaggatacgtgagcatgttaggagtgtgatggagataattgaacggacgtaa

SEQ ID NO: 1164 - protein, 207 aa, Muscodor strobelii
  misc_feature: SGI Peptide ID NO. 559980
  misc_feature (15)..(201): NCBI GI: 256723841 Blast Desc: NECHADRAFT_78449 [Nectria haematococca mpVI 77-13-4]
  misc_feature (21)..(162): NCBI GI: 256722431 Blast Desc: NECHADRAFT_34920 [Nectria haematococca mpVI 77-13-4]
  misc_feature (21)..(141): NCBI GI: 256722483 Blast Desc: NECHADRAFT_29433 [Nectria haematococca mpVI 77-13-4]
  misc_feature (21)..(143): NCBI GI: 46124101 Blast Desc: FG06428.1 [Gibberella zeae PH-1]
  misc_feature (22)..(197): NCBI GI: 190890593 Blast Desc: RHECIAT_CH0000972 [Rhizobium etli CIAT 652] gi|190695872|gb|ACE89957.1| conserved protein [Rhizobium etli CIAT 652]
  misc_feature (22)..(193): NCBI GI: 86356528 Blast Desc: RHE_CH00882 [Rhizobium etli CFN 42] gi|86280630|gb|ABC89693.1| conserved protein [Rhizobium etli CFN 42]
  misc_feature (22)..(197): NCBI GI: 218674029 Blast Desc: RetlG_22092 [Rhizobium etli GR56]
  misc_feature (22)..(193): NCBI GI: 218682935 Blast Desc: RetlC8_29561 [Rhizobium etli CIAT 894]
  misc_feature (22)..(201): NCBI GI: 241202922 Blast Desc: Rleg_0168 [Rhizobium leguminosarum bv. trifolii WSM1325] gi|240856812|gb|ACS54479.1| conserved [Rhizobium leguminosarum bv. trifolii WSM1325]
  misc_feature (22)..(200): NCBI GI: 218663027 Blast Desc: RetlI_28554 [Rhizobium etli IE4771]
METRTEQAEQVSTTARESVPPFIWINGYPGVGKLTVAKELRTMLEKSKVLDNHLLIDPVAAVFDRSDPEYQPARTRLRRMMLGSIAESESKKHITWIFTDQRSGPEGREGAEDYQHAAARKGAPFIPVILDCERDEHFRRVVSDGRGKTNTKLTDLVILSSILEGEESWRFRIPYELELDVTHLTPIEAARRIREHVRSVMEIIERT

SEQ ID NO: 1165 - DNA, 732 bp, Muscodor strobelii
  misc_feature: SGI EST ID NO. CUFF.3229.0
  misc_feature: Variant of the nucleotide sequence at SEQ ID NO 1163
cacgattgtgagcatataagcctgacttctcttcaaatttacctaatgcgcatcaaacttcacaatcccaattctcgtcccgtaattatggagacaagaacagaacaagccgagcaagttagcacgacggccagagagagcgtgccacccttcatctggatcaatggctatccaggtgtcggtaagctcacagtagccaaggagttacgcacaatgctagaaaagtccaaagtgctcgataaccacctgttaattgatcccgtcgcagccgtattcgacagatcagacccagaataccaacccgcacgcacaagattacgacgaatgatgctaggctccatcgccgagtctgagtctaagaagcacataacctggatcttcacagatcaacgatcaggccctgaagggcgcgagggagctgaggactaccaacatgccgcggccaggaaaggcgctccgttcatcccggtaatacttgattgcgaacgagatgaacatttcagaagggtcgtcagtgatggtagaggcaagaccaacaccaagcttaccgacctcgtgatcttgtcgagtatcttggagggagaggagagttggcggtttcggatcccgtatgaacttgagctggatgtcacgcatttgactccaatagaagcggcaaggaggatacgtgagcatgttaggagtgtgatggagataattgaacggacgtaataaaagagatctgggcttgcg

SEQ ID NO: 1166 - DNA, 708 bp, Muscodor strobelii
  misc_feature: SGI cDNA ID NO. 559981
  misc_feature: Encodes the peptide sequence at SEQ ID NO 1167
atggagacaagaacagaacaagccgagcaagttagcacgacggccagagagagcgtgccacccttcatctggatcaatggctatccaggtgtcggtaagctcacagtagccaaggagttacgcacaatgctagaaaagtccaaagtgctcgataaccacctgttaattgatcccgtcgcagccgtattcgacagatcagacccagaataccaacccgcacgcacaagattacgacgaatgatgctaggctccatcgccgagtctgagtctaagaagcacataacctggatcttcacagatcaacgatcaggccctgaagggcgcgagggagctgaggactaccaacatgccgcggccaggaaaggcgctccgttcatcccggtaatacttgattgcgaacgagatgaacatttcagaagggtcgtcagtgatggtagaggcaagaccaacaccaagcttaccgacctcgtgatcttgtcgagtatcttggagggagaggagagttggcggtttcggatcccgtatgaacttgagctggatgtcacgcatttgactccaatagaagcggcaaggaggatactaaaacgcaagctgcgagatatgttgctacggcatcgtgcgtatacaggtggtttccacgacgtgttttccctgatgtcaatcatgaaactcgtcaccacataccctatcgatgcaaatgcttcgtga

SEQ ID NO: 1167 - protein, 235 aa, Muscodor strobelii
  misc_feature: SGI Peptide ID NO. 559981
  misc_feature (15)..(199): NCBI GI: 256723841 Blast Desc: NECHADRAFT_78449 [Nectria haematococca mpVI 77-13-4]
  misc_feature (21)..(162): NCBI GI: 256722431 Blast Desc: NECHADRAFT_34920 [Nectria haematococca mpVI 77-13-4]
  misc_feature (21)..(141): NCBI GI: 256722483 Blast Desc: NECHADRAFT_29433 [Nectria haematococca mpVI 77-13-4]
  misc_feature (21)..(143): NCBI GI: 46124101 Blast Desc: FG06428.1 [Gibberella zeae PH-1]
  misc_feature (22)..(194): NCBI GI: 190890593 Blast Desc: RHECIAT_CH0000972 [Rhizobium etli CIAT 652] gi|190695872|gb|ACE89957.1| conserved protein [Rhizobium etli CIAT 652]
  misc_feature (22)..(194): NCBI GI: 86356528 Blast Desc: RHE_CH00882 [Rhizobium etli CFN 42] gi|86280630|gb|ABC89693.1| conserved protein [Rhizobium etli CFN 42]
  misc_feature (22)..(194): NCBI GI: 218682935 Blast Desc: RetlC8_29561 [Rhizobium etli CIAT 894]
  misc_feature (22)..(194): NCBI GI: 218674029 Blast Desc: RetlG_22092 [Rhizobium etli GR56]
  misc_feature (22)..(190): NCBI GI: 241202922 Blast Desc: Rleg_0168 [Rhizobium leguminosarum bv. trifolii WSM1325] gi|240856812|gb|ACS54479.1| conserved [Rhizobium leguminosarum bv. trifolii WSM1325]
  misc_feature (22)..(196): NCBI GI: 169612199 Blast Desc: SNOG_09218 [Phaeosphaeria nodorum SN15] gi|111062290|gb|EAT83410.1| SNOG_09218 [Phaeosphaeria nodorum SN15]
METRTEQAEQVSTTARESVPPFIWINGYPGVGKLTVAKELRTMLEKSKVLDNHLLIDPVAAVFDRSDPEYQPARTRLRRMMLGSIAESESKKHITWIFTDQRSGPEGREGAEDYQHAAARKGAPFIPVILDCERDEHFRRVVSDGRGKTNTKLTDLVILSSILEGEESWRFRIPYELELDVTHLTPIEAARRILKRKLRDMLLRHRAYTGGFHDVFSLMSIMKLVTTYPIDANAS

SEQ ID NO: 1168 - DNA, 732 bp, Muscodor strobelii; identical to SEQ ID NO: 1165
  misc_feature: SGI EST ID NO. CUFF.3229.0
  misc_feature: Variant of the nucleotide sequence at SEQ ID NO 1166

SEQ ID NO: 1169 - DNA, 1548 bp, Muscodor strobelii
  misc_feature: SGI cDNA ID NO. 559982
  misc_feature: Encodes the peptide sequence at SEQ ID NO 1170
atgtctcacgctaaagcgcaaaacaataagcctgaggatgcagtgcatctcgagaaaatggcgaatgaaaccggcgtcgataagtatgaaggaaagatcgatgcagaggatcagcgagatgcagtcggttacaaagagtaccgggaggcattagacctagatatcagcgacaaagagttccgccatgtgagatggaaaattgattttgtcatcatgccaatgttcttgataacgcaagcattgcaattcatcgataagacttctctcaactatgcaaacttatttggataccaggaggccctaggtctcaagggcatggaattcaactatctttccgccatagtaatttacgccggatacttctttgggcaatatccttgcggttggttgattgggagatttcctgcgcagaaggttatggctatcagtatcttgctttggggtgcaactgtcttgatcttgacacaatgtagaacttattccggtgcttttatcatgggcatctttgaggctgccgtgacgcctggcttgacgctcatgaccggtttctggtataccagacgggagatccctctgcgtcaatgcatctggtactcttcactggggtggggaggaattgtcggctcttatatatcactaggagtagcaaagcttcctgttgacttgaagccggagcgctgggagttaatcttcttcatcctcggtggcgccacagtactatgggcgttcgttatctggttcttgctctcagattcaccttctaatgctcgatttctcaatcaccgagagcgattgattgcggttaaacgagtctccggtaatgaaactggtatcaagaacaaacatttcgataaggcacaagctctgaagggagttacggatccgaaaacaattctgcttttcatcagcgtcatcgctgccgcaattccaaatggtgtcgtcaattccttctccacgatcatcattcgcgatcttggattctccaccacaatgaccacagaacttaagtcagtgggcgatgccgttcaaatcgtggcacttttcatcggcgggttcttcattctcaacgtcccgaactcacgattactcactgcaacagttgccaaccttctctgtaccacggctgccgcgactctagctttcttacccagatctaacacatggggccggctcgtctccttttggcttgtcaactcacagtccgttggctttacagtatcgctcacgaccatctcttccaatatggcaggatacactcataggtcacttgcgagtgcgctagttttcactgcatactgctggggcaactttgccgggccattcgtagtaaagcagagcgaatcacccaacttcaccagcgcaactatcggcttgctagttggctacgcgatcaaattgatttgccatctgttgttgcttgcatacatgttcaccgagaacaagcgacgcgacaagaagtacggaccggcaaacaaagaaatcagcgacgaatgtggaatgagggatatgactgagttcgaaaataaagatttccgttacgtattataa

SEQ ID NO: 1170 - protein, 515 aa, Muscodor strobelii
  misc_feature: SGI Peptide ID NO. 559982
  misc_feature (75)..(440): Pfam Id: PF07690 Pfam Desc: Major Facilitator Superfamily
  misc_feature (33)..(515): NCBI GI: 46109820 Blast Desc: FG01792.1 [Gibberella zeae PH-1]
  misc_feature (15)..(515): NCBI GI: 115386802 Blast Desc: conserved [Aspergillus terreus NIH2624] gi|114190940|gb|EAU32640.1| conserved [Aspergillus terreus NIH2624]
  misc_feature (27)..(515): NCBI GI: 67900786 Blast Desc: AN7380.2 [Aspergillus nidulans FGSC A4] gi|40742561|gb|EAA61751.1| AN7380.2 [Aspergillus nidulans FGSC A4] gi|259483260|tpe|CBF78499.1| TPA: conserved [Aspergillus FGSC
  misc_feature (44)..(515): NCBI GI: 154296608 Blast Desc: BC1G_12712 [Botryotinia fuckeliana B05.10] gi|150843295|gb|EDN18488.1| BC1G_12712 [Botryotinia fuckeliana B05.10]
  misc_feature (44)..(515): NCBI GI: 115401858 Blast Desc: [Aspergillus terreus NIH2624] gi|114190458|gb|EAU32158.1| [Aspergillus terreus NIH2624]
  misc_feature (44)..(515): NCBI GI: 156058986 Blast Desc: SS1G_03505 [Sclerotinia sclerotiorum 1980] gi|154701292|gb|EDO01031.1| SS1G_03505 [Sclerotinia sclerotiorum 1980]
  misc_feature (44)..(500): NCBI GI: 255953755 Blast Desc: Pc21g05850 [Penicillium chrysogenum Wisconsin 54-1255] gi|211589341|emb|CAP95482.1| Pc21g05850 [Penicillium chrysogenum Wisconsin 54-1255]
  misc_feature (31)..(515): NCBI GI: 238507341 Blast Desc: MFS transporter, [Aspergillus flavus NRRL3357] gi|220689585|gb|EED45936.1| MFS transporter, [Aspergillus flavus NRRL3357]
  misc_feature (31)..(515): NCBI GI: 169786341 Blast Desc: [Aspergillus oryzae RIB40] gi|83776379|dbj|BAE66498.1| protein product [Aspergillus oryzae]
  misc_feature (44)..(515): NCBI GI: 169603678 Blast Desc: SNOG_04847 [Phaeosphaeria nodorum SN15] gi|111066118|gb|EAT87238.1| SNOG_04847 [Phaeosphaeria nodorum SN15]
MSHAKAQNNKPEDAVHLEKMANETGVDKYEGKIDAEDQRDAVGYKEYREALDLDISDKEFRHVRWKIDFVIMPMFLITQALQFIDKTSLNYANLFGYQEALGLKGMEFNYLSAIVIYAGYFFGQYPCGWLIGRFPAQKVMAISILLWGATVLILTQCRTYSGAFIMGIFEAAVTPGLTLMTGFWYTRREIPLRQCIWYSSLGWGGIVGSYISLGVAKLPVDLKPERWELIFFILGGATVLWAFVIWFLLSDSPSNARFLNHRERLIAVKRVSGNETGIKNKHFDKAQALKGVTDPKTILLFISVIAAAIPNGVVNSFSTIIIRDLGFSTTMTTELKSVGDAVQIVALFIGGFFILNVPNSRLLTATVANLLCTTAAATLAFLPRSNTWGRLVSFWLVNSQSVGFTVSLTTISSNMAGYTHRSLASALVFTAYCWGNFAGPFVVKQSESPNFTSATIGLLVGYAIKLICHLLLLAYMFTENKRRDKKYGPANKEISDECGMRDMTEFENKDFRYVL

SEQ ID NO: 1171 - DNA, 316 bp, Muscodor strobelii
  misc_feature: SGI EST ID NO. CUFF.3235.0
  misc_feature: Variant of the nucleotide sequence at SEQ ID NO 1169
tccatcttaacagcactgcatactgctggggcaactttgccgggccattcgtagtaaagcagagcgaatcacccaacttcaccagcgcaactatcggcttgctagttggctacgcgatcaaattgatttgccatctgttgttgcttgcatacatgttcaccgagaacaagcgacgcgacaagaagtacggaccggcaaacaaagaaatcagcgacgaatgtggaatgagggatatgactgagttcgaaaataaagatttccgttacgtattataaaagacatcgtgtgacttttttttcttagagatatataggcc

SEQ ID NO: 1172 - DNA, 861 bp, Muscodor strobelii
  misc_feature: SGI cDNA ID NO. 559983
  misc_feature: Encodes the peptide sequence at SEQ ID NO 1173
atgggtcagaagttatcctttctaagcaggcgggcatcggaacctacgagcacatgtcctaaaaacgagtcgacatcgagcgcaagcaatgacgaatacctcgcaaagcccagtggcacctgttgcctgaaaggtacaattcacgaaggaaagtcaaggggcacatgggagacgattgcaagcatagagacatacatatcgtatcccccgaaaggaaaagagaatggtcacgtgcttctctactttccggatgtctggggtatgtttccgaatggtttactagtcatggacgcattcgccgacgcgggctttattgttttgggacttgattacttccgcggtgacccagtgtggaagcatcgcaaaaacagacatgatgtgacaacaaaccccaacttcgactacgaagcctggaaaaagaaacatacgacatttgcaaacgaagcggtaccgaaatgggtagcagaggtcaaagatcgttatagcagcacgacgaaatttgcttgcgtggggtactgcttcggtgcgccgtatgtctgcgatgagcttgcgaaggacgtcatcacagtgggtgccgttgcgcacccagcttttctgaaagaacatcatttccggcagatccaaaaaccacttctattgtcttgttccgagattgatcacaccttcgatctcccgtctcggcgaaaagcgctggatattctacaaagcgagaagaagatttatcaccatcagctcttttctggcgttgagcatggcttcgcattgcgtggcgatccaaacgacccatatcaaagatgggtcaaagagcaaagtctatcgtctattgttagatggttcgagttttggttatcgaaaccatga

SEQ ID NO: 1173 - protein, 286 aa, Muscodor strobelii
  misc_feature: SGI Peptide ID NO. 559983
  misc_feature (62)..(283): Pfam Id: PF01738 Pfam Desc: Dienelactone hydrolase family
  misc_feature (30)..(285): NCBI GI: 46109822 Blast Desc: FG01793.1 [Gibberella zeae PH-1]
  misc_feature (22)..(264): NCBI GI: 67900788 Blast Desc: AN7381.2 [Aspergillus nidulans FGSC A4] gi|40742562|gb|EAA61752.1| AN7381.2 [Aspergillus nidulans FGSC A4]
  misc_feature (22)..(265): NCBI GI: 259483259 Blast Desc: TPA: conserved [Aspergillus nidulans FGSC A4]
  misc_feature (27)..(284): NCBI GI: 145246294 Blast Desc: An12g03190 [Aspergillus niger] gi|134080111|emb|CAK46092.1| protein product [Aspergillus niger]
  misc_feature (31)..(285): NCBI GI: 46103363 Blast Desc: FG00089.1 [Gibberella zeae PH-1]
  misc_feature (25)..(285): NCBI GI: 238492629 Blast Desc: dienelactone hydrolase, [Aspergillus flavus NRRL3357] gi|220696045|gb|EED52387.1| dienelactone hydrolase, [Aspergillus flavus NRRL3357]
  misc_feature (34)..(282): NCBI GI: 242218772 Blast Desc: [Postia placenta Mad-698-R] gi|220725667|gb|EED79645.1| [Postia placenta Mad-698-R]
  misc_feature (26)..(279): NCBI GI: 170106662 Blast Desc: [Laccaria bicolor S238N-H82] gi|164640453|gb|EDR04718.1| [Laccaria bicolor S238N-H82]
  misc_feature (29)..(285): NCBI GI: 169842998 Blast Desc: CC1G_02811 [Coprinopsis cinerea okayama7#130] gi|116510686|gb|EAU93581.1| CC1G_02811 [Coprinopsis cinerea okayama7#130]
  misc_feature (22)..(285): NCBI GI: 169857384 Blast Desc: CC1G_11776 [Coprinopsis cinerea okayama7#130] gi|116503573|gb|EAU86468.1| CC1G_11776 [Coprinopsis cinerea okayama7#130]
MGQKLSFLSRRASEPTSTCPKNESTSSASNDEYLAKPSGTCCLKGTIHEGKSRGTWETIASIETYISYPPKGKENGHVLLYFPDVWGMFPNGLLVMDAFADAGFIVLGLDYFRGDPVWKHRKNRHDVTTNPNFDYEAWKKKHTTFANEAVPKWVAEVKDRYSSTTKFACVGYCFGAPYVCDELAKDVITVGAVAHPAFLKEHHFRQIQKPLLLSCSEIDHTFDLPSRRKALDILQSEKKIYHHQLFSGVEHGFALRGDPNDPYQRWVKEQSLSSIVRWFEFWLSKP

SEQ ID NO: 1174 - DNA, 454 bp, Muscodor strobelii
  misc_feature: SGI EST ID NO. CUFF.3246.0
  misc_feature: Variant of the nucleotide sequence at SEQ ID NO 1172
attgatttcgagttctgcattctcctactttaggatgatctagtatcgatttatacaatgggtcagaagttatcctttctaagcaggcgggcatcggaacctacgagcacatgtcctaaaaacgagtcgacatcgagcgcaagcaatgacgaatacctcgcaaagcccagtggcacctgttgcctgaaaggtacaattcacgaaggaaagtcaaggggcacatgggagacgattgcaagcatagagacatacatatcgtatcccccgaaaggaaaagagaatggtcacgtgcttctctactttccggatgtctggggtatgtttccgaatggtttactagtcatggacgcattcgccgacgcgggctttattgttttgggacttgattacttccgcggtgacccagtgtggaagcatcgcaaaaacagacatgatgtgacaacaaaccccaact

SEQ ID NO: 1175 - DNA, 852 bp, Muscodor strobelii
  misc_feature: SGI cDNA ID NO. 559984
  misc_feature: Encodes the peptide sequence at SEQ ID NO 1176
atgacaccacctagggcatttgacttcaccggtgatgtggctatcgtcacgggagccggttcgcgtatggacggcgagattggcaacggccgtgctgccgcaattcttcttgctcgccagggagcaaaagttgcactagtcgacttcaacgtcgattgggcaaaagagacaaagcgcatgattgacgaggagggcggcgtctcggaggtcattcaagccgatgtcactgttgaagaatcatgtcaaaatgctgtgaagaagaccgttgagctgtacggcgccgtacatattcttgtgaacattgtgggcgtgggaggtgcaatgggcaatgcgacagagatcaatatggatgcttgggagcgagacttccggataaacgttacgagtatggtcttaatgagccgacatgcgattcccgagatgcgcaaagctggacggggttctattatcaacatgtcatcagtcagtggattactcggtggaaatcctagcctactgtaccctacgaccaaaggcgccatcattcaaatgacgagagcgatggcggctcatcatggacaagaaaacattagagtcaactgcgtcgcgcctggaatggtctacacaccaatgacgcgcggacggggtatgacggatgagacgagacaagcccggataaatcagaacttgatgaagaaagaaggcactgggtgggatgtcggctatgcgattctatttcttgccagtaaagaggctggctggataaccggacttatcatgcccgtagatggaggtacgacggctgggaaagcagatcggcctgctttgaaagccgacgatctggcggcgaagaacactggtataagtaattga

SEQ ID NO: 1176 - protein, 283 aa, Muscodor strobelii
  misc_feature: SGI Peptide ID NO. 559984
  misc_feature (12)..(186): Pfam Id: PF00106 Pfam Desc: short chain dehydrogenase
  misc_feature (30)..(186): Pfam Id: PF00106 Pfam Desc: short chain dehydrogenase
  misc_feature (1)..(283): NCBI GI: 46109824 Blast Desc: FG01794.1 [Gibberella zeae PH-1]
  misc_feature (25)..(283): NCBI GI: 115386804 Blast Desc: conserved [Aspergillus terreus NIH2624] gi|114190941|gb|EAU32641.1| conserved [Aspergillus terreus NIH2624]
  misc_feature (1)..(283): NCBI GI: 259483258 Blast Desc: TPA: conserved [Aspergillus nidulans FGSC A4]
  misc_feature (1)..(283): NCBI GI: 67900788 Blast Desc: AN7381.2 [Aspergillus nidulans FGSC A4] gi|40742562|gb|EAA61752.1| AN7381.2 [Aspergillus nidulans FGSC A4]
  misc_feature (4)..(263): NCBI GI: 94313870 Blast Desc: short-chain dehydrogenase/reductase SDR [Ralstonia metallidurans CH34] gi|93357722|gb|ABF11810.1| short-chain dehydrogenase/reductase SDR [Ralstonia metallidurans CH34]
  misc_feature (4)..(273): NCBI GI: 121607121 Blast Desc: short-chain dehydrogenase/reductase SDR [Verminephrobacter eiseniae EF01-2] gi|121551761|gb|ABM55910.1| short-chain dehydrogenase/reductase SDR [Verminephrobacter
  misc_feature (5)..(263): NCBI GI: 121611583 Blast Desc: short-chain dehydrogenase/reductase SDR [Verminephrobacter eiseniae EF01-2] gi|121556223|gb|ABM60372.1| short-chain dehydrogenase/reductase SDR [Verminephrobacter
  misc_feature (4)..(264): NCBI GI: 225685145 Blast Desc: 2,5-dichloro-2,5-cyclohexadiene-1,4-diol dehydrogenase [Paracoccidioides brasiliensis Pb03]
  misc_feature (2)..(261): NCBI GI: 226279419 Blast Desc: 2,5-dichloro-2,5-cyclohexadiene-1,4-diol dehydrogenase [Paracoccidioides brasiliensis Pb01]
  misc_feature (3)..(261): NCBI GI: 258577741 Blast Desc: conserved [Uncinocarpus reesii 1704] gi|237903318|gb|EEP77719.1| conserved [Uncinocarpus reesii 1704]
  misc_feature (13)..(261): SWISSPROT Homolog: EC 1.1.1.163 Cyclopentanol dehydrogenase
MTPPRAFDFTGDVAIVTGAGSRMDGEIGNGRAAAILLARQGAKVALVDFNVDWAKETKRMIDEEGGVSEVIQADVTVEESCQNAVKKTVELYGAVHILVNIVGVGGAMGNATEINMDAWERDFRINVTSMVLMSRHAIPEMRKAGRGSIINMSSVSGLLGGNPSLLYPTTKGAIIQMTRAMAAHHGQENIRVNCVAPGMVYTPMTRGRGMTDETRQARINQNLMKKEGTGWDVGYAILFLASKEAGWITGLIMPVDGGTTAGKADRPALKADDLAAKNTGISN

SEQ ID NO: 1177 - DNA, 1142 bp, Muscodor strobelii
  misc_feature: SGI EST ID NO. CUFF.3291.0
  misc_feature: Variant of the nucleotide sequence at SEQ ID NO 1175
gactaataacattttagtactcggtggaaatcctagcctactgtaccctacgaccaaaggcgccatcattcaaatgacgagagcgatggcggctcatcatggacaagaaaacattagagtcaactgcgtcgcgcctggaatggtctacacaccaatgacgcgcggacggggtatgacggatgagacgagacaagcccggataaatcagaacttgatgaagaaagaaggcactgggtgggatgtcggctatgcgattctatttcttgccagtaaagaggctggctggataaccggacttatcatgcccgtagatggaggtacgacggctgggaaagcagatcggcctgctttgaaagccgacgatctggcggcgaagaacactggtataagtaattgagccgtctaccaatcaaagtatgaaagcctcattcctagaatgctatacaagcaaagggtcgctccttaagtcaatactcggaccacttccataaacttgtaattaattgtaaatcacgtaccatttagaggccaatactttgctagatagagactaaagagcatacaggacaaggggccttgtgcttggcgtaggcgaataacattattgtacagcggggtaaacaagatcacccatgctcatctgcatctcggggaaacagtccaaggccgccatagagtcgtggccacttggatatgagttgaaatcaaattctaatgacatgtctggaccgagatagggaaaagcaggaatatagccattgtagggccccgctggaacagacaaatcaggacaacgtctgtcgtcttccgtaattctcgatgtgtttggagcgggcgaacgcgcaaggcctttgactatgatattcaagcttcgttctaggagagggcatttttttcattccggcgttcaaggctcggaggtaggtttttagaatctcgttcgcggtgcctttccctgatttggcatcttcaaggatcgcagacgcaccagtgtagatacaataccccattaaataagtgatgttacctaggccaaacgtggattcaatcagaaggaccaatttctcgatacttctggacgcgctgatgcacactttataatatgcaggaacagaccaaaaggggcgatttgccaatatcac

SEQ ID NO: 1178 - DNA, 1206 bp, Muscodor strobelii
  misc_feature: SGI cDNA ID NO. 559985
  misc_feature: Encodes the peptide sequence at SEQ ID NO 1179
atgaatattgtgatagactccacgataggtcccggaagctcacaaaacaccgaatacgcagagattatcgcacgtgatcgattagtctcttctgcgtcaagttcccagccgcctctgaaagatatcatggtgcaagacctgacagtggatgagcacggtgaagttgtctactatggaccgacttcagcagtccatgatcccccggacgcagagtctcctgtattgccggcatcgacgacatgcccagcctctcggtctaaggcggacatgaggcttgccctcagcgctcatgcccgtgaaagtgccacatgggaagaattcgctttgggaaatgcatctttagagaccggcatccctagagctgctatggccaaacttcttcatactcacttcacctgggtgtgtcccatgttcatgtgggtctaccgacctgcttttgttcgtgatatggcgacaggaggacgctactattctgagtttcttctgactgttatttgcgcccattcagccaaatatcaagacggcaattttgtagacatgctcctggcacgagcccgtcggctgcttggcacggccatacaacagccaagttctattccgactatacaggccttactgcagctgagcgctcgtgacttggcccaaggctcaatttcacaagcgtgggtctatagcggcattgccttccgcatggccagcgaccttggacttcaacattgtggtgccgacctcaagggcatgagcgcgattgatctcacggttcgccgaaggttattttggggatgttatttctgggacaaagctacaagcctatatgccggtcgattaccggccgttactgaggtgttagatccgagtactctagatctcttggatgacgatgaatttgatacttggaccccgtactacggcgacacgacatatctccagactcatacaaaaatccagtatccagcaatgcgaagctattctgtttcgtctttcgttaactcatgcaagctagccatgattatcagcgacgtcatcattcaactctacgatcggcgcaacaggtccctcacagaaggggttatcaaaaccatcaatacacgattagatatatggcgagctcagtctccatcgcatctaagatacgaccctgataacctaccggccgtctgtccgcctcctcatcttatcgcccaaaagtccgtgaccaccctttga

SEQ ID NO: 1179 - protein, 401 aa, Muscodor strobelii
  misc_feature: SGI Peptide ID NO. 559985
  misc_feature (198)..(295): Pfam Id: PF04082 Pfam Desc: Fungal specific transcription factor domain
  misc_feature (29)..(396): NCBI GI: 46109826 Blast Desc: FG01795.1 [Gibberella zeae PH-1]
  misc_feature (11)..(396): NCBI GI: 238494512 Blast Desc: AFLA_057480 [Aspergillus flavus NRRL3357] gi|220695142|gb|EED51485.1| AFLA_057480 [Aspergillus flavus NRRL3357]
  misc_feature (11)..(396): NCBI GI: 169777383 Blast Desc: [Aspergillus oryzae RIB40] gi|83771894|dbj|BAE62024.1| protein product [Aspergillus oryzae]
  misc_feature (47)..(394): NCBI GI: 67900784 Blast Desc: AN7379.2 [Aspergillus nidulans FGSC A4] gi|40742560|gb|EAA61750.1| AN7379.2 [Aspergillus nidulans FGSC A4]
  misc_feature (47)..(394): NCBI GI: 259483261 Blast Desc: TPA: Zn(II)2Cys6 transcription factor (Eurofung) [Aspergillus nidulans FGSC A4]
  misc_feature (47)..(394): NCBI GI: 115386800 Blast Desc: conserved [Aspergillus terreus NIH2624] gi|114190939|gb|EAU32639.1| conserved [Aspergillus terreus NIH2624]
  misc_feature (44)..(393): NCBI GI: 238837524 Blast Desc: conserved [Microsporum canis CBS 113480]
  misc_feature (45)..(394): NCBI GI: 261356974 Blast Desc: conserved [Verticillium albo-atrum VaMs.102]
  misc_feature (45)..(398): NCBI GI: 67517328 Blast Desc: AN0937.2 [Aspergillus nidulans FGSC A4] gi|40746810|gb|EAA65966.1| AN0937.2 [Aspergillus nidulans FGSC A4]
  misc_feature (45)..(398): NCBI GI: 259488775 Blast Desc: TPA: Zn(II)2Cys6 transcription factor (Eurofung) [Aspergillus nidulans FGSC A4]
MNIVIDSTIGPGSSQNTEYAEIIARDRLVSSASSSQPPLKDIMVQDLTVDEHGEVVYYGPTSAVHDPPDAESPVLPASTTCPASRSKADMRLALSAHARESATWEEFALGNASLETGIPRAAMAKLLHTHFTWVCPMFMWVYRPAFVRDMATGGRYYSEFLLTVICAHSAKYQDGNFVDMLLARARRLLGTAIQQPSSIPTIQALLQLSARDLAQGSISQAWVYSGIAFRMASDLGLQHCGADLKGMSAIDLTVRRRLFWGCYFWDKATSLYAGRLPAVTEVLDPSTLDLLDDDEFDTWTPYYGDTTYLQTHTKIQYPAMRSYSVSSFVNSCKLAMIISDVIIQLYDRRNRSLTEGVIKTINTRLDIWRAQSPSHLRYDPDNLPAVCPPPHLIAQKSVTTL

SEQ ID NO: 1180 - DNA, 281 bp, Muscodor strobelii
  misc_feature: SGI EST ID NO. CUFF.3265.0
  misc_feature: Variant of the nucleotide sequence at SEQ ID NO 1178
ccgacttcagcagtccatgatcccccggacgcagagtctcctgtattgccggcatcgacgacatgcccagcctctcggtctaaggcggacatgaggcttgccctcagcgctcatgcccgtgaaagtgccacatgggaagaattcgctttgggaaatgcatctttagagaccggcatccctagagctgctatggccaaacttcttcatactcacttcacctgggtgtgtcccatgttcatgtgggtctaccgacctgcttttgttcgtgatatggcgacagg

SEQ ID NO: 1181 - DNA, 579 bp, Muscodor strobelii
  misc_feature: SGI cDNA ID NO. 559986
  misc_feature: Encodes the peptide sequence at SEQ ID NO 1182
atgatgtcgcccatccaagtctctcagcctgtctccggaagcgccagtgccggcatcctagctcaatcgcctagtgacaatattgtcatgggcagaaccagaagaagaagaggaagaagaactcccaccgcatatgttgccttccgagcagccgaaaatcatcgcgtgcgcgcagagtacggaggtgacatcaccgaacgcgacctctccaagatcttttccgatcgatggatgaacatgaccgaggacgagaagaagaagtggcacgagcgagctaaactcatgggctccgctgcagagcccgttccccgtttcggcatcaacccaattggccaaatggcctatgcccaagtccagagctctcgccgcctctccacaccgcagtccgcaaacatgtccggcgagagagcattcaccggcattaatgacacgctttcgatccgactcaggactacgtctcagtcatacaattgcaacgctacgtccggcagcgccatggagcgaaccaatgctcagcacccgctgaatggcacttcatttgacatcgagtcggcagtgagtttggactcgaaggactga

SEQ ID NO: 1182 - protein, 192 aa, Muscodor strobelii
  misc_feature: SGI Peptide ID NO. 559986
  misc_feature (39)..(93): Pfam Id: PF00505 Pfam Desc: HMG (high mobility group) box
MMSPIQVSQPVSGSASAGILAQSPSDNIVMGRTRRRRGRRTPTAYVAFRAAENHRVRAEYGGDITERDLSKIFSDRWMNMTEDEKKKWHERAKLMGSAAEPVPRFGINPIGQMAYAQVQSSRRLSTPQSANMSGERAFTGINDTLSIRLRTTSQSYNCNATSGSAMERTNAQHPLNGTSFDIESAVSLDSKD

SEQ ID NO: 1183 - DNA, 1476 bp, Muscodor strobelii
  misc_feature: SGI cDNA ID NO. 559987
  misc_feature: Encodes the peptide sequence at SEQ ID NO 1184
atggccgctactattactcctagcatagtcgaagttccgaatgaccatggacagttggaacccgggacttattcctgctacagcgccgatgagtggaaagtgtatgtcgaaaacgcacctctcaatgatcgcgcatgggttctccaagagcgacttctttctccccgcattgtccatttcgccgagacacaagtgttctttgaatgtttagagcatagagcatctgagaagtcgccattagggattcccactagaatgattcaggaaaatctccgggaccagctccggcgagatatacggcgcgccgaaattaacgatctgctaccgctttggcaacacatcgtctcagagtacagctcattgcaattaacatatgatattgacaagattgttgccatctcggctatatccacacagctagcaaagtcgtttccggaatccggaagctacgtaaacggacaccgggaacgggggatactaggccagctgtgttggtcatcgtccgactccgctactcgatccggtgacaatagagcaccatcatggtcatgggcatcaatgcacggaagagtcgatccccacttcgtcgattttaatcgtaaagattccaccgatgttgggaaatccatagctcaggtactttcggttccatctgctccagaatctagttacactacgttcggtccagataagcgcctccgtattcggggacctttacaccgagtaagattcttagagcagaacgtggcacagcaagaagtcgaaaagccagagagaaagcgagaaacactggctgaaagtcgcgcacggatcataacacagcagcgcaaccgcgatcccaactacaccggagaaaatctaaggtcattgggaatgtcgtttgctaatgacttgcccacgggtgagtcaggaagacagagaatggatatggatccgagttcgggcttgatagtacaacatagtgaagaagaatacatcactccgaataaaattacttacaataatccgcgacggagcttcgtgatggatctaggggctgagggccatgattatatacatgggaagatccagatggatcaagatttcgaaaagggcgagctagagcgcttgcgaccggttttcatgccgatcttcttcacgcttgacagaattttccccgagatagaaattctcagaggcctaatcttgatggaaacagagcacagcggggtatatcgaagaattggatcttgcacgttaaacaataccgccatggttccatttctgggctgcttaggaaacgctgaagaggatcagttgacttctacttcgcttggctctttgacgattaatgatgatgcttcgtcgaaggaatcgtggcctaggtgtgtagccgaccgcttgaagctcgaagatgcagtgcctgacgggtggggaggaattaccctcgactttgtgcctagagattttccgatgtacgaacttacgatcgtttag

SEQ ID NO: 1184 - protein, 491 aa, Muscodor strobelii
  misc_feature: SGI Peptide ID NO. 559987
  misc_feature (2)..(193): NCBI GI: 116182726 Blast Desc: CHGG_01991 [Chaetomium globosum CBS 148.51] gi|88186288|gb|EAQ93756.1| CHGG_01991 [Chaetomium globosum CBS 148.51]
  misc_feature (32)..(223): NCBI GI: 256721680 Blast Desc: NECHADRAFT_82418 [Nectria haematococca mpVI 77-13-4]
  misc_feature (36)..(242): NCBI GI: 154314449 Blast Desc: BC1G_05318 [Botryotinia fuckeliana B05.10] gi|150848963|gb|EDN24156.1| BC1G_05318 [Botryotinia fuckeliana B05.10]
  misc_feature (39)..(260): NCBI GI: 169622944 Blast Desc: SNOG_14697 [Phaeosphaeria nodorum SN15] gi|111056769|gb|EAT77889.1| SNOG_14697 [Phaeosphaeria nodorum SN15]
  misc_feature (28)..(200): NCBI GI: 238914592 Blast Desc: heterokaryon incompatibility protein [Beauveria bassiana]
  misc_feature (24)..(192): NCBI GI: 154320512 Blast Desc: BC1G_01728 [Botryotinia fuckeliana B05.10] gi|150853417|gb|EDN28609.1| BC1G_01728 [Botryotinia fuckeliana B05.10]
  misc_feature (20)..(245): NCBI GI: 154291024 Blast Desc: BC1G_15400 [Botryotinia fuckeliana B05.10] gi|150847129|gb|EDN22322.1| BC1G_15400 [Botryotinia fuckeliana B05.10]
  misc_feature (4)..(191): NCBI GI: 116179120 Blast Desc: CHGG_00188 [Chaetomium globosum CBS 148.51] gi|88184485|gb|EAQ91953.1| CHGG_00188 [Chaetomium globosum CBS 148.51]
  misc_feature (30)..(220): NCBI GI: 256724258 Blast Desc: NECHADRAFT_87561 [Nectria haematococca mpVI 77-13-4]
  misc_feature (6)..(191): NCBI GI: 145242594 Blast Desc: An09g05610 [Aspergillus niger] gi|134078422|emb|CAL00837.1| protein product [Aspergillus niger]
MAATITPSIVEVPNDHGQLEPGTYSCYSADEWKVYVENAPLNDRAWVLQERLLSPRIVHFAETQVFFECLEHRASEKSPLGIPTRMIQENLRDQLRRDIRRAEINDLLPLWQHIVSEYSSLQLTYDIDKIVAISAISTQLAKSFPESGSYVNGHRERGILGQLCWSSSDSATRSGDNRAPSWSWASMHGRVDPHFVDFNRKDSTDVGKSIAQVLSVPSAPESSYTTFGPDKRLRIRGPLHRVRFLEQNVAQQEVEKPERKRETLAESRARIITQQRNRDPNYTGENLRSLGMSFANDLPTGESGRQRMDMDPSSGLIVQHSEEEYITPNKITYNNPRRSFVMDLGAEGHDYIHGKIQMDQDFEKGELERLRPVFMPIFFTLDRIFPEIEILRGLILMETEHSGVYRRIGSCTLNNTAMVPFLGCLGNAEEDQLTSTSLGSLTINDDASSKESWPRCVADRLKLEDAVPDGWGGITLDFVPRDFPMYELTIV

SEQ ID NO: 1185 - DNA, 1152 bp, Muscodor strobelii
  misc_feature: SGI EST ID NO. CUFF.3288.0
  misc_feature: Variant of the nucleotide sequence at SEQ ID NO 1183
caaagtcgtttccggaatccggaagctacgtaaacggacaccgggaacgggggatactaggccagctgtgttggtcatcgtccgactccgctactcgatccggtgacaatagagcaccatcatggtcatgggcatcaatgcacggaagagtcgatccccacttcgtcgattttaatcgtaaagattccaccgatgttgggaaatccatagctcaggtactttcggttccatctgctccagaatctagttacactacgttcggtccagataagcgcctccgtattcggggacctttacaccgagtaagattcttagagcagaacgtggcacagcaagaagtcgaaaagccagagagaaagcgagaaacactggctgaaagtcgcgcacggatcataacacagcagcgcaaccgcgatcccaactacaccggagaaaatctaaggtcattgggaatgtcgtttgctaatgacttgcccacgggtgagtcaggaagacagagaatggatatggatccgagttcgggcttgatagtacaacatagtgaagaagaatacatcactccgaataaaattacttacaataatccgcgacggagcttcgtgatggatctaggggctgagggccatgattatatacatgggaagatccagatggatcaagatttcgaaaagggcgagctagagcgcttgcgaccggttttcatgccgatcttcttcacgcttgacagaattttccccgagatagaaattctcagaggcctaatcttgatggaaacagagcacagcggggtatatcgaagaattggatcttgcacgttaaacaataccgccatggttccatttctgggctgcttaggaaacgctgaagaggatcagttgacttctacttcgcttggctctttgacgattaatgatgatgcttcgtcgaaggaatcgtggcctaggtgtgtagccgaccgcttgaagctcgaagatgcagtgcctgacgggtggggaggaattaccctcgactttgtgcctagagattttccgatgtacgaacttacgatcgtttagtacatccatcgtcaaatatgcttcttcgtctaagtgataccatttgaatctaatgcactatatttctttcaatcatgcccaaataagcgaaatctcc

SEQ ID NO: 1186 - DNA, 624 bp, Muscodor strobelii
  misc_feature: SGI cDNA ID NO. 559988
  misc_feature: Elevated expression when VOC is produced
  misc_feature: Encodes the peptide sequence at SEQ ID NO 1187
atggaacttgctcagaacttgatcaactacacgttcactaatggagcactcctacaagaagccctccgagtggctggagctcctggagcggcacgtgaggggaacaaaccgttggctaatgttggcgacgcggtgattgacatggtgataagggccgactgctatcgtcgtcgcctccctatcgggaccataagccagctcattcagacactggccaacaatgctcgtttctcccagatatgcgataattcgggtcttgccaggtgtatttccaacaatccttcccaattcgacatagtttcggataggactaaggcaacaaccctagaggccgtggttggagcagtttttcttgatactggagagaatctccaagaggctagacgtgcgatgcttgcattaggcatcatccagagggcgcgaaatggctgttttctacctccgctgctcctagttgaagtaaaacatgacatccaggagggccacgacatggacctccctggttccccccacgagagggatcccagatacgggattggagctggtgatgtggcttttatcgccaacattgctccaaacccgtacattggagcatcctctgatggatgttatacaggatcatga

SEQ ID NO: 1187 - protein, 207 aa, Muscodor strobelii
  misc_feature: SGI Peptide ID NO. 559988
  misc_feature (38)..(121): Pfam Id: PF00636 Pfam Desc: RNase3 domain
  misc_feature (41)..(121): Pfam Id: PF00636 Pfam Desc: RNase3 domain
  misc_feature (1)..(136): NCBI GI: 238494382 Blast Desc: RNAse III, [Aspergillus flavus NRRL3357] gi|220695077|gb|EED51420.1| RNAse III, [Aspergillus flavus NRRL3357]
  misc_feature (3)..(136): NCBI GI: 119474301 Blast Desc: RNAse III, [Neosartorya fischeri NRRL 181] gi|119407179|gb|EAW17129.1| RNAse III, [Neosartorya fischeri NRRL 181]
  misc_feature (2)..(136): NCBI GI: 70986266 Blast Desc: RNAse III [Aspergillus fumigatus Af293] gi|66846256|gb|EAL86589.1| RNAse III, [Aspergillus fumigatus Af293] gi|159128228|gb|EDP53343.1| RNAse III, [Aspergillus A1163]
  misc_feature (5)..(136): NCBI GI: 145234665 Blast Desc: An03g00790 [Aspergillus niger] gi|134057653|emb|CAK38052.1| protein product [Aspergillus niger]
  misc_feature (2)..(136): NCBI GI: 238845335 Blast Desc: conserved [Microsporum canis CBS 113480]
  misc_feature (5)..(136): NCBI GI: 121711916 Blast Desc: RNAse III, [Aspergillus clavatus NRRL 1] gi|119401725|gb|EAW12147.1| RNAse III, [Aspergillus clavatus NRRL 1]
  misc_feature (1)..(136): NCBI GI: 255946916 Blast Desc: Pc22g01810 [Penicillium chrysogenum Wisconsin 54-1255] gi|211591242|emb|CAP97469.1| Pc22g01810 [Penicillium chrysogenum Wisconsin 54-1255]
  misc_feature (12)..(136): NCBI GI: 67538476 Blast Desc: AN5408.2 [Aspergillus nidulans FGSC A4] gi|40743378|gb|EAA62568.1| [Aspergillus nidulans FGSC A4] gi|259485147|tpe|CBF81959.1| TPA: RNAse III, (AFU_orthologue; A4]
  misc_feature (1)..(136): NCBI GI: 212528380 Blast Desc: RNAse III, [Penicillium marneffei ATCC 18224] gi|210073745|gb|EEA27832.1| RNAse III, [Penicillium marneffei ATCC 18224]
  misc_feature (5)..(134): NCBI GI: 169598446 Blast Desc: SNOG_02027 [Phaeosphaeria nodorum SN15] gi|111069119|gb|EAT90239.1| SNOG_02027 [Phaeosphaeria nodorum SN15]
  misc_feature (5)..(177): SWISSPROT Homolog: EC 3.1.26.3 Ribonuclease III
  misc_feature: Useful for introducing or modulating the production of volatile compounds
MELAQNLINYTFTNGALLQEALRVAGAPGAAREGNKPLANVGDAVIDMVIRADCYRRRLPIGTISQLIQTLANNARFSQICDNSGLARCISNNPSQFDIVSDRTKATTLEAVVGAVFLDTGENLQEARRAMLALGIIQRARNGCFLPPLLLVEVKHDIQEGHDMDLPGSPHERDPRYGIGAGDVAFIANIAPNPYIGASSDGCYTGS

SEQ ID NO: 1188 - DNA, 1573 bp, Muscodor strobelii
  misc_feature: SGI EST ID NO. CUFF.3332.1
  misc_feature: Variant of the nucleotide sequence at SEQ ID NO 1186
taagatacctgcgtgtggcaatacttgacctgctggcgttcgaccggttgtcatagcgacacatttacagttgtgtggacgttatgtcatatacgagcggggtaaggtaatatgaggctccgtcgttacaaccaaatattggctacatccatctatgagtcattctcaaatagaagactgacatctatcctggtcatttgatttctattttctccttcttttcaatcaattcctggacttcttacttaaaattatcctgcctttattttctgcttacacccgatcaaccatcttgcaccccgcccaatcaacatggaacttgctcagaacttgatcaactacacgttcactaatggagcactcctacaagaagccctccgagtggctggagctcctggagcggcacgtgaggggaacaaaccgttggctaatgttggcgacgcggtgattgacatggtgataagggccgactgctatcgtcgtcgcctccctatcgggaccataagccagctcattcagacactggccaacaatgctcgtttctcccagatatgcgataattcgggtcttgccaggtgtatttccaacaatccttcccaattcgacatagtttcggataggactaaggcaacaaccctagaggccgtggttggagcagtttttcttgatactggagagaatctccaagaggctagacgtgcgatgcttgcattaggcatcatccaggtaacgttactgaaacgccccaccctctttttctattatgaaacgcagcaccgcacaggtgtcggataacattagacagtttttgtgccttgaatcgacgagcctggggatcctctcgcgggggggtccagggagctccatgttgatgtcccttggaagtgatgtttatcatgacatcactacgttcagagggcgcgaaatggctgttttctacctccgctgctcctagttgaagtaaaacatgacatccaggagggccacgacatggacctccctggttccccccacgagagggatcccaggttcgtcgattcagggcacctctctcgtaattgaaaacagacagccactggattcagatacgggattggagctggtgatgtggcttttatcgccaacattgctccaaacccgtacattggagcatcctctgatggatgttatacaggatcatgaggacgcataaggcagtgaatgggatcggcaatctacgccgccattgcctataagaaagaaggagttttcaatgggacataaccgagattggaggaagggtccgaaggaacttcaactgttgtctgtctttgaccgtggaatatttgtgaatttcggctgcgagcaggtctgataattatcgccaactataatctgtctttcacattgatgttttgattgttgagagtttcagtccaacctggctcatcccgtcagctgctatcaccaatcggctactcaacatagcttgttctaccgactagcatatctatattaaaaggcacataatacgaaatctatgtgaccgagttggtccatcacaataggttgatctcgtacgtatgccagtctg

SEQ ID NO: 1189 - DNA, 1272 bp, Muscodor strobelii
  misc_feature: SGI cDNA ID NO. 559989
  misc_feature: Encodes the peptide sequence at SEQ ID NO 1190
atggcgtcctcgcgtttaacggagctaacgatcagaatcgccaagaacacagagattgtaaacaactaccttaaggcaaacaatcttcctctcccgtcctttgagcaggatggaccaatgacatccttgatcccgcctacagagcccctagttgttgctgcgcggcaattggcaatgcacgactgtcaggaattacgacagcttctggcaggtccaaccgaccacctcatcagtttccggcacaacgaattgttaagtcagcatgtgatttaccgctttcgcgtggctcaagctgtgcctattggcggcgaaatcacattttctgagcttgctgcagcaactggcctacacgatacgcacgttcgcaagctgatgaggcacgccatgtcacaacggctgttttacgagccgcgacctggtgtcgtagctcacacggctgcatcgcgggtgcttgtagagaataccggcctgttcaattggcttcgcttcagcacggacgacctctggcgggccgcctgctttaccggcgatgccatggctcaatatccaggttcagacgagccgcacgagacaggttttgctcttgccaatgattccaataagcatatgtttggattcttctcagagaatcctgaccgctcaaagaggttcgctgatgccatgcgattctttacggaacgtcccgggctagagccgaaacatgttgttgataactacgattggaattcattgcccacgggcgcgactgttgtggatgtgggcggttcacatggcatattctgtatcgaattggctcgtcggtaccacggcctcaacttcgttgtccaagacctcgacgaaccggtgattcgagatgccgaggcccattgcccatctgatgtgaagagtcgagtcaagtacatggtgcacgactttctaaccgagaagcccgttcgaaatgcacatgtctatttccttcgcgccgtcttgcacaattggtccgatacctacgctgtcaagatattgcgcaatttgatccctgctttagagcctggtgctaagattgtcctcaacgataccatcgttccggagcttgacaagataccttcaatgatggccggtccgttacgagctaacgacttggtaatgcttgagttgcagaatgctggagaccgtgagatgacagagtgggcggcactcttttccaaggcagactcgaggtttatcttccagggcggcagaccctgtcctggatcaccgttgtcgatactggaagctaagtgggcgggatag

SEQ ID NO: 1190 - protein, 423 aa, Muscodor strobelii
  misc_feature: SGI Peptide ID NO. 559989
  misc_feature (137)..(395): Pfam Id: PF00891 Pfam Desc: O-methyltransferase
  misc_feature (193)..(395): Pfam Id: PF00891 Pfam Desc: O-methyltransferase
  misc_feature (5)..(423): NCBI GI: 116192635 Blast Desc: CHGG_06035 [Chaetomium globosum CBS 148.51] gi|88181948|gb|EAQ89416.1| CHGG_06035 [Chaetomium globosum CBS 148.51]
  misc_feature (2)..(421): NCBI GI: 212534482 Blast Desc: O-methyltransferase, [Penicillium marneffei ATCC 18224] gi|210069796|gb|EEA23886.1| O-methyltransferase, [Penicillium marneffei ATCC 18224]
  misc_feature (2)..(421): NCBI GI: 242800307 Blast Desc: O-methyltransferase, [Talaromyces stipitatus ATCC 10500] gi|218716905|gb|EED16326.1| O-methyltransferase, [Talaromyces stipitatus ATCC 10500]
  misc_feature (1)..(421): NCBI GI: 212536596 Blast Desc: O-methyltransferase, [Penicillium marneffei ATCC 18224] gi|210070853|gb|EEA24943.1| O-methyltransferase, [Penicillium marneffei ATCC 18224]
  misc_feature (2)..(421): NCBI GI: 169613869 Blast Desc: SNOG_10068 [Phaeosphaeria nodorum SN15] gi|111061283|gb|EAT82403.1| SNOG_10068 [Phaeosphaeria nodorum SN15]
  misc_feature (2)..(423): NCBI GI: 238507580 Blast Desc: O-methyltransferase, [Aspergillus flavus NRRL3357] gi|220688510|gb|EED44862.1| O-methyltransferase, [Aspergillus flavus NRRL3357]
  misc_feature (2)..(421): NCBI GI: 189208266 Blast Desc: sterigmatocystin 8-O-methyltransferase precursor [Pyrenophora tritici-repentis Pt-1C-BFP] gi|187976559|gb|EDU43185.1| sterigmatocystin precursor Pt-1C-BFP]
  misc_feature (4)..(423): NCBI GI: 154292573 Blast Desc: BC1G_14810 [Botryotinia fuckeliana B05.10] gi|150845891|gb|EDN21084.1| BC1G_14810 [Botryotinia fuckeliana B05.10]
  misc_feature (1)..(421): NCBI GI: 116206014 Blast Desc: CHGG_02300 [Chaetomium globosum CBS 148.51] gi|88182897|gb|EAQ90365.1| CHGG_02300 [Chaetomium globosum CBS 148.51]
  misc_feature (2)..(423): NCBI GI: 242813653 Blast Desc: hydroxyindole O-methyltransferase, [Talaromyces stipitatus ATCC 10500] gi|218714548|gb|EED13971.1| hydroxyindole O-methyltransferase, [Talaromyces stipitatus ATCC 10500]
  misc_feature (62)..(401): SWISSPROT Homolog: EC 2.1.1.110 Sterigmatocystin 8-O-methyltransferase
MASSRLTELTIRIAKNTEIVNNYLKANNLPLPSFEQDGPMTSLIPPTEPLVVAARQLAMHDCQELRQLLAGPTDHLISFRHNELLSQHVIYRFRVAQAVPIGGEITFSELAAATGLHDTHVRKLMRHAMSQRLFYEPRPGVVAHTAASRVLVENTGLFNWLRFSTDDLWRAACFTGDAMAQYPGSDEPHETGFALANDSNKHMFGFFSENPDRSKRFADAMRFFTERPGLEPKHVVDNYDWNSLPTGATVVDVGGSHGIFCIELARRYHGLNFVVQDLDEPVIRDAEAHCPSDVKSRVKYMVHDFLTEKPVRNAHVYFLRAVLHNWSDTYAVKILRNLIPALEPGAKIVLNDTIVPELDKIPSMMAGPLRANDLVMLELQNAGDREMTEWAALFSKADSRFIFQGGRPCPGSPLSILEAKWAG

SEQ ID NO: 1191 - DNA, 1866 bp, Muscodor strobelii
  misc_feature: SGI EST ID NO. CUFF.3310.0
  misc_feature: Variant of the nucleotide sequence at SEQ ID NO 1189
ccgcgacctggtgtcgtagctcacacggctgcatcgcgggtgcttgtagagaataccggcctgttcaattggcttcgcttcagcacggacgacctctggcgggccgcctgctttaccggcgatgccatggctcaatatccaggttcagacgagccgcacgagacaggttttgctcttgccaatgattccaataagcatatgtttggattcttctcagagaatcctgaccgctcaaagaggttcgctgatgccatgcgattctttacggaacgtcccgggctagagccgaaacatgttgttgataactacgattggaattcattgcccacgggcgcgactgttgtggatgtgggcggttcacatggcatattctgtatcgaattggctcgtcggtaccacggcctcaacttcgttgtccaagacctcgacgaaccggtgattcgagatgccgaggcccattgcccatctgatgtgaagagtcgagtcaagtacatggtgcacgactttctaaccgagaagcccgttcgaaatgcacatgtctatttccttcgcgccgtcttgcacaattggtccgatacctacgctgtcaagatattgcgcaatttgatccctgctttagagcctggtgctaagattgtcctcaacgataccatcgttccggagcttgacaagataccttcaatgatggccggtccgttacgagctaacgacttggtaatgcttgagttgcagaatgctggagaccgtgagatgacagagtgggcggcactcttttccaaggcagactcgaggtttatcttccagggcggcagaccctgtcctggatcaccgttgtcgatactggaagctaagtgggcgggatagtgataccacgccatcgcactgcagtcctcgacgacagtcggaggtctggcgcagtcaaaaaagccgtcactgcaatcaaagctatcagtctagacattatcatacaacctctctcacggaggtgagtgactcgtgatcgtgggaagcatgtggaagtgctgcagatgatcatttagaaaggaactcgcaattaggacgactctatctaactaccgaaatgacttgtgaatagctactgtatacatcgtctcctgaaccctgtatcaggttccaccaagcatagagtattacctcataacactgagatcgtatataattatgggctacttcatgagaatagctccttggttaagcgatgactctgacaagcaatcgggttatctatttaaacaagacacatgaccattgattatccgtgtctattcgtcctgtatgtccggcccaattctacaggaagcccaatggcttgacaaggcgacctgttaggctgcttgctcagtagctagttgccatcaacctatcgctacaggcttgtgacaatatttggctgtgcctaaatgaaaccctacagcttgtccccgctccaatcggaactcctatttacgagaatccgtggctatcgcacagccacaatgcctgtaacgctatcatgcacgtaaaatgctgacttctccgggccctcggtttgtgacgaaccgtgcacattttgatcctctgtcgcaagtttcatatcctatattagccacttatatacagagaaggaatatcggtcccaaatatggagactttggcagctatcggcgtggtggggaacgtagtacaattcattgatttcacctcaaagttgtttgccaagagccacgagctctatcatcactcaatcagcggccacctcgccgaattctcagagcttgtcagcgtcacagaacatactactaagcttgccgcaggactaaaagcagacgcaagcatcacactctctgcgaacctccaagatgttct

SEQ ID NO: 1192 - DNA, 1014 bp, Muscodor strobelii
  misc_feature: SGI cDNA ID NO. 559990
  misc_feature: Encodes the peptide sequence at SEQ ID NO 1193
atgtcttctaacatcgaagactcgcacagatctgtgttgaacgcagtaatggcgggcagtgacgttttcgaggctattactgcatctcagacggagacgcttcaggggttattcaccaacgccacggcgacactggagaaaggacagacaaaggtagtgcgagagggcgtgcaaaaagtcatcggagcgcagaacgttgtcgccgagcaatcagataagcggcatcagcagcgtcatacatcgactctccaagctattgatctctcgacgcacgtcatccagggccatactgagttcaatcggcaggagacatcaagggaacttgcagatctgagtaagaacttccgtacactcgaagcggaaataaagagacagacagcagagcttcagagatgtctccaagagtgcgctgcagcccggacgccagcagccagaaaagagggcgcaaagcaaagcaatgctattgtgaaaattctttccgggttagaggttatttatcaaagcctgttgacaattccggccgttgtcacagctcaactgccaaagataccctcgcaggcgtctgctcgaattgatcacagccaagtatcgaggaattacaattctgtaactcaacagcaacataagaacaggtcacaagctagttcagttgatatatcggatttgccccgttttcgattggaccgcaacagcactgccaccgtcgatcggaatacctcggttcggtcgattatgaccttgccgaagtacaactttcaagtaaagaaaggcaatcgcgatggtcttgatgttattgtagatcatcctacagacgagcagtatgaggctctccaagacgaagaaatggaggctatgtaccagatccgattgacgaggagacaacagaatgccgaacgcgaagagagaagacagttaacgtcaaaggcaagagcgcgtggcgatatcccggcattaaaggaattacgtgcccgcggacacgctgaaataatgaacgacgatgccgcattacagtag

SEQ ID NO: 1193 - protein, 337 aa, Muscodor strobelii
  misc_feature: SGI Peptide ID NO. 559990
  misc_feature (225)..(322): NCBI GI: 145614518 Blast Desc: MGG_04656 [Magnaporthe grisea 70-15] gi|145021426|gb|EDK05555.1| MGG_04656 [Magnaporthe grisea 70-15]
  misc_feature (230)..(294): NCBI GI: 256730634 Blast Desc: NECHADRAFT_30113 [Nectria haematococca mpVI 77-13-4]
  misc_feature (230)..(331): NCBI GI: 261355355 Blast Desc: conserved [Verticillium albo-atrum VaMs.102]
  misc_feature (235)..(322): NCBI GI: 239614365 Blast Desc: conserved [Ajellomyces dermatitidis ER-3]
  misc_feature (204)..(322): NCBI GI: 261204167 Blast Desc: conserved [Ajellomyces dermatitidis SLH14081] gi|239587082|gb|EEQ69725.1| conserved [Ajellomyces dermatitidis SLH14081]
  misc_feature (230)..(327): NCBI GI: 171695852 Blast Desc: protein product [Podospora anserina] gi|170948168|emb|CAP60332.1| protein product [Podospora anserina]
  misc_feature (235)..(290): NCBI GI: 85119344 Blast Desc: NCU02945 [Neurospora crassa OR74A] gi|28927438|gb|EAA36391.1| [Neurospora crassa OR74A]
  misc_feature (233)..(294): NCBI GI: 46109044 Blast Desc: FG01404.1 [Gibberella zeae PH-1]
  misc_feature (230)..(324): NCBI GI: 154322230 Blast Desc: BC1G_01262 [Botryotinia fuckeliana B05.10] gi|150850509|gb|EDN25702.1| BC1G_01262 [Botryotinia fuckeliana B05.10]
  misc_feature (200)..(324): NCBI GI: 169594742 Blast Desc: SNOG_00099 [Phaeosphaeria nodorum SN15] gi|111070474|gb|EAT91594.1| SNOG_00099 [Phaeosphaeria nodorum SN15]
MSSNIEDSHRSVLNAVMAGSDVFEAITASQTETLQGLFTNATATLEKGQTKVVREGVQKVIGAQNVVAEQSDKRHQQRHTSTLQAIDLSTHVIQGHTEFNRQETSRELADLSKNFRTLEAEIKRQTAELQRCLQECAAARTPAARKEGAKQSNAIVKILSGLEVIYQSLLTIPAVVTAQLPKIPSQASARIDHSQVSRNYNSVTQQQHKNRSQASSVDISDLPRFRLDRNSTATVDRNTSVRSIMTLPKYNFQVKKGNRDGLDVIVDHPTDEQYEALQDEEMEAMYQIRLTRRQQNAEREERRQLTSKARARGDIPALKELRARGHAEIMNDDAALQ

SEQ ID NO: 1194 - DNA, 1471 bp, Muscodor strobelii
  misc_feature: SGI EST ID NO. CUFF.3313.0
  misc_feature: Variant of the nucleotide sequence at SEQ ID NO 1192
cgccacggcgacactggagaaaggacagacaaaggtagtgcgagagggcgtgcaaaaagtcatcggagcgcagaacgttgtcgccgagcaatcagataagcggcatcagcagcgtcatacatcgactctccaagctattgatctctcgacgcacgtcatccagggccatactgagttcaatcggcaggagacatcaagggaacttgcagatctgagtaagaacttccgtacactcgaagcggaaataaagagacagacagcagagcttcagagatgtctccaagagtgcgctgcagcccggacgccagcagccagaaaagagggcgcaaagcaaagcaatgctattgtgaaaattctttccgggttagaggttatttatcaaagcctgttgacaattccggccgttgtcacagctcaactgccaaagataccctcgcaggcgtctgctcgaattgatcacagccaagtatcgaggaattacaattctgtaactcaacagcaacataagaacaggtcacaagctagttcagttgatatatcggatttgccccgttttcgattggaccgcaacagcactgccaccgtcgatcggaatacctcggttcggtcgattatgaccttgccgaagtacaactttcaagtaaagaaaggcaatcgcgatggtcttgatgttattgtagatcatcctacagacgagcagtatgaggctctccaagacgaagaaatggaggctatgtaccagatccgattgacgaggagacaacagaatgccgaacgcgaagagagaagacagttaacgtcaaaggcaagagcgcgtggcgatatcccggcattaaaggaattacgtgcccgcggacacgctgaaataatgaacgacgatgccgcattacagtagatgaactacgcgaaacacaagccgaaatgcggtcgcgacgtcaaagcgccgtatcaagcgttagctatggcgatttaggcgttgcacgacttgacggcccacgtctccgtgcaaatagtacggaaagtgaacattaatctaatgggataaatatgatagtcgatgggtttgggtgactagttgtcacaaagtggcccactcatttgggataatcacctagggtgatgtggtacgctccagggaggatgatacaggggttcaggagtgtatatataggcgttattcgccggtctaatcggaagttagatagaaagtcatcccatcattactcttcccacatgagcgtctacagcacttccgtaagcttccacgatcaccagtctcgcctccgtgagactagttagatgcacgccctgaagctgcgctcatgctctcgcataatgccaaagaaaggtaaaaatgtcatacataaaacttaacatagcaaacatagaaccaaaaggcagatctaatcagttacatgaaagagtggtacaaacttgttgttgtcaagttggaccagataaatactggttc

SEQ ID NO: 1195 - DNA, 417 bp, Muscodor strobelii
  misc_feature: SGI cDNA ID NO. 559991
  misc_feature: Encodes the peptide sequence at SEQ ID NO 1196
atgatttctcaacttgtcgcattcagagcagcattgtcagaagtccagagcttcatcgaaattgagcaggccgattccagctacaatattcacgcaatggacatcgatgttgtggtccggtgctgtgagatgctggtcgatagactaggaacacaaattgacgagcttagtcgcaaagaagttgctattggatctgtaagcgagaggttcaagttggtttggaattatacctcgatcagtgagacgcaagacacaatagatcatcagacgagcgctctcacgttattagttactgccatgagaagatatcctcaatacgacgagcaaatacttctgagcagagacaaaatcaaagtcactttggatcaagcgaaacctgactcactggtctacgctgtcaaaagtgttcgcatttga

SEQ ID NO: 1196 - protein, 138 aa, Muscodor strobelii
  misc_feature: SGI Peptide ID NO. 559991
MISQLVAFRAALSEVQSFIEIEQADSSYNIHAMDIDVVVRCCEMLVDRLGTQIDELSRKEVAIGSVSERFKLVWNYTSISETQDTIDHQTSALTLLVTAMRRYPQYDEQILLSRDKIKVTLDQAKPDSLVYAVKSVRI

SEQ ID NO: 1197 - DNA, 1227 bp, Muscodor strobelii
  misc_feature: SGI cDNA ID NO. 559992
  misc_feature: Reduced expression when VOC is produced
  misc_feature: Encodes the peptide sequence at SEQ ID NO 1198
atggacgacatagtccgaagcgttctcacttctagatcgactaagaacaagacttgttcgataagcaatccgttgaatccagttcgcacagagccgattgcaggatcatatgacttctaccacatcaacaccatcgtatctggcatattagccattctttccatcctcatatcgttcgcccttatcgttcggcacgcgacacatataagtaaaccgcgacagcaactacaaataatacgcatatgcctctttctaccgatcttcgcgactgcactctggctctccatctacataccacgcacatacgtctacgcagacgcagtagtcgcaatcacagagcccatcgccgtaacatcattctacttcttcatctgcgagatcatctcgcaatccgtgtaccccaacacgcccaccccttccttccgggacatctttctctctcccctagtagcctacgcgcaaaacgacaatcacgctcgactcggcgaacacccccggatgggagtcgggaggttcaagctcctgaatttctacgtcctgcagggcattccggcaagtgcgctgattggggtgttgatggttatcacgcaggcagcggatgtttattgtttgaccagccatgatagccaccatgctcatctcgtgttgttgatttttaggggattattcacggcgttgctgttgattgctattatacgcacggttctcccgcataaagcggagctgaggaggcaggaggcgaaggcgttgacgaagttgtttgggtttaaggctttgatcttttttcagactacgcaaagctccgcgttcggcatccttgcttctgtaaacccgcctgctgtgcggaactcgacgacgcttagtgaagcggactggcttattggtatcccgtcacttatcacggagatagaactcgtgtttttcgcagtgttttttcattacgcgtacggtatcggcttgtatcaactttcggaggctcagatcgcggctggggagatgtatgtcccgtatggatggcggattatccccgaagtgctgtacatccgcgagctaccggccttctggaagttttggaagaatctcaggagtgacgttgaggcatatgaggcagaacatatgccgcagcaacttgatgatgtctcgagggctcatgaaggacatagtaggaagagtagtgaggtttcaactagtggggctgctgttgagcctacctcgattcctggatga

SEQ ID NO: 1198 - protein, 408 aa, Muscodor strobelii
  misc_feature: SGI Peptide ID NO. 559992
  misc_feature (9)..(334): NCBI GI: 145253569 Blast Desc: An17g00680 [Aspergillus niger] gi|134083865|emb|CAK42996.1| protein product [Aspergillus niger]
  misc_feature (39)..(334): NCBI GI: 259487619 Blast Desc: TPA: DUF300 domain protein, (AFU_orthologue; AFUA_5G07250) [Aspergillus nidulans FGSC A4]
  misc_feature (39)..(326): NCBI GI: 115438022 Blast Desc: conserved [Aspergillus terreus NIH2624] gi|114188774|gb|EAU30474.1| conserved [Aspergillus terreus NIH2624]
  misc_feature (35)..(325): NCBI GI: 255956117 Blast Desc: Pc21g18160 [Penicillium chrysogenum Wisconsin 54-1255] gi|211590522|emb|CAP96713.1| Pc21g18160 [Penicillium chrysogenum Wisconsin 54-1255]
  misc_feature (35)..(327): NCBI GI: 121712878 Blast Desc: DUF300 domain protein, [Aspergillus clavatus NRRL 1] gi|119402203|gb|EAW12624.1| DUF300 domain protein, [Aspergillus clavatus NRRL 1]
  misc_feature (36)..(335): NCBI GI: 242818353 Blast Desc: DUF300 domain protein, [Talaromyces stipitatus ATCC 10500] gi|218713565|gb|EED12989.1| DUF300 domain protein, [Talaromyces stipitatus ATCC 10500]
  misc_feature (16)..(316): NCBI GI: 156061313 Blast Desc: SS1G_02799 [Sclerotinia sclerotiorum 1980] gi|154700203|gb|EDN99941.1| SS1G_02799 [Sclerotinia sclerotiorum 1980]
  misc_feature (31)..(321): NCBI GI: 256722176 Blast Desc: NECHADRAFT_52448 [Nectria haematococca mpVI 77-13-4]
  misc_feature (36)..(335): NCBI GI: 212530560 Blast Desc: DUF300 domain protein, [Penicillium marneffei ATCC 18224] gi|210074835|gb|EEA28922.1| DUF300 domain protein, [Penicillium marneffei ATCC 18224]
  misc_feature (31)..(316): NCBI GI: 154319638 Blast Desc: BC1G_02300 [Botryotinia fuckeliana B05.10] gi|150855958|gb|EDN31150.1| BC1G_02300 [Botryotinia fuckeliana B05.10]
  misc_feature: Useful for introducing or modulating the production of volatile compounds
MDDIVRSVLTSRSTKNKTCSISNPLNPVRTEPIAGSYDFYHINTIVSGILAILSILISFALIVRHATHISKPRQQLQIIRICLFLPIFATALWLSIYIPRTYVYADAVVAITEPIAVTSFYFFICEIISQSVYPNTPTPSFRDIFLSPLVAYAQNDNHARLGEHPRMGVGRFKLLNFYVLQGIPASALIGVLMVITQAADVYCLTSHDSHHAHLVLLIFRGLFTALLLIAIIRTVLPHKAELRRQEAKALTKLFGFKALIFFQTTQSSAFGILASVNPPAVRNSTTLSEADWLIGIPSLITEIELVFFAVFFHYAYGIGLYQLSEAQIAAGEMYVPYGWRIIPEVLYIRELPAFWKFWKNLRSDVEAYEAEHMPQQLDDVSRAHEGHSRKSSEVSTSGAAVEPTSIPG

SEQ ID NO: 1199 - DNA, 1479 bp, Muscodor strobelii
  misc_feature: SGI EST ID NO. CUFF.3603.1
  misc_feature: Variant of the nucleotide sequence at SEQ ID NO 1197
gtcctgtcgctataaccatcgcaattggataaatttgaaccagccaattcggatagtctcttgcatcttttgtactcacaactaattggacaagactatcatgatggacgacatagtccgaagcgttctcacttctagatcgactaagaacaagacttgttcgataagcaatccgttgaatccagttcgcacagagccgattgcaggatcatatgacttctaccacatcaacaccatcgtatctggcatattagccattctttccatcctcatatcgttcgcccttatcgttcggcacgcgacacatataagtaaaccgcgacagcaactacaaataatacgcatatgcctctttctaccgatcttcgcgactgcactctggctctccatctacataccacgcacatacgtctacgcagacgcagtagtcgcaatcacagagcccatcgccgtaacatcattctacttcttcatctgcgagatcatctcgcaatccgtgtaccccaacacgcccaccccttccttccgggacatctttctctctcccctagtagcctacgcgcaaaacgacaatcacgctcgactcggcgaacacccccggatgggagtcgggaggttcaagctcctgaatttctacgtcctgcagggcattccggcaagtgcgctgattggggtgttgatggttatcacgcaggcagcggatgtttattgtttgaccagccatgatagccaccatgctcatctcgtgttgttgatttttaggggattattcacggcgttgctgttgattgctattatacgcacggttctcccgcataaagcggagctgaggaggcaggaggcgaaggcgttgacgaagttgtttgggtttaaggctttgatcttttttcagactacgcaaagctccgcgttcggcatccttgcttctgtaaacccgcctgctgtgcggaactcgacgacgcttagtgaagcggactggcttattggtatcccgtcacttatcacggagatagaactcgtgtttttcgcagtgttttttcattacgcgtacggtatcggcttgtatcaactttcggaggctcagatcgcggctggggagatgtatgtcccgtatggatggcggattatccccgaagtgctgtacatccgcgagctaccggccttctggaagttttggaagaatctcaggagtgacgttgaggcatatgaggcagaacatatgccgcagcaacttgatgatgtctcgagggctcatgaaggacatagtaggaagagtagtgaggtttcaactagtggggctgctgttgagcctacctcgattcctggatgatatcctgaaatgctacgcaatatgccaaggaatttgggccatctaggactttgttacacatcctcgtaccaaggcttaatcaggatctatcgatcatctcatgttggcagccagttgtcttcgcgtgacttagatcgtccgatatcgca

SEQ ID NO: 1200 - DNA, 1305 bp, Muscodor strobelii
  misc_feature: SGI cDNA ID NO. 559993
  misc_feature: Encodes the peptide sequence at SEQ ID NO 1201
atgcgcatgtgtctcactgctgatgtcggtggatactacacgggcgcaatcgaggcaggtcgcgatcagtttggcaaaaagggcgattttatcacgtcgccagaaatctcgcaggttttcggtgagctcatcggcatctggtttgtggcggaatggatgtcacagggccggccacggtcgggcatagagctcatcgaagtcggcccgggccgaggcacgttgatggatgatatcttgcggacaatccgcaacttcaaggatatgtcatcagccattgacgctgtatacatggttgaagcatcgaaagagttgcgcgtcgctcagaagaatctcctttgcggcaccgatgcttcgctacgagattctaagtctggatggcattgcacgagcaaatactcagacatacctatcgtgtggacagactccatcaaagccgtgccccaataccctagtaaaacgcccttcatagtagcgcatgaatttttcgacgcgctacctattcacgcattccaagttgttgatgtaccaccgactcaagcctcggcgacgagctccggctctcctcgctctgcatcttcaaacacatcatcaccaacgaagcaatggcgtgaaatggttgtctcgtctacacccgaggctacgacacatgcggatctaggaactcctaagtcccaacaatcggagcccatccccgaattccaacttaccctctctccctcccaaaccaggcattctcaatatgtcccggagtcatccgcgcgctatcgtgcacttcgttcctctacgggagctctgattgaggtttgcccggacgcatccatctacgcttccgacttcgcctctcgtgtcggcggctctccatcaaatcccaaacccaagccttcaggtgcagctcttatcctcgactacggccccgcatccacgattccggtgaactcgctccgaggcatccgctcgcaccaaatcgtctcgcctttcgcagccccaggactcgtcgatctcagcgcagatgttgatttcctggccatcgtcgaagctgcgacgcgcgcaagtgagggaattgagtgtcatggcccggtcgaccaagcgcacttcctagattcaatgggaattgcccagcgcgctgagatgctagctaaacaagtcacgagcgaggagaagaaagaagagattgaaaaggcgtggaagaggttggtggatcgagggccgagcggtatggggaagatttacaaagcacttgctattttacctgagaatagtggcaagaggaggccagtcgggtttggtggggacttggcgggttga

SEQ ID NO: 1201 - protein, 434 aa, Muscodor strobelii
  misc_feature: SGI Peptide ID NO. 559993
  misc_feature (43)..(361): Pfam Id: PF02636 Pfam Desc: Uncharacterized ACR, COG1565
  misc_feature (43)..(180): Pfam Id: PF02636 Pfam Desc: Uncharacterized ACR, COG1565
  misc_feature (296)..(361): Pfam Id: PF02636 Pfam Desc: Uncharacterized ACR, COG1565
  misc_feature (1)..(432): NCBI GI: 171687044 Blast Desc: protein product [Podospora anserina] gi|170943483|emb|CAP69136.1| protein product [Podospora anserina]
  misc_feature (1)..(432): NCBI GI: 261358452 Blast Desc: DUF185 domain-containing protein [Verticillium albo-atrum VaMs.102]
  misc_feature (1)..(432): NCBI GI: 85079715 Blast Desc: NCU00183 [Neurospora crassa OR74A] gi|28917469|gb|EAA27170.1| NCU00183 [Neurospora crassa OR74A]
  misc_feature (1)..(406): NCBI GI: 46122055 Blast Desc: FG05405.1 [Gibberella zeae PH-1]
  misc_feature (1)..(432): NCBI GI: 258576949 Blast Desc: conserved [Uncinocarpus reesii 1704] gi|237902922|gb|EEP77323.1| conserved [Uncinocarpus reesii 1704]
  misc_feature (1)..(432): NCBI GI: 119177909 Blast Desc: CIMG_07848 [Coccidioides immitis RS]
  misc_feature (1)..(432): NCBI GI: 240107538 Blast Desc: CPC735_041610 [Coccidioides posadasii C735 delta SOWgp]
  misc_feature (1)..(432): NCBI GI: 238842094 Blast Desc: DUF185 domain-containing protein [Microsporum canis CBS 113480]
  misc_feature (1)..(434): NCBI GI: 226279909 Blast Desc: DUF185 domain-containing protein [Paracoccidioides brasiliensis Pb01]
  misc_feature (1)..(432): NCBI GI: 119480871 Blast Desc: NFIA_085200 [Neosartorya fischeri NRRL 181] gi|119408618|gb|EAW18567.1| conserved [Neosartorya fischeri NRRL 181]
MRMCLTADVGGYYTGAIEAGRDQFGKKGDFITSPEISQVFGELIGIWFVAEWMSQGRPRSGIELIEVGPGRGTLMDDILRTIRNFKDMSSAIDAVYMVEASKELRVAQKNLLCGTDASLRDSKSGWHCTSKYSDIPIVWTDSIKAVPQYPSKTPFIVAHEFFDALPIHAFQVVDVPPTQASATSSGSPRSASSNTSSPTKQWREMVVSSTPEATTHADLGTPKSQQSEPIPEFQLTLSPSQTRHSQYVPESSARYRALRSSTGALIEVCPDASIYASDFASRVGGSPSNPKPKPSGAALILDYGPASTIPVNSLRGIRSHQIVSPFAAPGLVDLSADVDFLAIVEAATRASEGIECHGPVDQAHFLDSMGIAQRAEMLAKQVTSEEKKEEIEKAWKRLVDRGPSGMGKIYKALAILPENSGKRRPVGFGGDLAG

SEQ ID NO: 1202 - DNA, 1819 bp, Muscodor strobelii
  misc_feature: SGI EST ID NO. CUFF.3329.1
  misc_feature: Variant of the nucleotide sequence at SEQ ID NO 1200
tctcaaacagccgttccatatcatcctctccgcatcattactcatcgcaaatttttaatagaatgaaatgttattataaaatcggttgtttttaattacaatgaggccttgcactatccgttcggcccaacgtgggctaaggagtctctctcgccggccgctgtcgcatccccaaaactttatcgggcagagcttaaggagcttatcagcgacgccagtgagacgagaggaagagagaaaatggtcgacacctcttgcgaaacaattggcagaagcaatcagtataactggcccaataccgctcgcaagctacatgcgcatgtgtctcactgctgatgtcggtggatactacacgggcgcaatcgaggcaggtcgcgatcagtttggcaaaaagggcgattttatcacgtcgccagaaatctcgcaggttttcggtgagctcatcggcatctggtttgtggcggaatggatgtcacagggccggccacggtcgggcatagagctcatcgaagtcggcccgggccgaggcacgttgatggatgatatcttgcggacaatccgcaacttcaaggatatgtcatcagccattgacgctgtatacatggttgaagcatcgaaagagttgcgcgtcgctcagaagaatctcctttgcggcaccgatgcttcgctacgagattctaagtctggatggcattgcacgagcaaatactcagacatacctatcgtgtggacagactccatcaaagccgtgccccaataccctagtaaaacgcccttcatagtagcgcatgaatttttcgacgcgctacctattcacgcattccaagttgttgatgtaccaccgactcaagcctcggcgacgagctccggctctcctcgctctgcatcttcaaacacatcatcaccaacgaagcaatggcgtgaaatggttgtctcgtctacacccgaggctacgacacatgcggatctaggaactcctaagtcccaacaatcggagcccatccccgaattccaacttaccctctctccctcccaaaccaggcattctcaatatgtcccggagtcatccgcgcgctatcgtgcacttcgttcctctacgggagctctgattgaggtttgcccggacgcatccatctacgcttccgacttcgcctctcgtgtcggcggctctccatcaaatcccaaacccaagccttcaggtgcagctcttatcctcgactacggccccgcatccacgattccggtgaactcgctccgaggcatccgctcgcaccaaatcgtctcgcctttcgcagccccaggactcgtcgatctcagcgcagatgttgatttcctggccatcgtcgaagctgcgacgcgcgcaagtgagggaattgagtgtcatggcccggtcgaccaagcgcacttcctagattcaatgggaattgcccagcgcgctgagatgctagctaaacaagtcacgagcgaggagaagaaagaagagattgaaaaggcgtggaagaggttggtggatcgagggccgagcggtatggggaagatttacaaagcacttgctattttacctgagaatagtggcaagaggaggccagtcgggtttggtggggacttggcgggttgaaatgacgatgtaatgatgcgtgaatgtgagactattagaaattatgtatggagtagaacgtctgtataactatcaaccggatgcgatgtttcccgatcttctgaatgtggtaattccttacgatgcatgaagtttgacagcaaagtcgcatccggatattcttgatgttccgataactccgtaccggtgaagagccctcac

SEQ ID NO: 1203 - DNA, 1404 bp, Muscodor strobelii
  misc_feature: SGI cDNA ID NO. 559994
  misc_feature: Encodes the peptide sequence at SEQ ID NO 1204
atggccggctctcgctgggcagacacagcagaagacaaagccgcagaaactcgagtaaagaaagaaaaagaagagaagaagcgcttgaaagccgaaaaagcagccaaagcagaacccgaccgcctcgcagcactcgcccgcgcacaggcagccgctgcccaatcccaagacacacccgatcaccccccagcaaagcgcagaaaactcacccccgagcgcgagacaaccggcgaaacagagaatgtcaagctcctacgcttcgagccctctccaccgacctggacaccagcccgcagcgtcgagaactacgacaagctaaacgacattgaagaaggcgcctacggcttcgtctcgcgcgccaaagacctacgaacaaaccgcatcgtcgccctcaaacgtctaaaactcgaccacaacaccgggcccacaggtctccccgagaccggactgcgtgaaatacaaatactcaaagactcccgccacgccaacatcgtctcccttctcgaagtagtcgtcaacgattccccagaaaagatagaatccatatacctcgtcctcgagttcgtcgaacacgatcttaagagcatcctcaccgacgcctccgagcccttcctcgcctccgaagtcaagactctactactacaacttggagccggcgtagggtacctgcacgagcactggatactacatcgcgacttaaaaacgagtaatctcctgctcaacaatagggggcaattaaaaatcgctgatttcggcatggcgcgatacgtaggcgagccaccgccagagaacctaacgcaactcgtcgtcaccctctggtaccgggccccggaattactcttgggcacaaagacatacggcagcgcaatagatatgtggagcataggatgtatctttggggaactcctaaccggcgagcccttactccaagggtccaacgaagtcgacgagctcacacaaatcttcacactctgcggcatccccaccgagacttcctggcccgggttccggcgcttaccaaacgcgcgctctctccggcttccctcaaaatcaagtaccaatccagcgagcacaggctcagtgatccgggctaaattcccgctcctcactacggcgggttgtgacctgttatctagtttactagctctagatccggagaagagacctacggcgaaggagatgttgagccatgagtttttccgtcaggatcccaagccgaaacatgaggctatgttccctactttcccctcgaaggcgggacaggagagaagacggaggaaggagacgcctaatgctcctaggaggggcgaggctgttaatctgggtgcggtggatttcagtgggatttttgcgggaagggagaaagaggagaggggtggtgggttttcgttgaggatggtgtga

SEQ ID NO: 1204 - protein, 467 aa, Muscodor strobelii
  misc_feature: SGI Peptide ID NO. 559994
  misc_feature (103)..(400): Pfam Id: PF00069 Pfam Desc: Protein kinase domain
  misc_feature (150)..(257): Pfam Id: PF07714 Pfam Desc: Protein tyrosine kinase
  misc_feature (2)..(467): NCBI GI: 171687086 Blast Desc: protein product [Podospora anserina] gi|170943504|emb|CAP69157.1| protein product [Podospora anserina]
  misc_feature (4)..(467): NCBI GI: 116191739 Blast Desc: CHGG_05587 [Chaetomium globosum CBS 148.51] gi|88181500|gb|EAQ88968.1| CHGG_05587 [Chaetomium globosum CBS 148.51]
  misc_feature (1)..(467): NCBI GI: 261358453 Blast Desc: cyclin-dependent kinase G-1 [Verticillium albo-atrum VaMs.102]
  misc_feature (5)..(467): NCBI GI: 256729946 Blast Desc: [Nectria haematococca mpVI 77-13-4]
  misc_feature (4)..(467): NCBI GI: 46122057 Blast Desc: FG05406.1 [Gibberella zeae PH-1]
  misc_feature (57)..(467): NCBI GI: 85109223 Blast Desc: NCU07880 [Neurospora crassa OR74A] gi|28924449|gb|EAA33577.1| NCU07880 [Neurospora crassa OR74A]
  misc_feature (4)..(467): NCBI GI: 156065099 Blast Desc: SS1G_00560 [Sclerotinia sclerotiorum 1980] gi|154691419|gb|EDN91157.1| SS1G_00560 [Sclerotinia sclerotiorum 1980]
  misc_feature (2)..(467): NCBI GI: 154311513 Blast Desc: BC1G_06609 [Botryotinia fuckeliana B05.10] gi|150851006|gb|EDN26199.1| BC1G_06609 [Botryotinia fuckeliana B05.10]
  misc_feature (3)..(450): NCBI GI: 189204398 Blast Desc: cyclin-dependent kinase G-1 [Pyrenophora tritici-repentis Pt-1C-BFP] gi|187985633|gb|EDU51121.1| cyclin-dependent kinase G-1 [Pyrenophora tritici-repentis
  misc_feature (4)..(466): NCBI GI: 255950234 Blast Desc: Pc22g19820 [Penicillium chrysogenum Wisconsin 54-1255] gi|211592901|emb|CAP99270.1| Pc22g19820 [Penicillium chrysogenum Wisconsin 54-1255]
  misc_feature (92)..(426): SWISSPROT Homolog: EC 2.7.11.1 Non-specific serine/threonine protein kinase
MAGSRWADTAEDKAAETRVKKEKEEKKRLKAEKAAKAEPDRLAALARAQAAAAQSQDTPDHPPAKRRKLTPERETTGETENVKLLRFEPSPPTWTPARSVENYDKLNDIEEGAYGFVSRAKDLRTNRIVALKRLKLDHNTGPTGLPETGLREIQILKDSRHANIVSLLEVVVNDSPEKIESIYLVLEFVEHDLKSILTDASEPFLASEVKTLLLQLGAGVGYLHEHWILHRDLKTSNLLLNNRGQLKIADFGMARYVGEPPPENLTQLVVTLWYRAPELLLGTKTYGSAIDMWSIGCIFGELLTGEPLLQGSNEVDELTQIFTLCGIPTETSWPGFRRLPNARSLRLPSKSSTNPASTGSVIRAKFPLLTTAGCDLLSSLLALDPEKRPTAKEMLSHEFFRQDPKPKHEAMFPTFPSKAGQERRRRKETPNAPRRGEAVNLGAVDFSGIFAGREKEERGGGFSLRMV

SEQ ID NO: 1205 - DNA, 795 bp, Muscodor strobelii
  misc_feature: SGI cDNA ID NO. 559995
  misc_feature: Reduced expression when VOC is produced
  misc_feature: Encodes the peptide sequence at SEQ ID NO 1206
atgaagagcccgcaacaactcctgaccgttgcactggctctgtcacccttggcggcagcatggtctcaattactacccgataaagatgctttgttagtgcgagcaaatgatgactcgagttcatcgagtgaagctagcaagacgtccgaaacttccgatggcacgacgaaaactacagataagtcatccgaaacggtgactccgacgggcaaggacaagacaacaaagaccaccaagactcacgccgcaacacacacatcctacaacgagttagaccctgtaggcggcgtgcagatgatcacacccgcgccgaccgctgccgagacctactaccgcatcaacaacccgacgccggttacgtgggtgtggaactacacatcagtccagggaacgccgaaagccgtagatgtgtgggtttcgtgctcgacggtaacagaaacgtggaccttgacgcagaacatgacataccacccgacgcagaccttcacatgggatatcaacaagttccaatcccaggccatcgaatcccaacttcccgttgccgaatacacactcatcgtcttcgactccgacacggcgttcacagatacagccgatccgggatatctcggcccattcgctgggttccagttcggactttacacgccgaagccgtaccagaatctgtccgactggcagtgtatcacgtgtagtgcgggatcgtcgctcgatcgcaccgcgctcggatttgccgcgtcgatggtgatgatcacggttttcacgtttacgtactacgtaacgggtgcactgttataa

SEQ ID NO: 1206 - protein, 264 aa, Muscodor strobelii
  misc_feature: SGI Peptide ID NO. 559995
  misc_feature (6)..(261): NCBI GI: 85109225 Blast Desc: NCU07881 [Neurospora crassa OR74A] gi|28924450|gb|EAA33578.1| [Neurospora crassa OR74A]
  misc_feature (1)..(261): NCBI GI: 116191737 Blast Desc: CHGG_05586 [Chaetomium globosum CBS 148.51] gi|88181499|gb|EAQ88967.1| CHGG_05586 [Chaetomium globosum CBS 148.51]
  misc_feature (12)..(261): NCBI GI: 145608738 Blast Desc: MGG_06412 [Magnaporthe grisea 70-15] gi|145016175|gb|EDK00665.1| MGG_06412 [Magnaporthe grisea 70-15]
  misc_feature (1)..(261): NCBI GI: 171687084 Blast Desc: protein product [Podospora anserina] gi|170943503|emb|CAP69156.1| protein product [Podospora anserina]
  misc_feature (1)..(264): NCBI GI: 261358454 Blast Desc: conserved [Verticillium albo-atrum VaMs.102]
  misc_feature (6)..(264): NCBI GI: 256729759 Blast Desc: NECHADRAFT_101340 [Nectria haematococca mpVI 77-13-4]
  misc_feature (35)..(261): NCBI GI: 154311511 Blast Desc: BC1G_06608 [Botryotinia fuckeliana B05.10] gi|150851005|gb|EDN26198.1| BC1G_06608 [Botryotinia fuckeliana B05.10]
  misc_feature (35)..(259): NCBI GI: 119487136 Blast Desc: NFIA_029580 [Neosartorya fischeri NRRL 181] gi|119410580|gb|EAW20526.1| conserved [Neosartorya fischeri NRRL 181]
  misc_feature (35)..(258): NCBI GI: 70982081 Blast Desc: conserved [Aspergillus fumigatus Af293] gi|66844192|gb|EAL84531.1| conserved [Aspergillus fumigatus Af293] gi|159122197|gb|EDP47319.1| conserved [Aspergillus A1163]
  misc_feature (2)..(261): NCBI GI: 156065101 Blast Desc: SS1G_00561 [Sclerotinia sclerotiorum 1980] gi|154691420|gb|EDN91158.1| SS1G_00561 [Sclerotinia sclerotiorum 1980]
  misc_feature: Useful for introducing or modulating the production of volatile compounds
MKSPQQLLTVALALSPLAAAWSQLLPDKDALLVRANDDSSSSSEASKTSETSDGTTKTTDKSSETVTPTGKDKTTKTTKTHAATHTSYNELDPVGGVQMITPAPTAAETYYRINNPTPVTWVWNYTSVQGTPKAVDVWVSCSTVTETWTLTQNMTYHPTQTFTWDINKFQSQAIESQLPVAEYTLIVFDSDTAFTDTADPGYLGPFAGFQFGLYTPKPYQNLSDWQCITCSAGSSLDRTALGFAASMVMITVFTFTYYVTGALL

SEQ ID NO: 1207 - DNA, 3245 bp, Muscodor strobelii
  misc_feature: SGI EST ID NO. CUFF.3522.0
  misc_feature: Variant of the nucleotide sequence at SEQ ID NO 1205
ggccaattgaaccttgatcacggttttcccacttatgatccctcctaatagcatcatcccatcttttctcatctattcttcattctactgtatctaaatgtattgacctcactaatctaccatcatcacgtttggtcgttttcccttctctgatctcctgtcattcgcttcagagatcatttccctcgctcgcttgcctagaaacaaccgtgtcttggttgttggcggagtccgactagtgttttaattgcattctgctgtggtttttcttgtttcgtgtccagccaaccatcccgtacataccgccacctcgaggagcacagttcccagccaacggaacactcgaccggcaacgatctcgaacaatttgttttggactcgataacctagataatcgaagttgaaatactcggccgtcgacgttgattgaagagaactcgagctccccctttccctcgctttgcttgggtcagatattaataagcgcctatttgattccacattccatcgtttgaaacagcaaaatgaagagcccgcaacaactcctgaccgttgcactggctctgtcacccttggcggcagcatggtctcaattactacccgataaagatgctttgttagtgcgagcaaatgatgactcgagttcatcgagtgaagctagcaagacgtccgaaacttccgatggcacgacgaaaactacagataagtcatccgaaacggtgactccgacgggcaaggacaagacaacaaagaccaccaagactcacgccgcaacacacacatcctacaacgagttagaccctgtaggcggcgtgcagatgatcacacccgcgccgaccgctgccgagacctactaccgcatcaacaacccgacgccggttacgtgggtgtggaactacacatcagtccagggaacgccgaaagccgtagatgtgtgggtttcgtgctcgacggtaacagaaacgtggaccttgacgcagaacatgacataccacccgacgcagaccttcacatgggatatcaacaagttccaatcccaggccatcgaatcccaacttcccgttgccgaatacacactcatcgtcttcgactccgacacggcgttcacagatacagccgatccgggatatctcggcccattcgctgggttccagttcggactttacacgccgaagccgtaccagaatctgtccgactggcagtgtatcacgtgtagtgcgggatcgtcgctcgatcgcaccgcgctcggatttgccgcgtcgatggtgatgatcacggttttcacgtttacgtactacgtaacgggtgcactgttataagcgcaagcgggtccgacacgttgggatcggccctgtgcgagcatgccctcggcgtgtacgactggacttggttggctatgctgtgacgaacgtggtggcaaacaactgttgcatcatcgtcattgcactacctcaacggtgcattggggttccgtcctggcgaaccgaacttgagagaactactacattggacgacaggcgttcttgaatttatcttgggacaattgtttatatatatcgtcggtccttggagcgtctcagccatccatccgtgtcattggatttggataaagagacgctgaaaacgctgcgtggatatactaagtactagctagatttgagattggtgtaggcattgagcaagcctgcatgtttcttggatgctagaattattgcatgggaagaggtctgttacgaaattacaatttatagctcttaatgacatatatatcactaccacaagaacatcacaaaattggtgtacactgcagcataccacacgtgacagcgattttcatccatgtttgatgttcgtaaacgtcgtcacttattcatggcattagctattaggcatctagctcagtatctctggcaattacacatatcaactcctcacaccatcctcaacgaaaacccaccacccctctcctctttctcccttcccgcaaaaatcccactgaaatccaccgcacccagattaacagcctcgcccctcctaggagcattaggcgtctccttcctccgtcttctctcctgtcccgccttcgaggggaaagtagggaacatagcctcatgtttcggcttgggatcctgacggaaaaactcatggctcaacatctccttcgccgtaggtctcttctccggatctagagctagtaaactagataacaggtcacaacccgccgtagtgaggagcgggaatttagcccggatcactgagcctgtgctcgctggattggtacttgattttgagggaagccggagagagcgcgcgtttggtaagcgccggaacccgggccaggaagtctcggtggggatgccgcagagtgtgaagatttgtgtgagctcgtcgacttcgttggacccttggagtaagggctcgccggttaggagttccccaaagatacatcctatgctccacatatctattgcgctgccgtatgtctttgtgcccaagagtaattccggggcccggtaccagagggtgacgacgagttgcgttaggttctctggcggtggctcgcctacgtatcgcgccatgccgaaatcagcgatttttaattgccccctattgttgagcaggagattactcgtttttaagtcgcgatgtagtatccagtgctcgtgcaggtaccctacgccggctccaagttgtagtagtagagtcttgacttcggaggcgaggaagggctcggaggcgtcggtgaggatgctcttaagatcgtgttcgacgaactcgaggacgaggtatatggattctatcttttctggggaatcgttgacgactacttcgagaagggagacgatgttggcgtggcgggagtctttgagtatttgtatttcacgcagtccggtctcggggagacctgtgggcccggtgttgtggtcgagttttagacgtttgagggcgacgatgcggtttgttcgtaggtctttggcgcgcgagacgaagccgtaggcgccttcttcaatgtcgtttagcttgtcgtagttctcgacgctgcgggctggtgtccaggtcggtggagagggctcgaagcgtaggagcttgacattctctgtttcgccggttgtctcgcgctcgggggtgagttttctgcgctttgctggggggtgatcgggtgtgtcttgggattgggcagcggctgcctgtgcgcgggcgagtgctgcgaggcggtcgggttctgctttggctgctttttcggc

SEQ ID NO: 1208 - DNA, 1275 bp, Muscodor strobelii
  misc_feature: SGI cDNA ID NO. 559996
  misc_feature: Encodes the peptide sequence at SEQ ID NO 1209
atggcagatccgtttccgaacccggtgactattgatcggtctcacctcgagactctcgtccgacgggctaattacgatcatgaaatccgatctgaatctgccacgaatggagccttcgtcaccatgaccaagaatgagtttgatagcttactcttggcggcacgacagcttgccaatctcaaaagaagccttttgggagcaggtgtcagtgaacaccacattacaacgcttgttatggacaatggcagcatcccgcaaagcccaccttacgagattaccaccacggccccagaccataactcaaccgccatcgagaactgcaatcccccaactcctgttcctacttatcgagtgcccccttgcagctacttcaaaccatcatcgaactattcgtggggcaacggatcttacagtgctccaagcttcaagtcacaggtagtggaggaccagcctggatggggagatgttgattattcatcctttagcgtcacaccctcgatttctgccgaagggcacaccgatactcgccatgggtcgaccccattcggtcaaagccagaacaatcggccttgtcctttcgaacggatttgccagagaaccatcgctctacacgggctcgctggcagcactactctggctgacatcacaaaggagatccgtggaggacagctgttggaggtatatctccgaaccacagactctgtggcatgtgtgtcctttctccgagaagaggatgcaagacgctactacgatcatgtcaagaagcatggtcttcacatcaatcaaaaacgggtcacaatcgagtggaacgaccgccagttcgctctcgtcggccatgtagcccacaagatcgccaatggcaacactcgcaatatgatcatccgccgctgcaatccaaagcatacggaggagagcattcgtgacgatctcgagcatatccacaatctcgcagtgatcggcgtcgagtttcgaggaactagttgtcacgtgaagacgaactctgtgcataatgctatttatgccagaacctgcatgctaagccgagccaaatacaagggctccaagatcgagtgggacaaagatgagtgtgcacagcctctcgaagtcccgcagaagcagacaatgcagccagccaagcctgtggcagcgccgcagccaggcccggcaaaattgcgcaaccgatttgatgttctgcgtgtagatgacgatgacaatggtagtgacgataggttcgacacttcctccgtgttgagcactatagacgtccgcgcctaa

SEQ ID NO: 1209 - protein, 424 aa, Muscodor strobelii
  misc_feature: SGI Peptide ID NO. 559996
  misc_feature (9)..(403): NCBI GI: 85109229 Blast Desc: NCU07883 [Neurospora crassa OR74A] gi|28924452|gb|EAA33580.1| [Neurospora crassa OR74A]
  misc_feature (40)..(409): NCBI GI: 156065089 Blast Desc: SS1G_00555 [Sclerotinia sclerotiorum 1980] gi|154691414|gb|EDN91152.1| SS1G_00555 [Sclerotinia sclerotiorum 1980]
  misc_feature (40)..(401): NCBI GI: 154319895 Blast Desc: BC1G_01928 [Botryotinia fuckeliana B05.10] gi|150854667|gb|EDN29859.1| BC1G_01928 [Botryotinia fuckeliana B05.10]
  misc_feature (179)..(400): NCBI GI: 116191735 Blast Desc: CHGG_05585 [Chaetomium globosum CBS 148.51] gi|88181498|gb|EAQ88966.1| CHGG_05585 [Chaetomium globosum CBS 148.51]
  misc_feature (9)..(405): NCBI GI: 171687082 Blast Desc: protein product [Podospora anserina] gi|170943502|emb|CAP69155.1| protein product [Podospora anserina]
  misc_feature (9)..(416): NCBI GI: 261192346 Blast Desc: conserved [Ajellomyces dermatitidis SLH14081] gi|239589455|gb|EEQ72098.1| conserved [Ajellomyces dermatitidis SLH14081] gi|239615168|gb|EEQ92155.1| conserved [Ajellomyces
  misc_feature (9)..(416): NCBI GI: 154272235 Blast Desc: [Ajellomyces capsulatus NAm1] gi|150408957|gb|EDN04413.1| [Ajellomyces capsulatus NAm1]
  misc_feature (198)..(398): NCBI GI: 256729945 Blast Desc: NECHADRAFT_47215 [Nectria haematococca mpVI 77-13-4]
  misc_feature (197)..(412): NCBI GI: 115384682 Blast Desc: conserved [Aspergillus terreus NIH2624] gi|114196580|gb|EAU38280.1| conserved [Aspergillus terreus NIH2624]
  misc_feature (199)..(400): NCBI GI: 226283398 Blast Desc: conserved [Paracoccidioides brasiliensis Pb01]
MADPFPNPVTIDRSHLETLVRRANYDHEIRSESATNGAFVTMTKNEFDSLLLAARQLANLKRSLLGAGVSEHHITTLVMDNGSIPQSPPYEITTTAPDHNSTAIENCNPPTPVPTYRVPPCSYFKPSSNYSWGNGSYSAPSFKSQVVEDQPGWGDVDYSSFSVTPSISAEGHTDTRHGSTPFGQSQNNRPCPFERICQRTIALHGLAGSTTLADITKEIRGGQLLEVYLRTTDSVACVSFLREEDARRYYDHVKKHGLHINQKRVTIEWNDRQFALVGHVAHKIANGNTRNMIIRRCNPKHTEESIRDDLEHIHNLAVIGVEFRGTSCHVKTNSVHNAIYARTCMLSRAKYKGSKIEWDKDECAQPLEVPQKQTMQPAKPVAAPQPGPAKLRNRFDVLRVDDDDNGSDDRFDTSSVLSTIDVRA

SEQ ID NO: 1210 - DNA, 582 bp, Muscodor strobelii
  misc_feature: SGI EST ID NO. CUFF.3341.0
  misc_feature: Variant of the nucleotide sequence at SEQ ID NO 1208
aaaagaagccttttgggagcaggtgtcagtgaacaccacattacaacgcttgttatggacaatggcagcatcccgcaaagcccaccttacgagattaccaccacggccccagaccataactcaaccgccatcgagaactgcaatcccccaactcctgttcctacttatcgagtgcccccttgcagctacttcaaaccatcatcgaactattcgtggggcaacggatcttacagtgctccaagcttcaagtcacaggtagtggaggaccagcctggatggggagatgttgattattcatcctttagcgtcacaccctcgatttctgccgaagggcacaccgatactcgccatgggtcgaccccattcggtcaaagccagaacaatcggccttgtcctttcgaacggatttgccagagaaccatcgctctacacgggctcgctggcagcactactctggctgacatcacaaaggagatccgtggaggacagctgttggaggtatatctccgaaccacagactctgtggcatgtgtgtcctttctccgagaagaggatgcaagacgctactacgatcatgtcaag

SEQ ID NO: 1211 - DNA, 450 bp, Muscodor strobelii
  misc_feature: SGI cDNA ID NO. 559997
  misc_feature: Encodes the peptide sequence at SEQ ID NO 1212
atgaagactcaaagcctcatctctttcctcagcatggccttctcggtaactgcactcgtgactcctcgcggcgacccaatctacggaccagctacctgcggagtcaacggacagccttacggcctagaccacaacgatctggttgcaacggtggaaaggttcgcagtatggattgagaatggcgccgatgggcaggtcgatgctgctgggaagtttcactataagctgtcctacgatggcgataagacgactatgtttgcatgtgattacaagagcaacagcgcaggctcggtcatcacgccagccctcgtccggggtgttcttgccgacagtggctggattgatcaaatgtgcagcaaggacaatgctgggtacgagtccagcaatgacttggtcattggtcgtactttcgtaagtttcttccaaccaccaagagacaagcataaatga

SEQ ID NO: 1212 - protein, 149 aa, Muscodor strobelii
  misc_feature: SGI Peptide ID NO. 559997
  misc_feature (1)..(149): NCBI GI: 255954317 Blast Desc: Pc21g08720 [Penicillium chrysogenum Wisconsin 54-1255] gi|211589622|emb|CAP95769.1| Pc21g08720 [Penicillium chrysogenum Wisconsin 54-1255]
MKTQSLISFLSMAFSVTALVTPRGDPIYGPATCGVNGQPYGLDHNDLVATVERFAVWIENGADGQVDAAGKFHYKLSYDGDKTTMFACDYKSNSAGSVITPALVRGVLADSGWIDQMCSKDNAGYESSNDLVIGRTFVSFFQPPRDKHK

SEQ ID NO: 1213 - DNA, 420 bp, Muscodor strobelii
  misc_feature: SGI cDNA ID NO. 559998
  misc_feature: Encodes the peptide sequence at SEQ ID NO 1214
atgcaattttcctctatcctgctcctttccgccgccgccgtcaacagcgtctacgccggctgctacactagtggcgtgggctggggcgccgagaagggtctcgcagaacaggctatcgacgaactctgcgaccccagcaagcacaacaccttcaccaatgagggctttgggcccggtcaaacaaaagctgattgcgtccagctatctggcaacaagaaagctgacttccaagtcaactggggcggtcagggtgatctcacccttgctcaatcggattgtgtgctgagattcaagaatgagatcaacgggtgtgggagcggtggctcttcgacgactgcggagtggactttcacatctgatcctaacgacggaacctgcgaccctgttgccaagcgtgcgccagtccagtttaccgcgtaa

SEQ ID NO: 1214 - protein, 139 aa, Muscodor strobelii
  misc_feature: SGI Peptide ID NO. 559998
  misc_feature (1)..(126): NCBI GI: 171693607 Blast Desc: protein product [Podospora anserina] gi|170946752|emb|CAP73556.1| protein product [Podospora anserina]
  misc_feature (1)..(126): NCBI GI: 225681061 Blast Desc: [Paracoccidioides brasiliensis Pb03]
  misc_feature (1)..(126): NCBI GI: 226292240 Blast Desc: PADG_03744 [Paracoccidioides brasiliensis Pb18]
  misc_feature (21)..(126): NCBI GI: 226282594 Blast Desc: PAAG_01081 [Paracoccidioides brasiliensis Pb01]
  misc_feature (1)..(126): NCBI GI: 169618764 Blast Desc: SNOG_12574 [Phaeosphaeria nodorum SN15] gi|111058752|gb|EAT79872.1| SNOG_12574 [Phaeosphaeria nodorum SN15]
  misc_feature (20)..(134): NCBI GI: 171682124 Blast Desc: protein product [Podospora anserina] gi|170941021|emb|CAP66671.1| protein product [Podospora anserina]
  misc_feature (1)..(117): NCBI GI: 169618744 Blast Desc: SNOG_12564 [Phaeosphaeria nodorum SN15] gi|160703670|gb|EAT79862.2| SNOG_12564 [Phaeosphaeria nodorum SN15]
  misc_feature (1)..(111): NCBI GI: 256722135 Blast Desc: [Nectria haematococca mpVI 77-13-4]
MQFSSILLLSAAAVNSVYAGCYTSGVGWGAEKGLAEQAIDELCDPSKHNTFTNEGFGPGQTKADCVQLSGNKKADFQVNWGGQGDLTLAQSDCVLRFKNEINGCGSGGSSTTAEWTFTSDPNDGTCDPVAKRAPVQFTA

SEQ ID NO: 1215 - DNA, 708 bp, Muscodor strobelii
  misc_feature: SGI cDNA ID NO. 559999
  misc_feature: Encodes the peptide sequence at SEQ ID NO 1216
atgcgttttgctacaagcctctcgtccgtgttcgtcggagccctcttcgccacatctgcgctcggcgaggcattccaggtcccgcgacgtgcagcagagaatctagtcgctcgtgaggatgcggccaacgctattcgcagcatgacaatggaggagaagatccgtaaacgcgcagacgagtgcttggatcacatttccgcccgtcgtcgtctcaaagctcgcacctacaagcctgtgaacatcggtgaatacgatgtgggtaccggagacgacgtgatagaaactactggactcgctagttgctttggcgttgctatcactggcacctggcccgaaggcacctcgggtgagttcgatcgaggtctatctcacacctatccggatagcgccaagaccccggaggtccttgaagctttcagagatttgatggaagagtttcaagaggtgattggacaaggactacatattgatcgtgtggtgatggtcgccaccgaccccgccgcgtataccgaggaccgtggctggaagaaggaagatatcgaagcgtacaacaccgaatatgctaattacattgccgctatcacccattacattggcacgtcacctgaggagaagaagcacgactataccgatatctggaagttgaagatcaacagcgacaagagaatcgagtgccgcgatggctccgacaccgacagatgtgcttaa

SEQ ID NO: 1216 - protein, 235 aa, Muscodor strobelii
  misc_feature: SGI Peptide ID NO. 559999
MRFATSLSSVFVGALFATSALGEAFQVPRRAAENLVAREDAANAIRSMTMEEKIRKRADECLDHISARRRLKARTYKPVNIGEYDVGTGDDVIETTGLASCFGVAITGTWPEGTSGEFDRGLSHTYPDSAKTPEVLEAFRDLMEEFQEVIGQGLHIDRVVMVATDPAAYTEDRGWKKEDIEAYNTEYANYIAAITHYIGTSPEEKKHDYTDIWKLKINSDKRIECRDGSDTDRCA

SEQ ID NO: 1217 - DNA, 1218 bp, Muscodor strobelii
  misc_feature: SGI cDNA ID NO. 560000
  misc_feature: Encodes the peptide sequence at SEQ ID NO 1218
atggacactgaacaacacctgcagatcatcaatccagcgcacaacaatgggaatatagacagctttccatacttcactcgccttcccgctgagatacggctggagatctggcagacctcgctcaggcgcttacgcctcatacccattcagacccgcaaccctgaagatataggtgttgaggtcagtgatggcacaacgtacacatactactcattcgccgacggatcacctcgagttagcaaactactgcgagttagcaccgaggcacgacaggctgcattgagtttctatagagtttgcgtcccgtgttttctctgggacggacacacacagagagaaattactctccgtatcaatcccgagcacgatgttttgcggcctcatctttcggcaggaccatgcggcctgcatctatctaatttaattttcgacctccgatcacgcgatccactgggcattggcgtcttaaatcttgctctagacttggacactatcgttaatcattgttctcttgacccatcaacgctcgaactcgacgcgcgcgctaaggttaaagaaagccttctgcgcctccagcagatttttttcgtttcaattgagcaagctggtcgcatgtttacgggccccttaggtggtatccacaccgtcctgaagcctgaataccatcgctcgcggccgatcatgtccacgtccaccgcgttcgaccgcttagcacgagatccgcgagacggtatcgaattggatcttggacgggtgtatggagggacattcgatccgcgaaaaatggtgcatgaatggatgcagtttctcgattcatgggatgtaaatcctcctcctcacgtgctctcggcataccggcttttgatttccacttcgacagctcggacgggtcgcactcgacggtgcgtaggtaatagcatgggtggggccagaaaacgcttgatttccgatcgcaagagcgcagtccgctttatacagcaggaagaagaaaagtggaccagtgtgcaggaatatgaagcttcgcgcttacagagggtgggagaaatagcacaaacaagttacgaagaccgggagcgggttccacgaccggccatcggtttctggctatttcctttgaatgttcttgggctaaggtctgattatgaaaaacagatacccaaacggataatcgacatgggagcccattggccggaactttgtctggcccatctaccgtag

SEQ ID NO: 1218 - protein, 405 aa, Muscodor strobelii
  misc_feature: SGI Peptide ID NO. 560000
  misc_feature (1)..(405): NCBI GI: 256724034 Blast Desc: NECHADRAFT_86393 [Nectria haematococca mpVI 77-13-4]
  misc_feature (5)..(404): NCBI GI: 39974073 Blast Desc: [Magnaporthe grisea 70-15] gi|145018246|gb|EDK02525.1| [Magnaporthe grisea 70-15]
  misc_feature (2)..(405): NCBI GI: 256728994 Blast Desc: NECHADRAFT_79831 [Nectria haematococca mpVI 77-13-4]
  misc_feature (5)..(404): NCBI GI: 171677780 Blast Desc: protein product [Podospora anserina] gi|170936958|emb|CAP61617.1| protein product [Podospora anserina]
  misc_feature (1)..(404): NCBI GI: 169597141 Blast Desc: SNOG_01352 [Phaeosphaeria nodorum SN15] gi|111069881|gb|EAT91001.1| SNOG_01352 [Phaeosphaeria nodorum SN15]
  misc_feature (15)..(371): NCBI GI: 116197619 Blast Desc: CHGG_06965 [Chaetomium globosum CBS 148.51] gi|88178244|gb|EAQ85712.1| CHGG_06965 [Chaetomium globosum CBS 148.51]
  misc_feature (22)..(269): NCBI GI: 149210945 Blast Desc: MGCH7_ch7g942 [Magnaporthe grisea 70-15] gi|86196897|gb|EAQ71535.1| MGCH7_ch7g942 [Magnaporthe grisea 70-15]
  misc_feature (79)..(401): NCBI GI: 145609592 Blast Desc: [Magnaporthe grisea 70-15] gi|145017009|gb|EDK01372.1| [Magnaporthe grisea 70-15]
  misc_feature (18)..(376): NCBI GI: 145604731 Blast Desc: [Magnaporthe grisea 70-15] gi|145012673|gb|EDJ97327.1| [Magnaporthe grisea 70-15]
  misc_feature (6)..(404): NCBI GI: 46139773 Blast Desc: FG11401.1 [Gibberella zeae PH-1]
MDTEQHLQIINPAHNNGNIDSFPYFTRLPAEIRLEIWQTSLRRLRLIPIQTRNPEDIGVEVSDGTTYTYYSFADGSPRVSKLLRVSTEARQAALSFYRVCVPCFLWDGHTQREITLRINPEHDVLRPHLSAGPCGLHLSNLIFDLRSRDPLGIGVLNLALDLDTIVNHCSLDPSTLELDARAKVKESLLRLQQIFFVSIEQAGRMFTGPLGGIHTVLKPEYHRSRPIMSTSTAFDRLARDPRDGIELDLGRVYGGTFDPRKMVHEWMQFLDSWDVNPPPHVLSAYRLLISTSTARTGRTRRCVGNSMGGARKRLISDRKSAVRFIQQEEEKWTSVQEYEASRLQRVGEIAQTSYEDRERVPRPAIGFWLFPLNVLGLRSDYEKQIPKRIIDMGAHWPELCLAHLP

SEQ ID NO: 1219 - DNA, 292 bp, Muscodor strobelii
  misc_feature: SGI EST ID NO. CUFF.3362.0
  misc_feature: Variant of the nucleotide sequence at SEQ ID NO 1217
atttttttcgtttcaattgagcaagctggtcgcatgtttacgggccccttaggtggtatccacaccgtcctgaagcctgaataccatcgctcgcggccgatcatgtccacgtccaccgcgttcgaccgcttagcacgagatccgcgagacggtatcgaattggatcttggacgggtgtatggagggacattcgatccgcgaaaaatggtgcatgaatggatgcagtttctcgattcatgggatgtaaatcctcctcctcacgtgctctcggcataccggcttttgatttcca

SEQ ID NO: 1220 - DNA, 1071 bp, Muscodor strobelii
  misc_feature: SGI cDNA ID NO. 560001
  misc_feature: Encodes the peptide sequence at SEQ ID NO 1221
atgatttcccgtgtagtccccgtcgcaattctggctggcgcaagtgtagcagcgacctcttgtcccttgtcagttgaaatcactggcgcagaggcccatattgccgaggtctctgtgacgaataccggtagcgaggccgtcactgtcttcaaaggaaattccgtgctctccgcacatcctactcgagaccttttggtgtccgatgctgacggaaacgcactcccgtttgagggaatctacctgaatttcaatggcgcaaaccttacgagtgacatgttccagactctgcagcctggagagacagtcacagcttctgtcaacgcagcgaagacatataggctcaagggcgtcgagaaagctagcgtaacagcagttcaagcgtttcaatatgcggtgggaactgaagcgccaacatcattgaaagacacacagtcttgtgtcagtgccaagtctggctctatcgacattatccccgaccagaacaggctcgccaatgagcatgctttttcgaagcgtacggagtcattctactcccgtatcctgaagcgtgatgttagctattcaggctgctccagctcgcagactaccaatcttaagacggctgtcgccgatgccgtatctatggccaaggcagccaaaactgccgcggcttcgaacctagactactataccacgtggttcatctcgacctcggtgctgagcaccgtagagacgatctaccaggatgtagctgaggtgtcatctaaagcgcccaccatttactgcaacgacgaatttaatttttgcgattctggagcgatgctgtacacttccccgggggataacgctatcgtgccgtgtcccggcggccagtactgggaccttgctgaatttgcatcccagtgcgtgggtgacgactacgatcaggccggttctattttgcacgagataacacacttgttcggtaccggcgactatgcgtacggtccagacgatgccaagaagctctctgcggcagaggcatccgagaacgctgacacctatgagatgtacgccgagagcgtgagactcggcggctgcaccacgggctaa

SEQ ID NO: 1221 - protein, 356 aa, Muscodor strobelii
  misc_feature: SGI Peptide ID NO. 560001
  misc_feature (1)..(352): Pfam Id: PF02102 Pfam Desc: Deuterolysin metalloprotease (M35) family
  misc_feature (181)..(352): Pfam Id: PF02102 Pfam Desc: Deuterolysin metalloprotease (M35) family
  misc_feature (21)..(355): NCBI GI: 85089784 Blast Desc: NCU05908 [Neurospora crassa OR74A] gi|28919431|gb|EAA28872.1| NCU05908 [Neurospora crassa OR74A]
  misc_feature (1)..(354): NCBI GI: 154302873 Blast Desc: BC1G_09180 [Botryotinia fuckeliana B05.10] gi|150855104|gb|EDN30296.1| BC1G_09180 [Botryotinia fuckeliana B05.10]
  misc_feature (1)..(354): NCBI GI: 156048254 Blast Desc: SS1G_08858 [Sclerotinia sclerotiorum 1980] gi|154693255|gb|EDN92993.1| SS1G_08858 [Sclerotinia sclerotiorum 1980]
  misc_feature (23)..(352): NCBI GI: 240109628 Blast Desc: neutral protease 2 precursor, [Coccidioides posadasii C735 delta SOWgp]
  misc_feature (23)..(352): NCBI GI: 119183495 Blast Desc: CIMG_06682 [Coccidioides immitis RS]
  misc_feature (23)..(345): NCBI GI: 263504918 Blast Desc: NPIIE_NANOT RecName: Full= neutral protease 2 homolog MCYG_01991; AltName: Full=Deuterolysin MCYG_01991; Flags: Precursor gi|238839510|gb|EEQ29172.1| metalloproteinase 8 canis
  misc_feature (6)..(351): NCBI GI: 263504909 Blast Desc: NPIIC_NANOT RecName: Full= neutral protease 2 homolog MCYG_04257; AltName: Full=Deuterolysin MCYG_04257; Flags: Precursor gi|238841776|gb|EEQ31438.1| metalloproteinase canis CBS
  misc_feature (23)..(351): NCBI GI: 263505072 Blast Desc: NPIIB_TRIRU RecName: Full= neutral protease 2 homolog B; AltName: Full=Deuterolysin B; Flags: Precursor gi|183987801|gb|ACC65886.1| deuterolysin B [Trichophyton rubrum]
  misc_feature (23)..(345): NCBI GI: 66363462 Blast Desc: metalloproteinase 3 [Coccidioides posadasii]
  misc_feature (23)..(351): NCBI GI: 258576617 Blast Desc: [Uncinocarpus reesii 1704] gi|237902756|gb|EEP77157.1| [Uncinocarpus reesii 1704]
  misc_feature (23)..(345): SWISSPROT Homolog: EC 3.4.24.39 Deuterolysin
MISRVVPVAILAGASVAATSCPLSVEITGAEAHIAEVSVTNTGSEAVTVFKGNSVLSAHPTRDLLVSDADGNALPFEGIYLNFNGANLTSDMFQTLQPGETVTASVNAAKTYRLKGVEKASVTAVQAFQYAVGTEAPTSLKDTQSCVSAKSGSIDIIPDQNRLANEHAFSKRTESFYSRILKRDVSYSGCSSSQTTNLKTAVADAVSMAKAAKTAAASNLDYYTTWFISTSVLSTVETIYQDVAEVSSKAPTIYCNDEFNFCDSGAMLYTSPGDNAIVPCPGGQYWDLAEFASQCVGDDYDQAGSILHEITHLFGTGDYAYGPDDAKKLSAAEASENADTYEMYAESVRLGGCTTG

SEQ ID NO: 1222 - DNA, 978 bp, Muscodor strobelii
  misc_feature: SGI cDNA ID NO. 560002
  misc_feature: Encodes the peptide sequence at SEQ ID NO 1223
atgtacattgctatagcaccattgtgtaaagctctgaagcgagttcatcatgattggagtgtgactgcgcaaatacgacgtactggcgcgttgtctgagaaagaactgagcagcaggctcggagccgtcgaccgcattgtggaagtctccgactggactgatttcgatgcaatcaaacgtttcagtgccgatcacgatgttgtaatcaacgccggaaactcgttcacttctgaccccattacggccataattgcaggccttcaggagcgcaaaatccaaggcaagatggctaagcttcttcacatcagtggtgctggaaactggctcgatttcggaacgtcaggcaacttcaatcctcggagcaagatctggaatgacgataatgttgacgacatcaagagcattcataaagatatgtttaacggacaatcggacaccttggtccttcaagccggggcagaggctggcttggatacatacatcgtgtgtccctctgtcgtttacggaggagctgcgatcgatgctcctgggctcggagttgggtatgcgctgctcactggtaacgcgaagccgctgggctatgttccctacgttggtgaaggaacagctttgctaagcacaacacacattgtcgacttgatcaacttcctcgtgaagattagcgaggttgcagtttacgcacccaatgcagacggaactgcttacgagcgcttttacatggttgagacggcgcgtgtcgcctggaaagaccttgctactgcactagctcaagtcttacaccaagaggacccggaaaccttcccttccttgcttccgaaacaagtgcctttcgaggaagcaggccagggtgaagcgaaacacttaatcggcgcaaacatgttattcgaggggcctagagctcgacgatctgggttcaaaccggagggcaagcatatcttagagcagctgagcgtggacttaaagggcaaactatcatga

SEQ ID NO: 1223 - protein, 325 aa, Muscodor strobelii
  misc_feature: SGI Peptide ID NO. 560002
  misc_feature (6)..(321): NCBI GI: 46126659 Blast Desc: FG07707.1 [Gibberella zeae PH-1]
  misc_feature (11)..(307): NCBI GI: 46111867 Blast Desc: FG02815.1 [Gibberella zeae PH-1]
  misc_feature (11)..(262): NCBI GI: 256723883 Blast Desc: NECHADRAFT_99823 [Nectria haematococca mpVI 77-13-4]
  misc_feature (18)..(262): NCBI GI: 146323121 Blast Desc: NAD dependent epimerase/dehydratase family protein [Aspergillus fumigatus Af293] gi|129556475|gb|EAL86317.2| NAD dependent epimerase/dehydratase family protein [Aspergillus
  misc_feature (18)..(262): NCBI GI: 119473527 Blast Desc: NAD dependent epimerase/dehydratase family protein [Neosartorya fischeri NRRL 181] gi|119406792|gb|EAW16742.1| NAD dependent epimerase/dehydratase family protein [Neosartorya NRRL
  misc_feature (16)..(316): NCBI GI: 145236529 Blast Desc: An06g00840 [Aspergillus niger] gi|134075368|emb|CAK44991.1| protein product [Aspergillus niger]
  misc_feature (66)..(279): NCBI GI: 238585057 Blast Desc: MPER_09923 [Moniliophthora perniciosa FA553] gi|215454536|gb|EEB91684.1| MPER_09923 [Moniliophthora perniciosa FA553]
  misc_feature (54)..(259): NCBI GI: 256725272 Blast Desc: NECHADRAFT_82985 [Nectria haematococca mpVI 77-13-4]
  misc_feature (11)..(316): NCBI GI: 242783706 Blast Desc: nucleoside-diphosphate-sugar epimerase, [Talaromyces stipitatus ATCC 10500] gi|218720387|gb|EED19806.1| nucleoside-diphosphate-sugar epimerase, [Talaromyces stipitatus
  misc_feature (53)..(297): NCBI GI: 154324056 Blast Desc: BC1G_00427 [Botryotinia fuckeliana B05.10] gi|150842656|gb|EDN17849.1| BC1G_00427 [Botryotinia fuckeliana B05.10]
MYIAIAPLCKALKRVHHDWSVTAQIRRTGALSEKELSSRLGAVDRIVEVSDWTDFDAIKRFSADHDVVINAGNSFTSDPITAIIAGLQERKIQGKMAKLLHISGAGNWLDFGTSGNFNPRSKIWNDDNVDDIKSIHKDMFNGQSDTLVLQAGAEAGLDTYIVCPSVVYGGAAIDAPGLGVGYALLTGNAKPLGYVPYVGEGTALLSTTHIVDLINFLVKISEVAVYAPNADGTAYERFYMVETARVAWKDLATALAQVLHQEDPETFPSLLPKQVPFEEAGQGEAKHLIGANMLFEGPRARRSGFKPEGKHILEQLSVDLKGKLS

SEQ ID NO: 1224 - DNA, 602 bp, Muscodor strobelii
  misc_feature: SGI EST ID NO. CUFF.3383.0
  misc_feature: Variant of the nucleotide sequence at SEQ ID NO 1222
gtccctctgtcgtttacggaggagctgcgatcgatgctcctgggctcggagttgggtatgcgctgctcactggtaacgcgaagccgctgggctatgttccctacgttggtgaaggaacagctttgctaagcacaacacacattgtcgacttgatcaacttcctcgtgaagattagcgaggttgcagtttacgcacccaatgcagacggaactgcttacgagcgcttttacatggttgagacggcgcgtgtcgcctggaaagaccttgctactgcactagctcaagtcttacaccaagaggacccggaaaccttcccttccttgcttccgaaacaagtgcctttcgaggaagcaggccagggtgaagcgaaacacttaatcggcgcaaacatgttattcgaggggcctagagctcgacgatctgggttcaaaccggagggcaagcatatcttagagcagctgagcgtggacttaaagggcaaactatcatgattgtcaacccattcattctccgtgggtaagggcctgttctatgtcgtcgcgcttgttttcgagtcacatgactgtgtcatttgcatatagacattgaaagtcttgtttgcc

SEQ ID NO: 1225 - DNA, 5145 bp, Muscodor strobelii
  misc_feature: SGI cDNA ID NO. 560003
  misc_feature: Encodes the peptide sequence at SEQ ID NO 1226
atgatcatcccacataacaatgtgcctgatagccagaccttcacgcctgagcccgttggattttttccgggcttaggcagccgctctgcctatcgcacgctcgaatgcgacctctccctgagcgacgcgcctgatatccgcgatgcctatacacaaggcgccgccgccctcgacctcgaggcgaagcagatcgtcttgacgcccgccaacctgccagaagatcgtatcgagcgtcaggcatttctgtgcgcagccctactggtgcatggtatagtgcttcagcgccacctcaacagcgaagccgcgcgcgcaggcacacagatccgctttgctgcattcacgggcgagagcttcgggatcattaccgcagccgttgccgctggcgccctgtcgatcgcggacggcacgaaactcgcctatgcactggcaccttttattctcgtcggtgctgagggcgcgcagggcctctcgcccttgcaggcacgcattgcgtccgttctcgcgcaaagcggcgtgaagcagccgcttgtggctgagccagcccatgtcgtcggtctttcaggccggcctgacgcgcttcagaaggcgctcgcaactctgaaagacacttatagcgcgcaggacgtggaattgcacaaggtatatgccgaacatcaggtaaacctgtatgtgcgtatgggcatccgggaaagcttcggtctgttcatggccaatttccccgaactctccttgcaggaactgaaagaaccgacagccttcatggcgcatgccgctcgcatggcacccgtccgcgaggcatttgcttgcatgatggacgaggagggcatcaactttcatgacgcccacacaccgctgatctgcaaccacaaggaagccattgttcagggagccgccgatatccgcgaagccgtgctcggcgtcatcgatcgtgtcatgcaatcccgctggaccgccaaaggctgcgagcatgtcggagctaatctcgtgctcgaactcggccagggcgataaatcaattcgcctcctcaacgataacggtctaaccctgcctgcaatgggctatgcgggcgcccttcagtcaacagaagccttagtcgaggcggcacgactgctgcaggcattcggagagaccgcccgctcgaatatccaatcgacagacctcgctccggacgcgctggcgcttttgcgccagatgtttcaggtgcccgcgcgctatcctggaattgcgaagttcctgcgtcgggagttcgccaagaccatcgccgcaaaccagttcgaccgtcgccacccccttgccccgatgtcgcgacgctttatcgaggtctatcagcacagccttgccgcagcaggcgacctcgaccttgatactggggagttggcacttcaggttcaggccaagaagacggtcgtgggcgacagccacacgctcggtcgcgtgaataccgagatcaaggtgctgcgtgcggacggcacgattgtccaccgcatttccaacgcccgatggagctccgaggcgctggttttctattgcagcaggcttgaggatcgcccggccgtggaactgatccacgcaggtcggcgcatgtccgaacacatccctgaaatcgcgacactctatcgcgcctcctcagcctttctgcccttcgacctgacggacaccctgcagatgccctcaggcatcctacagccccgcgcgattgccgctctgcagattttgtatcaactctccatgctgacattgctgcgccgggagcggcccgcaatcttcacgtcacacgattattacgcggccggcgacctcttggggtggtgcgtcgctctggccgccaccagcgccttgagcgcacgtgatgcggttgcactctatgcgacccatttggagacccatttggagaaaatggacgtcgcggaccctgtcgatacgatcctcgatcgcctccgcgaatccacggccccaattgtcgcggccagtggcgtccccctcaccaccatcaaggatatcgcgcgcgagacacgcgccctgttcagccatgccgttttcgacgcacgccgccgcatcctgcgcctgacggggactaaggttacgcttatcgcaacccctgcggacatcacaaggcgcgggcataatacggcgctggaagtcctggaacattgctgtatatccttgctgacccgtgataaccagcgcgtcctgcagtttgcgcaggggcgcaagatcctgagcagcaccgtcttttcctacataaagctgggcgaacaggtgctcggcttcggcaagggcggaagtgagtccatgacggtattcgtgacccggcagaccatcatgcctcttgatacgagcaagcccatcatcgtccgcaaaatcttgagcgaggccctgatcgcagtcggttggaacccggatggcgagggtgtcatgctcccgcccttccgcaaggccaagcgtcaggcggaattcctgaaagccctcccgggcccggcacgctggtatttccccgaggtcttcgaaattctggagcgcgaaattcccgtccccccgcatcagcggcaggccatgcagcgcgacagttttaaggaaaccatctacgaaatgagtttcgtgccgggcgaggaagtcagccgctatgtggagcgatgcagcccgccggctgcaatcgtcgcgcgtatctatgaacagatcgcgctcctcctggcgcgcgatgtccatagcctataccgcgtcccggctccgggccagacactggagacctcgtatttccacaagatcgaggcacggctggcactctgcaggcgcaccgccccgctgacgttcggccccaatatactcgatacggaccatatcgtcatcaacggcgtgcagtatcgcaacgtcggcactttgctcaaagcttttcgggagcaacccgcctattgcgagattctagagccacgcgtccatgcgctcgtcatgggggacaccaacaccgaaaacatcaagatcaacaatcttgtccccttgcagcacgcacaaatactgatcgaaagcggtgccgcgcaatgcgagattgatgcagccctcgatgccgtgaccgcgagttcgatcgacctgcgattcctcgacccgcgcgccatcggctttgcaagcgagggtgccgagacgcgtgacgacccgatgtatgacaataagccgtggcacaactcgctcggccactacgacgaaatgcaccatgagcgtttcgaactcgccgttcgtaccggaccgagccagacacccgatatccagatcacctacgagccgaacaacccatatgcccgcgcctattgcgtggaggacttgacggaacgtgacattgatatcgcaagccagcccagcggtgtgggcatggaacattgtttcgcgccggtaatgcgcaaattatacgacatggacaacccgaactcgccgcgtatagccgaggacccgcactggttgaccgaattaggcggcgccttgatcgattgcctgctagtccaacgacgcccggtcgcaattttttgtgaaggcatccgctggctgaactgggccctgcaaatgctggaaggcacgcgacattcgtttctgggcatcgaagttccggcagcatcggtcccgcatcagccccattacggtaccggattaccaaaccaagcatctcgacaaatggcgatttcgcccaatcctgccttttcccgtatcggcatggccgctatggcgccggaatcgcgcgtcatctgcacgccctggagccgtatggtgcggggtctggccctcggccagtaccccgtcggctatgatgatgccattgccgggatcatcacccaggcacgcgatatcctgacgcaacaagtcacgaagcccacgggctacctgcgttttgcgctccagcttgctgaactcgggatcgcgctgaaccggccgggcgcgcgcgtcacacatgacgaactgcagacccgcgcaaccgggctgatgaatgcactcggcgctgaaacaaatccctattacgcagccgtcggcgggggtatcctgtttgacgcattcgcgaaattcaggctcgacatatccctgctcaccagcacgcgcgatttcgcagctgagatgctggacgtgatcgaccgcatccagccagaccagatcaaggacggaaacgccggcaaccacggccaatacgaaaagctcttcgcttacacctcgatcttcctcgggttcgggcaggcaggtctgaccaacaggctgaccagcggcccacgtaattacgtgcgcgaggccctgcacctcatccagaccgtcccctccccgttcttcaagggccgcgggtgttcgatgctgttttccgttctctccaccatcgggctggacggcatgattttcgacgacgggcacgacttcatgaaggaggtgctggaatacgtcgaccgtgatgacagcatcgacttccccttatatttcccgcaacccatcacgcgcgcctacgagaagatctacccgcgtatcacgatgctgaacgcaattgctatctcggggcgacatgaatacgccagcatggggcatgaccgggtcgcagaactcaagccgctctgggctgggctggagccggcggagaagatgcaccagagcctgtattatctcattgccctgcacaatcttagtcgcaccgaacaggaaatcggcagtgtccatgtgttgatggatgagctgctcggctatctggatgttgtggatccgggcgccaatttcttcctcaacggcctcagccacgcctacgtcgtcgaatctgccatgctgaccgggcgtctgggcgatataccgccggatgagattgatcgcatcgccggttgcctcaagcggatggatgcaacgccgcttgaccgagcaagccgcgcctatccgttcagctacaacctcaacgcactcggcgaaatcggcgaggctggcgcgttaatgtccccaaatccggtttacggcggtagttctgccttctcatggctggccgggcaattgtcgccggatggccagaccgagggcagccgcctgctgatgctgggcaatgcgctgatgggtctgggcttacgtcttcgccccagagaacagtcatcgaccccgatgtttgatgatttcgccaggcgccgcgggtggaagaccgaggcctga

SEQ ID NO: 1226 - protein, 1714 aa, Muscodor strobelii
  misc_feature: SGI Peptide ID NO. 560003
  misc_feature (21)..(196): NCBI GI: 260654630 Blast Desc: malonyl CoA-acyl carrier protein transacylase [Jonquetella anthropi E3_33 E1] gi|260630646|gb|EEX48840.1| malonyl CoA-acyl carrier protein transacylase [Jonquetella E3_33
MIIPHNNVPDSQTFTPEPVGFFPGLGSRSAYRTLECDLSLSDAPDIRDAYTQGAAALDLEAKQIVLTPANLPEDRIERQAFLCAALLVHGIVLQRHLNSEAARAGTQIRFAAFTGESFGIITAAVAAGALSIADGTKLAYALAPFILVGAEGAQGLSPLQARIASVLAQSGVKQPLVAEPAHVVGLSGRPDALQKALATLKDTYSAQDVELHKVYAEHQVNLYVRMGIRESFGLFMANFPELSLQELKEPTAFMAHAARMAPVREAFACMMDEEGINFHDAHTPLICNHKEAIVQGAADIREAVLGVIDRVMQSRWTAKGCEHVGANLVLELGQGDKSIRLLNDNGLTLPAMGYAGALQSTEALVEAARLLQAFGETARSNIQSTDLAPDALALLRQMFQVPARYPGIAKFLRREFAKTIAANQFDRRHPLAPMSRRFIEVYQHSLAAAGDLDLDTGELALQVQAKKTVVGDSHTLGRVNTEIKVLRADGTIVHRISNARWSSEALVFYCSRLEDRPAVELIHAGRRMSEHIPEIATLYRASSAFLPFDLTDTLQMPSGILQPRAIAALQILYQLSMLTLLRRERPAIFTSHDYYAAGDLLGWCVALAATSALSARDAVALYATHLETHLEKMDVADPVDTILDRLRESTAPIVAASGVPLTTIKDIARETRALFSHAVFDARRRILRLTGTKVTLIATPADITRRGHNTALEVLEHCCISLLTRDNQRVLQFAQGRKILSSTVFSYIKLGEQVLGFGKGGSESMTVFVTRQTIMPLDTSKPIIVRKILSEALIAVGWNPDGEGVMLPPFRKAKRQAEFLKALPGPARWYFPEVFEILEREIPVPPHQRQAMQRDSFKETIYEMSFVPGEEVSRYVERCSPPAAIVARIYEQIALLLARDVHSLYRVPAPGQTLETSYFHKIEARLALCRRTAPLTFGPNILDTDHIVINGVQYRNVGTLLKAFREQPAYCEILEPRVHALVMGDTNTENIKINNLVPLQHAQILIESGAAQCEIDAALDAVTASSIDLRFLDPRAIGFASEGAETRDDPMYDNKPWHNSLGHYDEMHHERFELAVRTGPSQTPDIQITYEPNNPYARAYCVEDLTERDIDIASQPSGVGMEHCFAPVMRKLYDMDNPNSPRIAEDPHWLTELGGALIDCLLVQRRPVAIFCEGIRWLNWALQMLEGTRHSFLGIEVPAASVPHQPHYGTGLPNQASRQMAISPNPAFSRIGMAAMAPESRVICTPWSRMVRGLALGQYPVGYDDAIAGIITQARDILTQQVTKPTGYLRFALQLAELGIALNRPGARVTHDELQTRATGLMNALGAETNPYYAAVGGGILFDAFAKFRLDISLLTSTRDFAAEMLDVIDRIQPDQIKDGNAGNHGQYEKLFAYTSIFLGFGQAGLTNRLTSGPRNYVREALHLIQTVPSPFFKGRGCSMLFSVLSTIGLDGMIFDDGHDFMKEVLEYVDRDDSIDFPLYFPQPITRAYEKIYPRITMLNAIAISGRHEYASMGHDRVAELKPLWAGLEPAEKMHQSLYYLIALHNLSRTEQEIGSVHVLMDELLGYLDVVDPGANFFLNGLSHAYVVESAMLTGRLGDIPPDEIDRIAGCLKRMDATPLDRASRAYPFSYNLNALGEIGEAGALMSPNPVYGGSSAFSWLAGQLSPDGQTEGSRLLMLGNALMGLGLRLRPREQSSTPMFDDFARRRGWKTEA

SEQ ID NO: 1227 - DNA, 735 bp, Muscodor strobelii
  misc_feature: SGI cDNA ID NO. 560004
  misc_feature: Encodes the peptide sequence at SEQ ID NO 1228
atggtctcccacgacgaagctggcaagctcggcggtggccagacctacgccaccgtctactccagctcctttctgagcttattctacgactactatgtcctcagcttcaacatgcgcttctggggctgcccaaccagcgtcctcctccctttcttcacggagaatttctcgcggaaccacctcgactgcggtgtcgcgacgggttggttcccgtcggaagcactaggcaggccgttccggaaacatggcaagcagcaattgacgctgttggatatcaatcctaattcgttgaaagcggcggaggcgagggtgttggctgtcacgacggcgacgacaacgaagtgtatcgaagcagacgttacgcttccgccacctgcggccttggcagacaagaagtttacctccatctccatgttcaatctcttccactgcatgcccggcggtaaggaaaagtttaccaagacgtttgccacgttcagaaagctcttggccgaggatggcgtgctttccgggtgtactgtcttgggccccaaagcgaccacaagttggatgataaagtcttatctcaagttttataatgattggtggggcgtgtttaacaataaggacgatacaagggaggatttagaggaggcgctgaagagagaatttgaggaggtggagacgactttggtgggggtgatgttgttgtttcgggcaacgaagccgaggacggaggcgaatttggttgcctaa

SEQ ID NO: 1228 - protein, 244 aa, Muscodor strobelii
  misc_feature: SGI Peptide ID NO. 560004
  misc_feature (61)..(169): Pfam Id: PF08242 Pfam Desc: Methyltransferase domain
  misc_feature (19)..(239): NCBI GI: 145249536 Blast Desc: An14g04840 [Aspergillus niger] gi|134081789|emb|CAK42045.1| protein product [Aspergillus niger]
  misc_feature (17)..(238): NCBI GI: 222148147 Blast Desc: Avi_1536 [Agrobacterium vitis S4] gi|221735135|gb|ACM36098.1| Conserved [Agrobacterium vitis S4]
  misc_feature (14)..(236): NCBI GI: 242212023 Blast Desc: [Postia placenta Mad-698-R] gi|220729035|gb|EED82916.1| [Postia placenta Mad-698-R]
  misc_feature (14)..(236): NCBI GI: 242209985 Blast Desc: [Postia placenta Mad-698-R] gi|220730064|gb|EED83927.1| [Postia placenta Mad-698-R]
  misc_feature (12)..(237): NCBI GI: 22126203 Blast Desc: y2318 [Yersinia pestis KIM 10] gi|45441643|ref|NP_993182.1| YP_1839 [Yersinia pestis biovar Microtus str. 91001] gi|51596310|ref|YP_070501.1| YPTB1984 IP F]
  misc_feature (27)..(225): NCBI GI: 256721204 Blast Desc: NECHADRAFT_82309 [Nectria haematococca mpVI 77-13-4]
  misc_feature (17)..(233): NCBI GI: 254470156 Blast Desc: SAM-dependent methyltransferase [Pseudovibrio sp. JE062] gi|211960467|gb|EEA95663.1| SAM-dependent methyltransferase [Pseudovibrio sp. JE062]
  misc_feature (12)..(237): NCBI GI: 171678968 Blast Desc: protein product [Podospora anserina] gi|170937555|emb|CAP62212.1| protein product [Podospora anserina]
  misc_feature (18)..(237): NCBI GI: 220922267 Blast Desc: Methyltransferase type 12 [Methylobacterium nodulans ORS 2060] gi|219946874|gb|ACL57266.1| Methyltransferase type 12 [Methylobacterium nodulans ORS 2060]
  misc_feature (17)..(237): NCBI GI: 110805944 Blast Desc: encoded within prophage [Shigella flexneri 5 str. 8401] gi|110806090|ref|YP_689610.1| encoded within prophage [Shigella flexneri 5 str. 8401] gi|195938816|ref|ZP_03084198.1| 5
MVSHDEAGKLGGGQTYATVYSSSFLSLFYDYYVLSFNMRFWGCPTSVLLPFFTENFSRNHLDCGVATGWFPSEALGRPFRKHGKQQLTLLDINPNSLKAAEARVLAVTTATTTKCIEADVTLPPPAALADKKFTSISMFNLFHCMPGGKEKFTKTFATFRKLLAEDGVLSGCTVLGPKATTSWMIKSYLKFYNDWWGVFNNKDDTREDLEEALKREFEEVETTLVGVMLLFRATKPRTEANLVA

SEQ ID NO: 1229 - DNA, 930 bp, Muscodor strobelii
  misc_feature: SGI EST ID NO. CUFF.3392.0
  misc_feature: Variant of the nucleotide sequence at SEQ ID NO 1227
ctaattcgttgaaagcggcggaggcgagggtgttggctgtcacgacggcgacgacaacgaagtgtatcgaagcagacgttacgcttccgccacctgcggccttggcagacaagaagtttacctccatctccatgttcaatctcttccactgcatgcccggcggtaaggaaaagtttaccaagacgtttgccacgttcagaaagctcttggccgaggatggcgtgctttccgggtgtactgtcttgggccccaaagcgaccacaagttggatgataaagtcttatctcaagttttataatgattggtggggcgtgtttaacaataaggacgatacaagggaggatttagaggaggcgctgaagagagaatttgaggaggtggagacgactttggtgggggtgatgttgttgtttcgggcaacgaagccgaggacggaggcgaatttggttgcctaagttgcttgagctagcttgagtgatgtgaagctgtgaggaagcgatcttgctggatactaggatgaagcctggaatttcatttcttctacggcgttgttctgacaatacagaaataggaggggatctatccttatcgtttattttcgaagctattctactagcattgaactcaccatcgtttcttttctcgaacatgaatccctaatatgagtctcgagaacatgtcaccgcgagcgattggaaatatatccaacgtagcttcagttatgaggcaataaatgacgacgagtcgactatccaaatttcgtatgcaacgacttgcttgataacccgcaatcctcagaccctcaccaagcagcacagtgacacttgcgagccaggcctctctccgacacaaaaaaagggaacattgcctctatgacagagcccttgtttcatacccttagagcccaaatcagaggaatagttcaataaa

SEQ ID NO: 1230 - DNA, 1515 bp, Muscodor strobelii
  misc_feature: SGI cDNA ID NO. 560005
  misc_feature: Encodes the peptide sequence at SEQ ID NO 1231
atgagcgaaaacagagaacgtgagctgtctcgcagctgcaatatctggttctatcgccaactaattagtagggccaaggccctcggcgagactgtaactcttagctcgattaaccccgactctctagaacgacaggtccaggtttccgaccgcgtgtggaactatgtatctgcaattttcgaagcgtcagggaggcgagaaatcgaatcattcatgaacactggaccaccgctcgaagacggatcgcttgtgtcagactttgccccgatctatttccattacgtgttcgaggatgagcttttcctcgccgagttccgccgcgaggacgcaaaggggaagttgaagatgctgattgtctcgtggtttgcagtgtcattcgccgttgattacatgttcaaggacgatatgaatgaggcagattttaacagcggtctcgcgtatctcattgacatcgggcagtgtcccataagtgagtatgaactccgccaaatcgcttcatttgatgaggtacgcgcgtttgcaaggagcagatttgacgtcggtctttggtacgttcggcccactccgccctgcggcgacccccttacgtccgatgagaaacgcgcacatgatgagtgtagacgacgcgctgccactggcactacgaacgttgttgatttgatggatgatatgccacataggtatatcttcgtgcctaagggtaatgttttcatcgactacattatcgaggtcatggctctcgctgagatgcacgatgtttattttgtcaaacggaagccccatctacttgatcgcttagaatgcgaggattgtgtagagaggatgggctgtgagcaggtcggagttcgtgtaccaatccatatctacgaggctgcgcttgagcagtatgaatatagcggtgcacgccagatgagagatcttgtttctgagcttttccaggcctcagcgagtacgagcaggaggctttggaagtacctttgcgagagattcgagctgttgggtcaatgtccgcaaaagactacctttgctgatatttgcaggacttataacatgcatcccgcggagtgcgtcattctcggtgttcaacagctcgtcctaaatgaagcgttcagtgaggtaagaatcgaatgggaaaatcatattcgaagttgggggtgggaccacgaagacgaagaaaaccccgttacatcgctacagtgcaataacgcatgtgcgaccttgggcctcgtgctcagcaacgagccatacaagagaatccttagcgatttgggtgcgaagggtccagtcagtgtctttcgcatgtaccatggaaatatcgagtgggatccgaaaaatccggcgcttatgcgacttgagatcgagtctcccgcttatttgcatgaagggagaattatcgacagctatatatgtcgtgtgttttgcgatcttgagacttggatcactccatgtgattccgatcgctctgttgaagatcgagaaaggccacacgactccagctcagagcagacggaatag

SEQ ID NO: 1231 - protein, 504 aa, Muscodor strobelii
  misc_feature: SGI Peptide ID NO. 560005
MSENRERELSRSCNIWFYRQLISRAKALGETVTLSSINPDSLERQVQVSDRVWNYVSAIFEASGRREIESFMNTGPPLEDGSLVSDFAPIYFHYVFEDELFLAEFRREDAKGKLKMLIVSWFAVSFAVDYMFKDDMNEADFNSGLAYLIDIGQCPISEYELRQIASFDEVRAFARSRFDVGLWYVRPTPPCGDPLTSDEKRAHDECRRRAATGTTNVVDLMDDMPHRYIFVPKGNVFIDYIIEVMALAEMHDVYFVKRKPHLLDRLECEDCVERMGCEQVGVRVPIHIYEAALEQYEYSGARQMRDLVSELFQASASTSRRLWKYLCERFELLGQCPQKTTFADICRTYNMHPAECVILGVQQLVLNEAFSEVRIEWENHIRSWGWDHEDEENPVTSLQCNNACATLGLVLSNEPYKRILSDLGAKGPVSVFRMYHGNIEWDPKNPALMRLEIESPAYLHEGRIIDSYICRVFCDLETWITPCDSDRSVEDRERPHDSSSEQTE

SEQ ID NO: 1232 - DNA, 637 bp, Muscodor strobelii
  misc_feature: SGI EST ID NO. CUFF.3395.0
  misc_feature: Variant of the nucleotide sequence at SEQ ID NO 1230
cagcaggcaatgagcgaaaacagagaacgtgagctgtctcgcagctgcaatatctggttctatcgccaactaattagtagggccaaggccctcggcgagactgtaactcttagctcgattaaccccgactctctagaacgacaggtccaggtttccgaccgcgtgtggaactatgtatctgcaattttcgaagcgtcagggaggcgagaaatcgaatcattcatgaacactggaccaccgctcgaagacggatcgcttgtgtcagactttgccccgatctatttccattacgtgttcgaggatgagcttttcctcgccgagttccgccgcgaggacgcaaaggggaagttgaagatgctgattgtctcgtggtttgcagtgtcattcgccgttgattacatgttcaaggacgatatgaatgaggcagattttaacagcggtctcgcgtatctcattgacatcgggcagtgtcccataagtgagtatgaactccgccaaatcgcttcatttgatgaggtacgcgcgtttgcaaggagcagatttgacgtcggtctttggtacgttcggcccactccgccctgcggcgacccccttacgtccgatgagaaacgcgcacatgatgagtgtagacgacgcg

SEQ ID NO: 1233 - DNA, 2430 bp, Muscodor strobelii
  misc_feature: SGI cDNA ID NO. 560006
  misc_feature: Encodes the peptide sequence at SEQ ID NO 1234
atgatggatgacctgagcctgaggcaatatggcttgatcgccctgatcagctttgttcctatctacttgacatatggggcctttggcagacgagagacgaagctcagcaaaatccgaactttgttccccgtgatcggcgtaccaagagggacactagcttggacgcgagccctatttctttcggcccggaatatgtctggcaatgtcatagacggctatgatatgtattgcaagaagagtaataaaccgtttgccgtcgcgagtgttggcaataccatcgtggtagcgatacccgcatcgcaagtaaacgtgatcaacaaatcagagagggaggttagcgcctattccatccagatggaaacaatcagacctgagtatacgatgggtggattcagcgatgtctacgagaaccccctacagtatgatatcgtacggagacacatggccgccgatgtcaccgatttcgcgggaccggtggcggaggaattggacgctgctttccgagactgttggactaatatgccaggtgaatggacaacggtgccagcatgggattcctgtctccaaatcatttcaagggcaagtactcgtgtgtttctgggctcacagcactgccgagatgaatccttgttgcgctatttcaagatgtacgcagcttcagtctatgctgccgcaaccctcgtgaatgtgctgccaagctgggcgaagccgatccttggacccgtgatcgggtttcctgctcggaggcatcttgcgagctgcgagcaaatactcattcctatcgttgagaagaggctacgtacttggaacgaagcagctgcaaaagatcaacaggatgacacgctcggtcgtattatcgaaaaatgtctaaaactagaaccggagcagaaaacagctcagaatattggacgccgactcctgatgctcatcctcatgtccattttcgcgacatcttacacgttagactgttgcctcatcgacatcctcaagaccgactcgaaagacgacaccatcgcgggccttcgggaagagtgcgatagcattgaaaagcaacacggtaatcttaacaatactgccgctatcgagaaactgtatcgaattgattcgaccttgcgggaatccatgcgtctctcccctttcccggtattctcgccatttcgtgccgtggcacccggtgagggtcttgatctaggtaacggtaatcgtataccggctggtgcacgttttggtgtgccatctcaggcaattcacctcgatgagaattactatgagaacccctaccaattcgacccgttcagattttcgaggaaatatgaaggtgctaacacactgcccgaccaaccaactaggcaggagctgtgcattcaagggagcgaatcgttctttggtttcgggcactatctgaggcagcagccagaggtcccgcctcctataaatcccgatgatccaggcttagggccggccatactcggcgtaacgtggactctggcagccatagctttgacagctgtaggcgccagggcctacgtgagaatcaaggtcttcaagtcactcatgcctgaggactggataatgacgatagccatagccctgcatatagcctatcagatcttcacgaccttagcctacacatggggacttggaaaacatgacgcaagtatcacgttcgatccgcaggccatcaacatcctgaaatgggtctggatttccactgtctctggcgtgttggcatctagtatagcacgcatctcggttgctgtgtttttggtcagggcctttggacgtaaggcctggttcaagtggtttatgataacttacaccaccctgctcgtcacagtcgctgtactgtacattatattcatcttcgcatcggtcaagccagtatatgcgctttggaatccattcctgacaatatcgaagtgggacccgagaatacgatacgataccgccattctctctttatctctcttcaccttctctgatctgtcgtatgtcttgtttcccgtcattatcgtctggaagctcaatatgccactccatcgcaaggtcagcctgagtattctagtagcagtttcgctcatcaccatgacggcatcgatcttcaagaccgtcatcgtgagttccgcaacttcgcctagtaacacgatgtcaaagacggtattctatgacaccggtcttgccagcctgtggactggcgtagagcaggcgctggtcatcatcacgggctgtgttccagcgctgagggtgggaatgaagctcgagtttgcgtcgctaagaaagttcggctcttcgctggcgaattacctaggaaagccatccaatgggactgcaagtcagatctccatcttgacacctgctgatcatcaaaatcggcaatatcatgagcttcagaatatggaatcgcagggaaagccaacgagagaatggtaa

SEQ ID NO: 1234 - protein, 809 aa, Muscodor strobelii
  misc_feature: SGI Peptide ID NO. 560006
  misc_feature (403)..(437): Pfam Id: PF00067 Pfam Desc: Cytochrome P450
  misc_feature (27)..(466): NCBI GI: 116206030 Blast Desc: CHGG_02308 [Chaetomium globosum CBS 148.51] gi|88182905|gb|EAQ90373.1| CHGG_02308 [Chaetomium globosum CBS 148.51]
  misc_feature (475)..(802): NCBI GI: 116206026 Blast Desc: CHGG_02306 [Chaetomium globosum CBS 148.51] gi|88182903|gb|EAQ90371.1| CHGG_02306 [Chaetomium globosum CBS 148.51]
  misc_feature (36)..(466): NCBI GI: 238841492 Blast Desc: cytochrome P450 [Microsporum canis CBS 113480]
  misc_feature (473)..(807): NCBI GI: 238841489 Blast Desc: conserved [Microsporum canis CBS 113480]
  misc_feature (51)..(472): NCBI GI: 39971863 Blast Desc: MGG_07247 [Magnaporthe grisea 70-15] gi|145019747|gb|EDK03975.1| MGG_07247 [Magnaporthe grisea 70-15]
  misc_feature (43)..(439): NCBI GI: 242811722 Blast Desc: cytochrome P450, [Talaromyces stipitatus ATCC 10500] gi|218714147|gb|EED13570.1| cytochrome P450, [Talaromyces stipitatus ATCC 10500]
  misc_feature (50)..(466): NCBI GI: 212544180 Blast Desc: cytochrome P450, [Penicillium marneffei ATCC 18224] gi|210065213|gb|EEA19307.1| cytochrome P450, [Penicillium marneffei ATCC 18224]
  misc_feature (479)..(758): NCBI GI: 116191141 Blast Desc: CHGG_05288 [Chaetomium globosum CBS 148.51] gi|88181201|gb|EAQ88669.1| CHGG_05288 [Chaetomium globosum CBS 148.51]
  misc_feature (34)..(467): NCBI GI: 171677652 Blast Desc: protein product [Podospora anserina] gi|170936894|emb|CAP61553.1| protein product [Podospora anserina]
  misc_feature (14)..(435): NCBI GI: 189194013 Blast Desc: ent-kaurene oxidase [Pyrenophora tritici-repentis Pt-1C-BFP] gi|187978909|gb|EDU45535.1| ent-kaurene oxidase [Pyrenophora tritici-repentis Pt-1C-BFP]
MMDDLSLRQYGLIALISFVPIYLTYGAFGRRETKLSKIRTLFPVIGVPRGTLAWTRALFLSARNMSGNVIDGYDMYCKKSNKPFAVASVGNTIVVAIPASQVNVINKSEREVSAYSIQMETIRPEYTMGGFSDVYENPLQYDIVRRHMAADVTDFAGPVAEELDAAFRDCWTNMPGEWTTVPAWDSCLQIISRASTRVFLGSQHCRDESLLRYFKMYAASVYAAATLVNVLPSWAKPILGPVIGFPARRHLASCEQILIPIVEKRLRTWNEAAAKDQQDDTLGRIIEKCLKLEPEQKTAQNIGRRLLMLILMSIFATSYTLDCCLIDILKTDSKDDTIAGLREECDSIEKQHGNLNNTAAIEKLYRIDSTLRESMRLSPFPVFSPFRAVAPGEGLDLGNGNRIPAGARFGVPSQAIHLDENYYENPYQFDPFRFSRKYEGANTLPDQPTRQELCIQGSESFFGFGHYLRQQPEVPPPINPDDPGLGPAILGVTWTLAAIALTAVGARAYVRIKVFKSLMPEDWIMTIAIALHIAYQIFTTLAYTWGLGKHDASITFDPQAINILKWVWISTVSGVLASSIARISVAVFLVRAFGRKAWFKWFMITYTTLLVTVAVLYIIFIFASVKPVYALWNPFLTISKWDPRIRYDTAILSLSLFTFSDLSYVLFPVIIVWKLNMPLHRKVSLSILVAVSLITMTASIFKTVIVSSATSPSNTMSKTVFYDTGLASLWTGVEQALVIITGCVPALRVGMKLEFASLRKFGSSLANYLGKPSNGTASQISILTPADHQNRQYHELQNMESQGKPTREW

SEQ ID NO: 1235 - DNA, 2919 bp, Muscodor strobelii
  misc_feature: SGI cDNA ID NO. 560007
  misc_feature: Encodes the peptide sequence at SEQ ID NO 1236
atgtcttctgcactctccgacctaccttcgctatctggactggtgcgccaccaggatcgccactgcgctgatttcaactcccttcaaacgcttcttatcgaaagggccaaggctgctattcctcgatcactcattttctaccatcaaggagatgtcataactccatatcgggtttcttatagcgacttgtgtagtcgagcgctgcataacagtgtcttgattgaatctcttccacagtactggcctggctctcccctacttatacatctcgaagatcaatatgatgccattctctggttttggacagccctgttcgccaactgtgtcccggtcatgtcatcaccatttagcaatgtcagagaagacagaatcaaacacatcagacacctgtcagagttattgcagtctccaatctgcatcacaagagcaaaggacgtgcataattttggcgataatcatactttaaacattcttacagtcgaatctttctataaaaagcaatggaacacagcggatgtcgaagcagataatacaaccccacagcgcaacggcaggcctcgtccggagccgaatgaccaggtctcagggtcttatccagggggagatactcttgcagtactcatgcttacatcaggaagtaccgggaactctaaagccgtctgcttgactcacaagcaaatatttgcagcaatcaaagggaagtcggcaatgaaagcacttccaatcggatttccgttcctcaactggattgggctcgaccacgttgctagcttgatagaaattcacataccagctctatggcttgacgtcgatcaggttcatgtgcatgcatcaaatgttgttcctaccccaaatgtctttttagatattatcagtcgacaccaagtttgtcgatcttttgccccgaatttctttctcgccaagcttgctacggttccgttggatgcaaagtgggatctggcggctctgactctccttgtgtcgggtggtgaggcgaacgatataggcacttgtgtagctgtgtctactctcctacaaaaatgcggtgccgccaagaacgttgttgttccaggctttgggatgacagagacctgcgcgggctctatctataacttgacctgccccgatggagatctggagaatgagtatgctatcacctcagtcggcaaatgtattgatggaatggagatcagggtcgtcttgccacccaaatccgtgaccacagacttcaccactcaaaacgaaattgggaatttagaagtacgcggagaggtggttttcaagtcctattaccgccagccagatgcaacccgcgagtccttcacatcagacggttggtttcgaacaggggaccagggaatcatcgataaccatggaaatctgtgcctgattggccgcatcaaagacgtttttaatatcaatggggttaaattcatagcttcagacattcaaaactctcttgaaagagcggtagagttgcttgttactcgaatgatctgctttccttcaagaacggatcacacagaacaggtcaccatcgcctatattccgcttaaacctaccatgccgaactccatcattatcattgaagatctcttgacacaggcttcctttgaaagctgtggctccattcctgttatattcgcactgagcaagaaatctatcccattgctccctatttctgcacttggcaaaatctcacgatccaagatgtcgacactctttagcgccggccagttcaacgccgacgtgagtgaacatcgacaaacgttgaagagggccaaggaagaagagctccaaagataccaacaggattcccacagttgcggtatcgtagacgaagaagagcttactcgtgagttttcgactgcacttggcactacgttcaacaggaacatcacggcctacacgaatatcttcgagttaggcatcacttcaatggacctaattcgcttgaaaaatagagtccagacccgcttcggcattgaagtatccctcactctactattaaaacatccttcgcctagaacactggcatcagttctctacgactcaaaatctgcatggattgtcgattatgaacctgtagtcacggtacgatctaacggtactaaaacaccattatggctcgttcaccccggtgttggtgaggtgctcgtgtttatgggactagcgcaccacatgcgtgatgatgaccggccaatctacgccctacgagcaaggggtttcgaaggccagaaccatttcacttccatagaagaagcggtcgagacatacgtaaatgcgcttcaaataaggcagcctgatggcccctacgcgcttgctggatatagttatggagctatgttggcatttgaaatggccaagaagctcaaagaatcaggcgcctcggtgaatttcttggccagcttcaacctgccgcctcacatcaagctacgcatgagacatctgacgtggaatctctgtctcttacacctgtgctacttcgttggacttatctcggatgtatatgccgagaatctggaagatcagggcgattttcaaacactggatcgttcagatgctctccaatatctcctaaaatcagcagatactggcagactacaagagctggacctgaatgaacaggccctggtggaatggacgcaggtcgcttacggcctccagagaatggctgttgattatgagccccgaggcatggttgatgttatggatgtgtttcacgctgtgcctctgaaaatggtagctaactcacgacaagaatggctagaggaccatttacataaatgggagtatttctgtcataccacgcctcgatttcatgaggtcgagggtgcgcattacactatgctagggtcagagtttgttctatcgttttcggataaacttcgagccgctttgaagaacaggggattgtga

SEQ ID NO: 1236 - protein, 972 aa, Muscodor strobelii
  misc_feature: SGI Peptide ID NO. 560007
  misc_feature (59)..(495): Pfam Id: PF00501 Pfam Desc: AMP-binding enzyme
  misc_feature (615)..(682): Pfam Id: PF00550 Pfam Desc: Phosphopantetheine attachment site
  misc_feature (706)..(967): Pfam Id: PF00975 Pfam Desc: Thioesterase domain
  misc_feature (127)..(475): Pfam Id: PF00501 Pfam Desc: AMP-binding enzyme
  misc_feature (633)..(682): Pfam Id: PF00550 Pfam Desc: Phosphopantetheine attachment site
  misc_feature (706)..(802): Pfam Id: PF00975 Pfam Desc: Thioesterase domain
  misc_feature (33)..(972): NCBI GI: 116206018 Blast Desc: CHGG_02302 [Chaetomium globosum CBS 148.51] gi|88182899|gb|EAQ90367.1| CHGG_02302 [Chaetomium globosum CBS 148.51]
  misc_feature (50)..(943): NCBI GI: 238841486 Blast Desc: TdiA [Microsporum canis CBS 113480]
  misc_feature (21)..(972): NCBI GI: 171677654 Blast Desc: protein product [Podospora anserina] gi|170936895|emb|CAP61554.1| protein product [Podospora anserina]
  misc_feature (25)..(972): NCBI GI: 115387353 Blast Desc: [Aspergillus terreus NIH2624] gi|114195266|gb|EAU36966.1| [Aspergillus terreus NIH2624]
  misc_feature (44)..(972): NCBI GI: 212533157 Blast Desc: thioesterase domain protein [Penicillium marneffei ATCC 18224] gi|210072099|gb|EEA26188.1| thioesterase domain protein [Penicillium marneffei ATCC 18224]
  misc_feature (33)..(972): NCBI GI: 156141035 Blast Desc: TdiA [Emericella nidulans]
  misc_feature (57)..(972): NCBI GI: 239614048 Blast Desc: TdiA [Ajellomyces dermatitidis ER-3]
  misc_feature (57)..(972): NCBI GI: 261204815 Blast Desc: TdiA [Ajellomyces dermatitidis SLH14081] gi|239587406|gb|EEQ70049.1| TdiA [Ajellomyces dermatitidis SLH14081]
  misc_feature (50)..(972): NCBI GI: 116208788 Blast Desc: CHGG_03687 [Chaetomium globosum CBS 148.51] gi|88184284|gb|EAQ91752.1| CHGG_03687 [Chaetomium globosum CBS 148.51]
  misc_feature (45)..(972): NCBI GI: 239613438 Blast Desc: TdiA [Ajellomyces dermatitidis ER-3]
MSSALSDLPSLSGLVRHQDRHCADFNSLQTLLIERAKAAIPRSLIFYHQGDVITPYRVSYSDLCSRALHNSVLIESLPQYWPGSPLLIHLEDQYDAILWFWTALFANCVPVMSSPFSNVREDRIKHIRHLSELLQSPICITRAKDVHNFGDNHTLNILTVESFYKKQWNTADVEADNTTPQRNGRPRPEPNDQVSGSYPGGDTLAVLMLTSGSTGNSKAVCLTHKQIFAAIKGKSAMKALPIGFPFLNWIGLDHVASLIEIHIPALWLDVDQVHVHASNVVPTPNVFLDIISRHQVCRSFAPNFFLAKLATVPLDAKWDLAALTLLVSGGEANDIGTCVAVSTLLQKCGAAKNVVVPGFGMTETCAGSIYNLTCPDGDLENEYAITSVGKCIDGMEIRVVLPPKSVTTDFTTQNEIGNLEVRGEVVFKSYYRQPDATRESFTSDGWFRTGDQGIIDNHGNLCLIGRIKDVFNINGVKFIASDIQNSLERAVELLVTRMICFPSRTDHTEQVTIAYIPLKPTMPNSIIIIEDLLTQASFESCGSIPVIFALSKKSIPLLPISALGKISRSKMSTLFSAGQFNADVSEHRQTLKRAKEEELQRYQQDSHSCGIVDEEELTREFSTALGTTFNRNITAYTNIFELGITSMDLIRLKNRVQTRFGIEVSLTLLLKHPSPRTLASVLYDSKSAWIVDYEPVVTVRSNGTKTPLWLVHPGVGEVLVFMGLAHHMRDDDRPIYALRARGFEGQNHFTSIEEAVETYVNALQIRQPDGPYALAGYSYGAMLAFEMAKKLKESGASVNFLASFNLPPHIKLRMRHLTWNLCLLHLCYFVGLISDVYAENLEDQGDFQTLDRSDALQYLLKSADTGRLQELDLNEQALVEWTQVAYGLQRMAVDYEPRGMVDVMDVFHAVPLKMVANSRQEWLEDHLHKWEYFCHTTPRFHEVEGAHYTMLGSEFVLSFSDKLRAALKNRGL

SEQ ID NO: 1237 - DNA, 222 bp, Muscodor strobelii
  misc_feature: SGI EST ID NO. CUFF.3422.0
  misc_feature: Variant of the nucleotide sequence at SEQ ID NO 1235
cgggtggtgaggcgaacgatataggcacttgtgtagctgtgtctactctcctacaaaaatgcggtgccgccaagaacgttgttgttccaggctttgggatgacagagacctgcgcgggctctatctataacttgacctgccccgatggagatctggagaatgagtatgctatcacctcagtcggcaaatgtattgatggaatggagatcagggtcgtcttgc

SEQ ID NO: 1238 - DNA, 1167 bp, Muscodor strobelii
  misc_feature: SGI cDNA ID NO. 560008
  misc_feature: Encodes the peptide sequence at SEQ ID NO 1239
atgtctaagttttcattggagatggacgaagcattggcaaaagtacgggaactaatcaccagcgttgatgagaagtcccgaacatcactgatctctgccttgcacggacttgcatactcgctcgaaacggctgacgataccctccatcgctatggcgccatgaatcttcagactgcggccgtaaagattggatttgaccttgggctattcaaaatactcatcaaccacgagagtccaatgactgttgatgaatttttatcggaaactgttgcagagtcatctctactagctcggctattgcgatatctagctgccatcggtacaattgatgaagttggtcacgaccgatatgctccgaaccacctgacttcaaatctttctgagaaggtagctgaggcgggtattaatcactactttgccacagttgcccccgaataccaagttctgccggagtttttgaagaacactggttacaaaaatccgtctgatgcattcaacacggctttccaatatgcttggaaaacggatgttcaccaattcatgtggtttgcggatcacccggagaaccttgcctacttcaacaagttcatggccttcaggcgtgagaccagcctctcatggcttacggtatatcctgtcgaggaacaagtccaaggttgggacgtggaacggccagtctacgtgaacatcggtggcggcatcggacaccaatgtgctcagtttctagacaaatatccacagatcccggggcgcgtcatcctccaggacctaccgcattcgattgcaaaggctctacctactccaagggtcgagaatcttgcccacgacttctttgagccgcagccaatcaaaggagccaagttctattttttgagaggggtgctacataaccaccccccagatcgggtgcggaagctgcttggattgaccaaggaagctatggggcccgagtcaatccttctattagatgagatgatattgccggagaccaaggcgaatatcgacaccgtgtctatggatatcactatgcttacagcttttgcgggtatggagcgaacaagagagcaatggcgatccatgcttaatgaagtggggctaaagttagtcaacacttatgagtataatccggttagtcacgagagtgttatggatgtacgtctaccatga

SEQ ID NO: 1239 - protein, 388 aa, Muscodor strobelii
  misc_feature: SGI Peptide ID NO. 560008
  misc_feature (111)..(362): Pfam Id: PF00891 Pfam Desc: O-methyltransferase
  misc_feature (230)..(362): Pfam Id: PF00891 Pfam Desc: O-methyltransferase
  misc_feature (8)..(388): NCBI GI: 238841487 Blast Desc: O-methyl transferase B [Microsporum canis CBS 113480]
  misc_feature (8)..(388): NCBI GI: 116206020 Blast Desc: CHGG_02303 [Chaetomium globosum CBS 148.51] gi|88182900|gb|EAQ90368.1| CHGG_02303 [Chaetomium globosum CBS 148.51]
  misc_feature (8)..(387): NCBI GI: 171677650 Blast Desc: protein product [Podospora anserina] gi|170936893|emb|CAP61552.1| protein product [Podospora anserina]
  misc_feature (8)..(385): NCBI GI: 154313550 Blast Desc: BC1G_05472 [Botryotinia fuckeliana B05.10] gi|150849541|gb|EDN24734.1| BC1G_05472 [Botryotinia fuckeliana B05.10]
  misc_feature (7)..(382): NCBI GI: 154309933 Blast Desc: BC1G_06887 [Botryotinia fuckeliana B05.10] gi|150851675|gb|EDN26868.1| BC1G_06887 [Botryotinia fuckeliana B05.10]
  misc_feature (8)..(376): NCBI GI: 159124820 Blast Desc: methyltransferase, [Aspergillus fumigatus A1163]
  misc_feature (8)..(385): NCBI GI: 145228447 Blast Desc: An01g00880 [Aspergillus niger] gi|134054621|emb|CAK43466.1| protein product [Aspergillus niger]
  misc_feature (10)..(384): NCBI GI: 145237970 Blast Desc: An07g05520 [Aspergillus niger] gi|134076110|emb|CAK39468.1| protein product [Aspergillus niger]
  misc_feature (8)..(376): NCBI GI: 238491834 Blast Desc: O-methyltransferase, [Aspergillus flavus NRRL3357] gi|220697567|gb|EED53908.1| O-methyltransferase, [Aspergillus flavus NRRL3357]
  misc_feature (8)..(376): NCBI GI: 169773817 Blast Desc: [Aspergillus oryzae RIB40] gi|83769238|dbj|BAE59375.1| protein product [Aspergillus oryzae]
  misc_feature (55)..(368): SWISSPROT Homolog: EC 2.1.1.110 Sterigmatocystin 8-O-methyltransferase
MSKFSLEMDEALAKVRELITSVDEKSRTSLISALHGLAYSLETADDTLHRYGAMNLQTAAVKIGFDLGLFKILINHESPMTVDEFLSETVAESSLLARLLRYLAAIGTIDEVGHDRYAPNHLTSNLSEKVAEAGINHYFATVAPEYQVLPEFLKNTGYKNPSDAFNTAFQYAWKTDVHQFMWFADHPENLAYFNKFMAFRRETSLSWLTVYPVEEQVQGWDVERPVYVNIGGGIGHQCAQFLDKYPQIPGRVILQDLPHSIAKALPTPRVENLAHDFFEPQPIKGAKFYFLRGVLHNHPPDRVRKLLGLTKEAMGPESILLLDEMILPETKANIDTVSMDITMLTAFAGMERTREQWRSMLNEVGLKLVNTYEYNPVSHESVMDVRLP

SEQ ID NO: 1240 - DNA, 1162 bp, Muscodor strobelii
  misc_feature: SGI EST ID NO. CUFF.3431.0
  misc_feature: Variant of the nucleotide sequence at SEQ ID NO 1238
cgagagtccaatgactgttgatgaatttttatcggaaactgttgcagagtcatctctactagctcggctattgcgatatctagctgccatcggtacaattgatgaagttggtcacgaccgatatgctccgaaccacctgacttcaaatctttctgagaaggtagctgaggcgggtattaatcactactttgccacagttgcccccgaataccaagttctgccggagtttttgaagaacactggttacaaaaatccgtctgatgcattcaacacggctttccaatatgcttggaaaacggatgttcaccaattcatgtggtttgcggatcacccggagaaccttgcctacttcaacaagttcatggccttcaggcgtgagaccagcctctcatggcttacggtatatcctgtcgaggaacaagtccaaggttgggacgtggaacggccagtctacgtgaacatcggtggcggcatcggacaccaatgtgctcagtttctagacaaatatccacagatcccggggcgcgtcatcctccaggacctaccgcattcgattgcaaaggctctacctactccaagggtcgagaatcttgcccacgacttctttgagccgcagccaatcaaaggagccaagttctattttttgagaggggtgctacataaccaccccccagatcgggtgcggaagctgcttggattgaccaaggaagctatggggcccgagtcaatccttctattagatgagatgatattgccggagaccaaggcgaatatcgacaccgtgtctatggatatcactatgcttacagcttttgcgggtatggagcgaacaagagagcaatggcgatccatgcttaatgaagtggggctaaagttagtcaacacttatgagtataatccggttagtcacgagagtgttatggatgtacgtctaccatgaggggaatatggtggctttgtactcaaaatgcaagcttaatgatcttgctccttggattgccgaatgtcagcaacgacaggcagaagtttttcaaataggtctacatagtactttaaccaagaattatcgttgtcagtggtcaatggtcggttatcattaggtagacacatagtacaggcgggatacaagtatacgtttatcctcatccgttcgaaactgata

SEQ ID NO: 1241 - DNA, 876 bp, Muscodor strobelii
  misc_feature: SGI cDNA ID NO. 560009
  misc_feature: Encodes the peptide sequence at SEQ ID NO 1242
atggcgaatcctgcgtacatcctgcctaagccggaggaagaggtgcagcggttaacagaccaagattcggttattgtctgcgctatggataataaaaggatattggcacctattgacactaccaagcacgggttgagagtgcttgactcggcgacaacagacggtcttttcctccgctctatagagggcctattgacaccgccattcacgttgacaggatgtgacattatgcatgacttcttgccaaaatctcacgcagcgcatacaacgtatgctattcatgacattgccgagaaatggccagcccaaatgcacgggcagtatgatctggtccatcagcgacttgccctctttggtgttggtaggaccacgacaccccagaaggcggtcgggtacctcagcgctcttgttgcgcccggaggctgggtccaacttggcgagttagacgtacaagaaccagccattgcggcgcaggcgatgcaggatgcctggaaacttatgcgtgccgtcttcgaggccgtgtgcgagtctaataccacttttgcacgaaatatgggaggctggttggcccagctaggcttcgaagacatccacgaggagtcttatgaggtcggtctcggaccgctttgtaaagaccctaccgtcgcaaagacgagtatcgatgtgatgctacagtcatgggaggcgctgctgggaacagcaaaacactttaatgcggccgttgaggaatcggtcacagacaggctcattgaacgcctcagggacgaactgacacaagatggcgcgtcgtaccgtatgctttacgcctacggccgcaagccactagtatacaacggtcaaggcgagggagataaccagaatgactcggatgtatag

SEQ ID NO: 1242 - protein, 291 aa, Muscodor strobelii
  misc_feature: SGI Peptide ID NO. 560009
  misc_feature (2)..(274): NCBI GI: 256723271 Blast Desc: NECHADRAFT_51927 [Nectria haematococca mpVI 77-13-4]
  misc_feature (12)..(275): NCBI GI: 46115138 Blast Desc: FG03411.1 [Gibberella zeae PH-1]
  misc_feature (12)..(273): NCBI GI: 70983245 Blast Desc: methyltransferase SirN-like [Aspergillus fumigatus Af293] gi|66844775|gb|EAL85112.1| methyltransferase SirN-like, [Aspergillus fumigatus Af293] gi|159124035|gb|EDP49154.1| A1163]
  misc_feature (12)..(274): NCBI GI: 242815587 Blast Desc: methyltransferase SirN-like, [Talaromyces stipitatus ATCC 10500] gi|218714937|gb|EED14360.1| methyltransferase SirN-like, [Talaromyces stipitatus ATCC 10500]
  misc_feature (12)..(273): NCBI GI: 121719576 Blast Desc: conserved [Aspergillus clavatus NRRL 1] gi|119404685|gb|EAW15061.1| conserved [Aspergillus clavatus NRRL 1]
  misc_feature (5)..(275): NCBI GI: 212529358 Blast Desc: conserved [Penicillium marneffei ATCC 18224] gi|210074234|gb|EEA28321.1| conserved [Penicillium marneffei ATCC 18224]
  misc_feature (6)..(274): NCBI GI: 38098858 Blast Desc: [Leptosphaeria maculans]
  misc_feature (5)..(274): NCBI GI: 119470768 Blast Desc: NFIA_055410 [Neosartorya fischeri NRRL 181] gi|119406241|gb|EAW16192.1| conserved [Neosartorya fischeri NRRL 181]
  misc_feature (12)..(275): NCBI GI: 145606524 Blast Desc: MGG_02274 [Magnaporthe grisea 70-15] gi|145014160|gb|EDJ98801.1| MGG_02274 [Magnaporthe grisea 70-15]
  misc_feature (6)..(276): NCBI GI: 157382473 Blast Desc: methyltransferase [Hypocrea virens]
MANPAYILPKPEEEVQRLTDQDSVIVCAMDNKRILAPIDTTKHGLRVLDSATTDGLFLRSIEGLLTPPFTLTGCDIMHDFLPKSHAAHTTYAIHDIAEKWPAQMHGQYDLVHQRLALFGVGRTTTPQKAVGYLSALVAPGGWVQLGELDVQEPAIAAQAMQDAWKLMRAVFEAVCESNTTFARNMGGWLAQLGFEDIHEESYEVGLGPLCKDPTVAKTSIDVMLQSWEALLGTAKHFNAAVEESVTDRLIERLRDELTQDGASYRMLYAYGRKPLVYNGQGEGDNQNDSDV

SEQ ID NO: 1243 - DNA, 912 bp, Muscodor strobelii
  misc_feature: SGI cDNA ID NO. 560010
  misc_feature: Encodes the peptide sequence at SEQ ID NO 1244
atgatcaagtaccaaaatgaccgacttcctgcaattgccagtattgctaaggaatttgcccaagctcttggcgatgattatatttgtggtctatggaaagcagatctagacagggaacttttatggcgggtctcgactggccccaacaataactataacacggttaagagcgatgatgcttttgggtttcagccttcttggagctgggcctcatgtcgacggaaatttgtggtgtactctccgaactcacgttatcgccaattctttaaggacacccactttgagctcgtgaaatacaacggagtacccaagtgtggaggggacaagtacggtgcaatggagtcggccatgttacatatcaaaggcttaatagtctccattccagagacagtcatcaacgaccgccgacatgatttgactgggcagtgggaacactctgaccctccaagaagggatcgtcgagacttagaaggaatgttcagtctctgtttacagaaaaagttgcttgcggaaaatagacagaagaaagctaaccgcatcaatgacctgtcgagcatgctcatagtctcagcaatcaagctagatgacatcgaagaattgcggggcgatgagggttttcactcaccgcgtaatgcattcgttgacttgagtctctttattgtaggtcatacagactcaggatacaaaaccgacaagggacctcctgctgggggcccttcagggcttctgatatgtagggaaaagggtgggagatatcgtcgagttggttatttcaaggtcggcaatgtctggggagagacaagctactggcagcatccacgtcgtttcaacggtcaagatgaagagtatagatctaggatattgtatctttggggcggcgaaacaagtgtccgcgaggttatccttgtttaa

SEQ ID NO: 1244 - protein, 303 aa, Muscodor strobelii
  misc_feature: SGI Peptide ID NO. 560010
  misc_feature (2)..(121): NCBI GI: 256724155 Blast Desc: NECHADRAFT_86423 [Nectria haematococca mpVI 77-13-4]
  misc_feature (1)..(126): NCBI GI: 261193397 Blast Desc: HET domain-containing protein [Ajellomyces dermatitidis SLH14081] gi|239588709|gb|EEQ71352.1| HET domain-containing protein [Ajellomyces dermatitidis SLH14081]
  misc_feature (2)..(127): NCBI GI: 256722024 Blast Desc: NECHADRAFT_86169 [Nectria haematococca mpVI 77-13-4]
  misc_feature (1)..(126): NCBI GI: 239613969 Blast Desc: HET domain-containing protein [Ajellomyces dermatitidis ER-3]
  misc_feature (1)..(126): NCBI GI: 225558616 Blast Desc: HET domain-containing protein [Ajellomyces capsulatus G186AR]
  misc_feature (2)..(124): NCBI GI: 85108981 Blast Desc: NCU08019 [Neurospora crassa OR74A] gi|28924300|gb|EAA33453.1| NCU08019 [Neurospora crassa OR74A]
  misc_feature (2)..(124): NCBI GI: 39979140 Blast Desc: related to tol protein [Neurospora crassa]
  misc_feature (1)..(126): NCBI GI: 154286502 Blast Desc: [Ajellomyces capsulatus NAm1] gi|150407687|gb|EDN03228.1| [Ajellomyces capsulatus NAm1]
  misc_feature (2)..(127): NCBI GI: 256731196 Blast Desc: NECHADRAFT_85202 [Nectria haematococca mpVI 77-13-4]
  misc_feature (2)..(139): NCBI GI: 154292309 Blast Desc: BC1G_14609 [Botryotinia fuckeliana B05.10] gi|150846185|gb|EDN21378.1| BC1G_14609 [Botryotinia fuckeliana B05.10]
MIKYQNDRLPAIASIAKEFAQALGDDYICGLWKADLDRELLWRVSTGPNNNYNTVKSDDAFGFQPSWSWASCRRKFVVYSPNSRYRQFFKDTHFELVKYNGVPKCGGDKYGAMESAMLHIKGLIVSIPETVINDRRHDLTGQWEHSDPPRRDRRDLEGMFSLCLQKKLLAENRQKKANRINDLSSMLIVSAIKLDDIEELRGDEGFHSPRNAFVDLSLFIVGHTDSGYKTDKGPPAGGPSGLLICREKGGRYRRVGYFKVGNVWGETSYWQHPRRFNGQDEEYRSRILYLWGGETSVREVILV

SEQ ID NO: 1245 - DNA, 218 bp, Muscodor strobelii
  misc_feature: SGI EST ID NO. CUFF.3443.0
  misc_feature: Variant of the nucleotide sequence at SEQ ID NO 1243
tgggtttcagccttcttggagctgggcctcatgtcgacggaaatttgtggtgtactctccgaactcacgttatcgccaattctttaaggacacccactttgagctcgtgaaatacaacggagtacccaagtgtggaggggacaagtacggtgcaatggagtcggccatgttacatatcaaaggcttaatagtctccattccagagacagtcatcaacg

SEQ ID NO: 1246 - DNA, 1611 bp, Muscodor strobelii
  misc_feature: SGI cDNA ID NO. 560011
  misc_feature: Encodes the peptide sequence at SEQ ID NO 1247
atgaaggcctggcttacatcactgctcctgctgggcttgtcaatatggacagcccaagcactggaggtccaattggaccaaaccgacgagaacagacagaaatgctccggcatgtacagcaggaccgcatggggcgggcccgtcgaccccttcatcctcaccaagttcatcaatgacacctccaaggccgaagacgaccactccatcgtcagcttgatcatcttcgagtggaaagaccaggatctcatcggtgtctacccgaacgacgactccttcaccaaagaactgatatgcgacgatgccaatgtcaagaacaatctctgcgccgagaaggatctcggcacctggatccttgcgcccaatgcgaccgagaaatccaagaacttgatcctgacccagtctatccacctcaatgctacgcgcccgatcaactacccgattacaaagactggatactactgcgttgctgcctatggcttcaacgtggacagctttaagggcgtagtcgagttccgcgaggcctacggcgagcttcccgcaacccagatccccaagctccccttctatggcggaataagtgtcctttatgctgtcgtcgtggtattctggggtttcctatactaccagcacagatacgatatcttgcctgtccagaactacataacagcaattctggtcttcttggttgttgagatgctcctgacctgggccttctatgacttcttgaacagaaacggctcaagcgtgggctccaaggttctcctcatcatcgtcgccgtcctcaacgctttccgaaactccttctcgttcttcttgctactcattgtctgcatgggatatggtgtggtcaagccatcactcggcagaaccatgatctgggtcagatggctggctattgctcacttcgttttcggtcttgtctacgccatcaccagtcttctagtgtctccagaagcagccggccccttcgtccttctcatcgtgcttccactcgcaggcacacttaccgcattttacgtgtggactcttaactctcttaacttcacacttaaggatctacgtgagcgcaagcagaccgcaaaggagtccatgtaccgcaagctctggtggtgcattctcatcagcattctcgtcatcttcggcttctttttcttcaactcgttctccttcgcctcagcctcagaccccgactatgtgcccttccattggaagtctagatggtttgtccttgacggctggttgaacttggtgtacttcgcggatgtcgcttgggtggcttacgtatggcggcctactgcgaacaatcgccgctttgccatgagtgatgaaattgcccaggatgagaatggagagttcgaatttgcggacatcggcaaccctgatgactccgatgacgaggaggcaaacgttggtcggccgaaggtcaccgagactcaccctggtcaaacgtcgggtgtagcgcccgcagctcagagccgggctcctgtctcaccgagggactcgtttgatggcgaaacgatatttgccgttggtgaagacgataagttcagcgaggatgaagatgaggatgatgagagaggggagggatcgaaactcgtagctaagaaatag

SEQ ID NO: 1247 - protein, 536 aa, Muscodor strobelii
  misc_feature: SGI Peptide ID NO. 560011
  misc_feature (147)..(436): Pfam Id: PF06814 Pfam Desc: Lung seven transmembrane receptor
  misc_feature (1)..(536): NCBI GI: 85079712 Blast Desc: NCU00182 [Neurospora crassa OR74A] gi|28917468|gb|EAA27169.1| NCU00182 [Neurospora crassa OR74A]
  misc_feature (5)..(536): NCBI GI: 256729947 Blast Desc: [Nectria haematococca mpVI 77-13-4]
  misc_feature (1)..(516): NCBI GI: 171686998 Blast Desc: protein product [Podospora anserina] gi|170943460|emb|CAP69113.1| protein product [Podospora anserina]
  misc_feature (1)..(526): NCBI GI: 261358451 Blast Desc: PTM1 [Verticillium albo-atrum VaMs.102]
  misc_feature (5)..(516): NCBI GI: 46122053 Blast Desc: FG05404.1 [Gibberella zeae PH-1]
  misc_feature (25)..(513): NCBI GI: 156040762 Blast Desc: SS1G_11359 [Sclerotinia sclerotiorum 1980] gi|154695743|gb|EDN95481.1| SS1G_11359 [Sclerotinia sclerotiorum 1980]
  misc_feature (38)..(516): NCBI GI: 145608728 Blast Desc: MGG_06418 [Magnaporthe grisea 70-15] gi|145016168|gb|EDK00658.1| MGG_06418 [Magnaporthe grisea 70-15]
  misc_feature (26)..(512): NCBI GI: 154303850 Blast Desc: BC1G_08809 [Botryotinia fuckeliana B05.10] gi|150854393|gb|EDN29585.1| BC1G_08809 [Botryotinia fuckeliana B05.10]
  misc_feature (1)..(535): NCBI GI: 145249934 Blast Desc: An14g06830 [Aspergillus niger] gi|134081991|emb|CAK46676.1| protein product [Aspergillus niger]
  misc_feature (1)..(535): NCBI GI: 169779231 Blast Desc: [Aspergillus oryzae RIB40] gi|83772819|dbj|BAE62947.1| protein product [Aspergillus oryzae]
MKAWLTSLLLLGLSIWTAQALEVQLDQTDENRQKCSGMYSRTAWGGPVDPFILTKFINDTSKAEDDHSIVSLIIFEWKDQDLIGVYPNDDSFTKELICDDANVKNNLCAEKDLGTWILAPNATEKSKNLILTQSIHLNATRPINYPITKTGYYCVAAYGFNVDSFKGVVEFREAYGELPATQIPKLPFYGGISVLYAVVVVFWGFLYYQHRYDILPVQNYITAILVFLVVEMLLTWAFYDFLNRNGSSVGSKVLLIIVAVLNAFRNSFSFFLLLIVCMGYGVVKPSLGRTMIWVRWLAIAHFVFGLVYAITSLLVSPEAAGPFVLLIVLPLAGTLTAFYVWTLNSLNFTLKDLRERKQTAKESMYRKLWWCILISILVIFGFFFFNSFSFASASDPDYVPFHWKSRWFVLDGWLNLVYFADVAWVAYVWRPTANNRRFAMSDEIAQDENGEFEFADIGNPDDSDDEEANVGRPKVTETHPGQTSGVAPAAQSRAPVSPRDSFDGETIFAVGEDDKFSEDEDEDDERGEGSKLVAKK

SEQ ID NO: 1248 - DNA, 2136 bp, Muscodor strobelii
  misc_feature: SGI EST ID NO. CUFF.3510.0
  misc_feature: Variant of the nucleotide sequence at SEQ ID NO 1246
ccaacaagcatccaagcttctacatgccactttggtattttccatttgtcttctatcaatattctccttttgactatccgacgttgatactatatccaacccggatgatgcgctattaaccacatacacgataagacatcgcgttgcagtcgaattaaccgtctcattcggcacggaaaggagaaaagatacagcccagctgggttgcagattactctgcctgacgaggctgccttgcgcgccaaatcccaacacacaacggcatcatgaaggcctggcttacatcactgctcctgctgggcttgtcaatatggacagcccaagcactggaggtccaattggaccaaaccgacgagaacagacagaaatgctccggcatgtacagcaggaccgcatggggcgggcccgtcgaccccttcatcctcaccaagttcatcaatgacacctccaaggccgaagacgaccactccatcgtcagcttgatcatcttcgagtggaaagaccaggatctcatcggtgtctacccgaacgacgactccttcaccaaagaactgatatgcgacgatgccaatgtcaagaacaatctctgcgccgagaaggatctcggcacctggatccttgcgcccaatgcgaccgagaaatccaagaacttgatcctgacccagtctatccacctcaatgctacgcgcccgatcaactacccgattacaaagactggatactactgcgttgctgcctatggcttcaacgtggacagctttaagggcgtagtcgagttccgcgaggcctacggcgagcttcccgcaacccagatccccaagctccccttctatggcggaataagtgtcctttatgctgtcgtcgtggtattctggggtttcctatactaccagcacagatacgatatcttgcctgtccagaactacataacagcaattctggtcttcttggttgttgagatgctcctgacctgggccttctatgacttcttgaacagaaacggctcaagcgtgggctccaaggttctcctcatcatcgtcgccgtcctcaacgctttccgaaactccttctcgttcttcttgctactcattgtctgcatgggatatggtgtggtcaagccatcactcggcagaaccatgatctgggtcagatggctggctattgctcacttcgttttcggtcttgtctacgccatcaccagtcttctagtgtctccagaagcagccggccccttcgtccttctcatcgtgcttccactcgcaggcacacttaccgcattttacgtgtggactcttaactctcttaacttcacacttaaggatctacgtgagcgcaagcagaccgcaaaggagtccatgtaccgcaagctctggtggtgcattctcatcagcattctcgtcatcttcggcttctttttcttcaactcgttctccttcgcctcagcctcagaccccgactatgtgcccttccattggaagtctagatggtttgtccttgacggctggttgaacttggtgtacttcgcggatgtcgcttgggtggcttacgtatggcggcctactgcgaacaatcgccgctttgccatgagtgatgaaattgcccaggatgagaatggagagttcgaatttgcggacatcggcaaccctgatgactccgatgacgaggaggcaaacgttggtcggccgaaggtcaccgagactcaccctggtcaaacgtcgggtgtagcgcccgcagctcagagccgggctcctgtctcaccgagggactcgtttgatggcgaaacgatatttgccgttggtgaagacgataagttcagcgaggatgaagatgaggatgatgagagaggggagggatcgaaactcgtagctaagaaatagctttgcaaggatggaagtgtgaagactatagataactgtaataggggttagagagagacctcagtgtggcctcggtgtgttgatacggctgtactatagaatggcgttggacctttttttaggtatcatgattacgaattttacctctaaagccttgtcgtatagatgggaatgttattctcttgtttttattttgttacatgaggctttataggcgacggttggttcgcagcatcaagaatggcaggatcggctcgag

SEQ ID NO: 1249 - DNA, 1719 bp, Muscodor strobelii
  misc_feature: SGI cDNA ID NO. 560012
  misc_feature: Encodes the peptide sequence at SEQ ID NO 1250
atgggtaaaaacacagacaaactctacataactcactcggaatggtcatcgtccgacgccttttcagccaacacaggctcgcgaaacaacatcacgggccactccttcaagcgcctgcccttcaacttctgcgccgcctctctccagcccttcaagaaccccgtctgcaccgccgacggcaccatcttcgacatcgaggtcatatccaaatggctggagtcccacaagacgaaccccatcgacgggaagccgctctctgccaaagacctcatcaagctcaacttcgctcggaatgccgatgcagatagcaagggaataacaggcatgggtacagacggaaaaggcgatctgatagatcccgtgaccttcaaggtgctcacagacaacacacatattgtcgcgatacggcatggaatatatgcaaatgtgtttgccttcgagacagtggagcggatgaacatcaaggctaagatgtggcgcgacttactagatgacgtggaattcggtcgttcggacataattactctccaggacccgcagaatgcagcaagcagggatctgagccagttcaaatacatcaaagatggcgacaacgctctcctcacaaacgaacaaatcgaagagcgaaaggaaggaaatgtgaatatcggtgcattgggtagagtcggcgagaaggtgctcagagcaaaagaagccgttgagaaggccaggcgagagcgcgaagccggcaaggacgtgaaccggacatcgaacgccgtcgcgaagacaggatcaaacggcgtggcgaagcagagcatgatacaagagaagaaatcagcttacaactccgctatatacacgaccgggagagcagcagcaagtttcacaagcacagggttaacaccggaaacaagtggcgaaagagcgatattaacagacgaggagtacatgctcaagccaaaacgcgtcaaaatacatgggtacgcgcgcatcgagacgaacctcggagatctgaatatcgagctatacaccgagtatgcaccacgagctgtatggaatttcacgaaactcgctaaaaaggggtattacaaaggcgtcgccttccaccggaacatcaaaaacttcatgattcaaggtggtgatccctcggggactggtcgaggtggacagtcgatatgggggaaaaactttcaagatgagtttgatgggccgaatacgcatgatgcgaggggaatactcagcatggcgaataaggggaagaacaccaattcgagtcagttcttcattacttataggcctgcgaagcatctcgacaggaaacatactatctttgggaaagtcgtcggtggtttggacgtcttagccaaaatggaggccgtggagacagacggttctgacagaccactgaacaaaatcgtcatgaaggaggttgttgtctacttagatccgttcgaggaattccagaaccaaaaagcggaaagagacaaagtcgtcgaacagaaggcggaaatcgagagaacgggaggtacagaagatgataagttgacgtggacaggtaaacgggttagagcagatgggacagtagatcagaggtctgggggcgttggcgtgggcaagtatctcaaggccgcgagacaacagcaggaagatgagatcgttgaggaagacctggatacctgggacgaaccggccaagaagaaaacgaaaatgggcgggtttgggaattttgataattggtga

SEQ ID NO: 1250 - protein, 572 aa, Muscodor strobelii
  misc_feature: SGI Peptide ID NO. 560012
  misc_feature (321)..(473): Pfam Id: PF00160 Pfam Desc: Cyclophilin type peptidyl-prolyl cis-trans isomerase/CLD
  misc_feature (5)..(572): NCBI GI: 154298527 Blast Desc: BC1G_11448 [Botryotinia fuckeliana B05.10] gi|150858044|gb|EDN33236.1| BC1G_11448 [Botryotinia fuckeliana B05.10]
  misc_feature (1)..(571): NCBI GI: 46122051 Blast Desc: FG05403.1 [Gibberella zeae PH-1] gi|93140609|sp|Q4IBK5.1|PPIL2_GIBZE RecName: Full=Peptidyl-prolyl cis-trans isomerase-like 2; Short=PPIase; Short=Rotamase; protein
  misc_feature (1)..(572): NCBI GI: 116191781 Blast Desc: CHGG_05608 [Chaetomium globosum CBS 148.51] gi|88181521|gb|EAQ88989.1| CHGG_05608 [Chaetomium globosum CBS 148.51]
  misc_feature (1)..(572): NCBI GI: 261358450 Blast Desc: peptidyl-prolyl cis-trans isomerase cyp8 [Verticillium albo-atrum VaMs.102]
  misc_feature (1)..(572): NCBI GI: 39977029 Blast Desc: MGG_06417 [Magnaporthe grisea 70-15] gi|145016169|gb|EDK00659.1| MGG_06417 [Magnaporthe grisea 70-15]
  misc_feature (1)..(572): NCBI GI: 85079708 Blast Desc: NCU00181 [Neurospora crassa OR74A] gi|74662464|sp|Q7RXA6.1|PPIL2_NEUCR RecName: Full=Peptidyl-prolyl cis-trans isomerase-like 2; Short=PPIase; Short=Rotamase; protein
  misc_feature (1)..(563): NCBI GI: 171687000 Blast Desc: protein product [Podospora anserina] gi|170943461|emb|CAP69114.1| protein product [Podospora anserina]
  misc_feature (1)..(572): NCBI GI: 169614924 Blast Desc: SNOG_10614 [Phaeosphaeria nodorum SN15] gi|111060888|gb|EAT82008.1| SNOG_10614 [Phaeosphaeria nodorum SN15]
  misc_feature (1)..(572): NCBI GI: 189207803 Blast Desc: peptidyl-prolyl cis-trans isomerase cyp8 [Pyrenophora tritici-repentis Pt-1C-BFP] gi|187976328|gb|EDU42954.1| peptidyl-prolyl cis-trans isomerase cyp8 [Pyrenophora Pt-1C-BFP]
  misc_feature (116)..(572): NCBI GI: 156042209 Blast Desc: SS1G_11655 [Sclerotinia sclerotiorum 1980] gi|154696038|gb|EDN95776.1| SS1G_11655 [Sclerotinia sclerotiorum 1980]
  misc_feature (1)..(571): SWISSPROT Homolog: EC 5.2.1.8 Peptidylprolyl isomerase
MGKNTDKLYITHSEWSSSDAFSANTGSRNNITGHSFKRLPFNFCAASLQPFKNPVCTADGTIFDIEVISKWLESHKTNPIDGKPLSAKDLIKLNFARNADADSKGITGMGTDGKGDLIDPVTFKVLTDNTHIVAIRHGIYANVFAFETVERMNIKAKMWRDLLDDVEFGRSDIITLQDPQNAASRDLSQFKYIKDGDNALLTNEQIEERKEGNVNIGALGRVGEKVLRAKEAVEKARREREAGKDVNRTSNAVAKTGSNGVAKQSMIQEKKSAYNSAIYTTGRAAASFTSTGLTPETSGERAILTDEEYMLKPKRVKIHGYARIETNLGDLNIELYTEYAPRAVWNFTKLAKKGYYKGVAFHRNIKNFMIQGGDPSGTGRGGQSIWGKNFQDEFDGPNTHDARGILSMANKGKNTNSSQFFITYRPAKHLDRKHTIFGKVVGGLDVLAKMEAVETDGSDRPLNKIVMKEVVVYLDPFEEFQNQKAERDKVVEQKAEIERTGGTEDDKLTWTGKRVRADGTVDQRSGGVGVGKYLKAARQQQEDEIVEEDLDTWDEPAKKKTKMGGFGNFDNW

SEQ ID NO: 1251 - DNA, 2111 bp, Muscodor strobelii
  misc_feature: SGI EST ID NO. CUFF.3452.0
  misc_feature: Variant of the nucleotide sequence at SEQ ID NO 1249
cgcgccagtcgagcagtatccactccagctcgactgcagtttgcaactgcactaacgctaggtagaccgcagacgataagataacgcgaccttcttcgaacctccaagctacgacaccaacaccggcgcaaaccgcattcccagcccaccttacctctatatctctcttctggtgcagcagaagctcaagctcgcggtcgcccaccggattgcaccgccaaaatgggtaaaaacacagacaaactctacataactcactcggaatggtcatcgtccgacgccttttcagccaacacaggctcgcgaaacaacatcacgggccactccttcaagcgcctgcccttcaacttctgcgccgcctctctccagcccttcaagaaccccgtctgcaccgccgacggcaccatcttcgacatcgaggtcatatccaaatggctggagtcccacaagacgaaccccatcgacgggaagccgctctctgccaaagacctcatcaagctcaacttcgctcggaatgccgatgcagatagcaagggaataacaggcatgggtacagacggaaaaggcgatctgatagatcccgtgaccttcaaggtgctcacagacaacacacatattgtcgcgatacggcatggaatatatgcaaatgtgtttgccttcgagacagtggagcggatgaacatcaaggctaagatgtggcgcgacttactagatgacgtggaattcggtcgttcggacataattactctccaggacccgcagaatgcagcaagcagggatctgagccagttcaaatacatcaaagatggcgacaacgctctcctcacaaacgaacaaatcgaagagcgaaaggaaggaaatgtgaatatcggtgcattgggtagagtcggcgagaaggtgctcagagcaaaagaagccgttgagaaggccaggcgagagcgcgaagccggcaaggacgtgaaccggacatcgaacgccgtcgcgaagacaggatcaaacggcgtggcgaagcagagcatgatacaagagaagaaatcagcttacaactccgctatatacacgaccgggagagcagcagcaagtttcacaagcacagggttaacaccggaaacaagtggcgaaagagcgatattaacagacgaggagtacatgctcaagccaaaacgcgtcaaaatacatgggtacgcgcgcatcgagacgaacctcggagatctgaatatcgagctatacaccgagtatgcaccacgagctgtatggaatttcacgaaactcgctaaaaaggggtattacaaaggcgtcgccttccaccggaacatcaaaaacttcatgattcaaggtggtgatccctcggggactggtcgaggtggacagtcgatatgggggaaaaactttcaagatgagtttgatgggccgaatacgcatgatgcgaggggaatactcagcatggcgaataaggggaagaacaccaattcgagtcagttcttcattacttataggcctgcgaagcatctcgacaggaaacatactatctttgggaaagtcgtcggtggtttggacgtcttagccaaaatggaggccgtggagacagacggttctgacagaccactgaacaaaatcgtcatgaaggaggttgttgtctacttagatccgttcgaggaattccagaaccaaaaagcggaaagagacaaagtcgtcgaacagaaggcggaaatcgagagaacgggaggtacagaagatgataagttgacgtggacaggtaaacgggttagagcagatgggacagtagatcagaggtctgggggcgttggcgtgggcaagtatctcaaggccgcgagacaacagcaggaagatgagatcgttgaggaagacctggatacctgggacgaaccggccaagaagaaaacgaaaatgggcgggtttgggaattttgataattggtgatggcgttaggcagataaaaggcacagggttgcaatatgataccacttttgtttcgctcaatctcttgtcgcttgttgattcgtgaagccttagattatggtgttcgtgaccgccaccatggtattgggtcccagttatatctagacctttgctcaaaattcaaatccgat

SEQ ID NO: 1252 - DNA, 588 bp, Muscodor strobelii
  misc_feature: SGI cDNA ID NO. 560013
  misc_feature: Encodes the peptide sequence at SEQ ID NO 1253
atggcagagtcacgtttcgagacagagcagtatacttcagaggcattcgtcgaaagcgcaggcgctgtactcttcctcctctccaccaaagaaatatgcatattgcgacttttgaagaacggcgagtatgtgctgccgaaagggagacgtaattgtggggaaactcgccagataacagctatccgagaggtgaccgaagagaccggttacaagtgccgacccctccgattagatatgcatacccgtgctccacttccaacagagccagaagaagtggcggacgagcctcgattctacagaaatatttgcgagcctttcacgttacaagttcgacgttttggaaacggccaaatcaagctgatttggtggtttgttgccgctgtcaacgaagactgcgaaagggaggtgccacagagtgaaagatacgctgtggagttttacagctatgcagatgtcctggagaagttgactttcaagaatgaccgcgacatggtgaggaaagcaattgacttggtaaagacgaatcatgaattcacgtgtactgccacatttgaccctgccctgcccggaatcgatatggacagttag

SEQ ID NO: 1253 - protein, 195 aa, Muscodor strobelii
  misc_feature: SGI Peptide ID NO. 560013
  misc_feature (16)..(171): Pfam Id: PF00293 Pfam Desc: NUDIX domain
  misc_feature (1)..(173): NCBI GI: 70986230 Blast Desc: NUDIX domain [Aspergillus fumigatus Af293] gi|66846238|gb|EAL86571.1| NUDIX domain, [Aspergillus fumigatus Af293] gi|159128248|gb|EDP53363.1| NUDIX domain, [Aspergillus
  misc_feature (1)..(173): NCBI GI: 238839424 Blast Desc: conserved [Microsporum canis CBS 113480]
  misc_feature (8)..(174): NCBI GI: 115401242 Blast Desc: [Aspergillus terreus NIH2624] gi|114190150|gb|EAU31850.1| [Aspergillus terreus NIH2624]
  misc_feature (8)..(175): NCBI GI: 238484577 Blast Desc: NUDIX domain, [Aspergillus flavus NRRL3357] gi|220701577|gb|EED57915.1| NUDIX domain, [Aspergillus flavus NRRL3357]
  misc_feature (1)..(173): NCBI GI: 255947832 Blast Desc: Pc22g06550 [Penicillium chrysogenum Wisconsin 54-1255] gi|211591700|emb|CAP97943.1| Pc22g06550 [Penicillium chrysogenum Wisconsin 54-1255]
  misc_feature (5)..(173): NCBI GI: 169852670 Blast Desc: [Coprinopsis cinerea okayama7#130] gi|116505811|gb|EAU88706.1| [Coprinopsis cinerea okayama7#130]
  misc_feature (6)..(172): NCBI GI: 169607979 Blast Desc: SNOG_07054 [Phaeosphaeria nodorum SN15] gi|160701529|gb|EAT85705.2| SNOG_07054 [Phaeosphaeria nodorum SN15]
  misc_feature (8)..(106): NCBI GI: 169767664 Blast Desc: [Aspergillus oryzae RIB40] gi|83766158|dbj|BAE56301.1| protein product [Aspergillus oryzae]
  misc_feature (13)..(174): NCBI GI: 115397447 Blast Desc: [Aspergillus terreus NIH2624] gi|114192506|gb|EAU34206.1| [Aspergillus terreus NIH2624]
  misc_feature (1)..(172): NCBI GI: 170084605 Blast Desc: [Laccaria bicolor S238N-H82] gi|164651078|gb|EDR15318.1| [Laccaria bicolor S238N-H82]
MAESRFETEQYTSEAFVESAGAVLFLLSTKEICILRLLKNGEYVLPKGRRNCGETRQITAIREVTEETGYKCRPLRLDMHTRAPLPTEPEEVADEPRFYRNICEPFTLQVRRFGNGQIKLIWWFVAAVNEDCEREVPQSERYAVEFYSYADVLEKLTFKNDRDMVRKAIDLVKTNHEFTCTATFDPALPGIDMDS

SEQ ID NO: 1254 - DNA, 267 bp, Muscodor strobelii
  misc_feature: SGI cDNA ID NO. 560014
  misc_feature: Encodes the peptide sequence at SEQ ID NO 1255
atggctgatttccgtgatattccatctgcactatctggaatcatactcgaatccgacgctggtgatgaagtacgagagatggtaggcaacgtcgtgggtggtagtgtcgatgatgctgttagtaagggacttgatgaagtcatcggtgtcctaaaggtgttgccttggctgtcggtcgtcaatcctaagacggagactcgctatggacagcatatcctaacagtttcctcgggatctcgtctcgaagtagcatcccctgcgctgtaa

SEQ ID NO: 1255 - protein, 88 aa, Muscodor strobelii
  misc_feature: SGI Peptide ID NO. 560014
MADFRDIPSALSGIILESDAGDEVREMVGNVVGGSVDDAVSKGLDEVIGVLKVLPWLSVVNPKTETRYGQHILTVSSGSRLEVASPAL

SEQ ID NO: 1256 - DNA, 558 bp, Muscodor strobelii
  misc_feature: SGI cDNA ID NO. 560015
  misc_feature: Encodes the peptide sequence at SEQ ID NO 1257
atggatttcaaaaccccacttgagctcccatatcacgctagcgaactgcctggtcctttaccaaaatttgaactatccatgaagcttgtccagcaatggggcaaaaagaactatagcagtcgtagtcggacttacgaggaccttgataggaccttgacggaacgtgccttgcgcgccacagtccgctttggccagcactatgccgttctgtacggcggtctggtgcagacgagagaagccgacgcattagacttcctcaacaagtatacttcactcagagttcccaagttgtatgcttgtgaggactggaatgggttcgggctcattttcatggaatacatccctggctggcagtacgattgctcattccttttgcaatgcgccgaggccatcgacaaggctaaatctcttcgtgatgccgaattggctgttgagaagtgtgttgacgaacatactatcaagtgtcacatcatgggtcttatatttctcatggaatgttgcccaaatggccggttggcaacacaatctgatagcacctcctcgggaacccaagcttaa

SEQ ID NO: 1257 - protein, 185 aa, Muscodor strobelii
  misc_feature: SGI Peptide ID NO. 560015
MDFKTPLELPYHASELPGPLPKFELSMKLVQQWGKKNYSSRSRTYEDLDRTLTERALRATVRFGQHYAVLYGGLVQTREADALDFLNKYTSLRVPKLYACEDWNGFGLIFMEYIPGWQYDCSFLLQCAEAIDKAKSLRDAELAVEKCVDEHTIKCHIMGLIFLMECCPNGRLATQSDSTSSGTQA

SEQ ID NO: 1258 - DNA, 1389 bp, Muscodor strobelii
  misc_feature: SGI cDNA ID NO. 560016
  misc_feature: Encodes the peptide sequence at SEQ ID NO 1259
atgtcgacggcgcgcattgccccgcgcgatcacctcgtcgccatcattgggacgaccgggacggggaaatctgatctagcagtagatcttgccctgagattcaatggtgagatcataaatgcagacgcgatgcagatgtatcgcggtctacctatcctcacaaatcaaatcactgttgcagagcaacgtggcataccccaccatctgctcgcccagattgatcccctagagccgacgtggacgaacggaatcttcgtctcggaagcaaagagattaatcaaggagatcaggagcaggggaaagctaccgatcgttgttggtggaacgctgtattacgttcacgcgttgctctttgaaggcggggtgattgggaagaatagtgcgaatggcgagatggggatctacaggggtttgggggaattaaacgcagattttcctatcctcgaccagccgactgatgtcatccttgcgaaattaagggagattgatccgattatggcgggtcgctggcatcctgatgatcgaaggaagatcaaaagatcgttggagatcttcctgacgacagggaaaagagcctcagacatctatgcagagcaagccaaagccaaagaagaggcggagaaagagaagggtagatgggatacactgttcttctgggtgcataccgaggaagatgcgttgaaggagcgactagtgaaacgtgttgataagatggacaagagcggcctcgtggacgaagtgaaagagttatatcgccgattgcgagaggcagagtcgcgggaagaggtcgttgatcgtacgaaaggtatctggcagtcgattggcttccagcaaatggtgccataccttgacggcaaacgtgagggcaaacccgcgagcgaactggagaagctaagagtcgcggggttggaagagaccaacattgcgacgagacagtatgcacgctatcagcggaaatggatcaaacagaagacgcttcgagcatttcgggaacatggcgccatggaccatctatacgtacttgatagcacgaatgcggaagagtttcaaacggatgttctgcaaccggcggctgaaatctgcgagacgttcctccaggacggggagatgaagaagccggcggaagtatcggatgcagcgagaaaagtccttgctgcgtatgatacccgggagactgcaaaggtgttcaaggtcgttacgtgccaggcgtgcggagtcagtttaacgacagatgagcaatttcaaaaacatgtcaaaggcaggaagcaccggcaagttcttaaggcgaagaagaagactgcgctggtgcctttgggtgagcctttcgatgtcgcaaggcatgagattgcagatcgggatgaagtcaccgtcgctacattaggaccttga

SEQ ID NO: 1259 - protein, 462 aa, Muscodor strobelii
  misc_feature: SGI Peptide ID NO. 560016
  misc_feature (44)..(332): Pfam Id: PF01715 Pfam Desc: IPP transferase
  misc_feature (153)..(325): Pfam Id: PF01715 Pfam Desc: IPP transferase
  misc_feature (44)..(117): Pfam Id: PF01715 Pfam Desc: IPP transferase
  misc_feature (10)..(434): NCBI GI: 164423202 Blast Desc: NCU10185 [Neurospora crassa OR74A] gi|28950385|emb|CAD71227.1| related to tRNA isopentenyltransferase [Neurospora crassa] conserved [Neurospora
  misc_feature (4)..(434): NCBI GI: 238493998 Blast Desc: tRNA isopentenyltransferase, [Aspergillus flavus NRRL3357] gi|220694885|gb|EED51228.1| tRNA isopentenyltransferase, [Aspergillus flavus NRRL3357]
  misc_feature (12)..(434): NCBI GI: 169776919 Blast Desc: [Aspergillus oryzae RIB40] gi|83771662|dbj|BAE61792.1| protein product [Aspergillus oryzae]
  misc_feature (12)..(434): NCBI GI: 121703554 Blast Desc: tRNA isopentenyltransferase, [Aspergillus clavatus NRRL 1] gi|119398185|gb|EAW08615.1| tRNA isopentenyltransferase, [Aspergillus clavatus NRRL 1]
  misc_feature (5)..(434): NCBI GI: 70984100 Blast Desc: tRNA isopentenyltransferase [Aspergillus fumigatus Af293] gi|66845197|gb|EAL85532.1| tRNA isopentenyltransferase, [Aspergillus fumigatus Af293] gi|159122356|gb|EDP47477.1| tRNA
  misc_feature (12)..(434): NCBI GI: 145250097 Blast Desc: An15g00230 [Aspergillus niger] gi|134082075|emb|CAK42192.1| protein product [Aspergillus niger]
  misc_feature (12)..(434): NCBI GI: 115398514 Blast Desc: conserved [Aspergillus terreus NIH2624] gi|114191729|gb|EAU33429.1| conserved [Aspergillus terreus NIH2624]
  misc_feature (4)..(434): NCBI GI: 156065237 Blast Desc: SS1G_00629 [Sclerotinia sclerotiorum 1980] gi|154691488|gb|EDN91226.1| SS1G_00629 [Sclerotinia sclerotiorum 1980]
  misc_feature (12)..(432): NCBI GI: 255931521 Blast Desc: Pc12g04480 [Penicillium chrysogenum Wisconsin 54-1255] gi|211581936|emb|CAP80075.1| Pc12g04480 [Penicillium chrysogenum Wisconsin 54-1255]
  misc_feature (12)..(434): NCBI GI: 119467820 Blast Desc: tRNA isopentenyltransferase, [Neosartorya fischeri NRRL 181] gi|119405868|gb|EAW15819.1| tRNA isopentenyltransferase, [Neosartorya fischeri NRRL 181]
  misc_feature (12)..(434): SWISSPROT Homolog: EC 2.5.1.8 tRNA isopentenyltransferase
MSTARIAPRDHLVAIIGTTGTGKSDLAVDLALRFNGEIINADAMQMYRGLPILTNQITVAEQRGIPHHLLAQIDPLEPTWTNGIFVSEAKRLIKEIRSRGKLPIVVGGTLYYVHALLFEGGVIGKNSANGEMGIYRGLGELNADFPILDQPTDVILAKLREIDPIMAGRWHPDDRRKIKRSLEIFLTTGKRASDIYAEQAKAKEEAEKEKGRWDTLFFWVHTEEDALKERLVKRVDKMDKSGLVDEVKELYRRLREAESREEVVDRTKGIWQSIGFQQMVPYLDGKREGKPASELEKLRVAGLEETNIATRQYARYQRKWIKQKTLRAFREHGAMDHLYVLDSTNAEEFQTDVLQPAAEICETFLQDGEMKKPAEVSDAARKVLAAYDTRETAKVFKVVTCQACGVSLTTDEQFQKHVKGRKHRQVLKAKKKTALVPLGEPFDVARHEIADRDEVTVATLGP

SEQ ID NO: 1260 - DNA, 2348 bp, Muscodor strobelii
  misc_feature: SGI EST ID NO. CUFF.3492.0
  misc_feature: Variant of the nucleotide sequence at SEQ ID NO 1258
tctagagtctcggtccgctctcgtggactacacgggcgcatcatgtcatacttatgacagttcatatctatgcatcggctcaaatcgccgctcgtaccctctcttttgagacgaatgtataatatgtcgacggcgcgcattgccccgcgcgatcacctcgtcgccatcattgggacgaccgggacggggaaatctgatctagcagtagatcttgccctgagattcaatggtgagatcataaatgcagacgcgatgcagatgtatcgcggtctacctatcctcacaaatcaaatcactgttgcagagcaacgtggcataccccaccatctgctcgcccagattgatcccctagagccgacgtggacgaacggaatcttcgtctcggaagcaaagagattaatcaaggagatcaggagcaggggaaagctaccgatcgttgttggtggaacgctgtattacgttcacgcgttgctctttgaaggcggggtgattgggaagaatagtgcgaatggcgagatggggatctacaggggtttgggggaattaaacgcagattttcctatcctcgaccagccgactgatgtcatccttgcgaaattaagggagattgatccgattatggcgggtcgctggcatcctgatgatcgaaggaagatcaaaagatcgttggagatcttcctgacgacagggaaaagagcctcagacatctatgcagagcaagccaaagccaaagaagaggcggagaaagagaagggtagatgggatacactgttcttctgggtgcataccgaggaagatgcgttgaaggagcgactagtgaaacgtgttgataagatggacaagagcggcctcgtggacgaagtgaaagagttatatcgccgattgcgagaggcagagtcgcgggaagaggtcgttgatcgtacgaaaggtatctggcagtcgattggcttccagcaaatggtgccataccttgacggcaaacgtgagggcaaacccgcgagcgaactggagaagctaagagtcgcggggttggaagagaccaacattgcgacgagacagtatgcacgctatcagcggaaatggatcaaacagaagacgcttcgagcatttcgggaacatggcgccatggaccatctatacgtacttgatagcacgaatgcggaagagtttcaaacggatgttctgcaaccggcggctgaaatctgcgagacgttcctccaggacggggagatgaagaagccggcggaagtatcggatgcagcgagaaaagtccttgctgcgtatgatacccgggagactgcaaaggtgttcaaggtcgttacgtgccaggcgtgcggagtcagtttaacgacagatgagcaatttcaaaaacatgtcaaaggcaggaagcaccggcaagttcttaaggcgaagaagaagactgcgctggtgcctttgggtgagcctttcgatgtcgcaaggcatgagattgcagatcgggatgaagtcaccgtcgctacattaggaccttgagcgagatgtcgtgaagtacttcaattccgtcgcgttgtcggtcaatagtcgcacactcaggtttagtcttctcctgtcgaaatgctttgcatatcgactgtttcgaagtgaagcctcgctgtaaggaggtcctgtccacctctccctgcccccagcgtaattacgataatcgactcagtgtatgggcagtcatagagtgtctcaagcagttggctgacaccattagcatgccactgtgactaagcactgcgctaaccggcgcagtgatacatgacggaaaaagcattttctgatcctgcgataaaaactgcagggccacctgtgaggtcgctataagacagattcatctggtttagcccagatacagggactgcaaacacgaacgccgataaagctaaaaaccaggcgcagcaacatgatcataagctcggcctctgaatattcctcctgctcccgcaccccaaccgtccagtttttgcgggtgaagccccaaccttttctccggagtcaggagaaggttggacccttcttcgacgtcatcatatttggccgttcttacggaactattacttgtcagccatcacagccgactggcttccaattgctggctaaactcgtttggatacgttcacatgaggacttttaccgcgaacactactccctccatcatgtttgtcaggtaggccagctgtgccctcttatatggtctcaagcacaagcatattgaaataggggtaaattagtcagcaaagtctgtggagggcatatagtcaggcttaggtagcctagatttcgttgatttttcatcattttagcacgtagaatacacacttcag

SEQ ID NO: 1261 - DNA, 804 bp, Muscodor strobelii
  misc_feature: SGI cDNA ID NO. 560017
  misc_feature: Encodes the peptide sequence at SEQ ID NO 1262
atgtcttcagacgatcattccaacgttgagaatgaccagcccatgaccattgcgtcagagggcggttccgacgccgagactgagctgccgtctcttgcagacatgttgacgatgtctctaagcctcaccttcccctatgcgagcgaagataacatccgcaaggctcttggcgcattcgacaatgatgttcgcgaagtctggcgctttctggagttcaagggtcataagcccgtctctgaggtgcacaagcgtctctgtcagtcttcatctgaagctcaagcccaacaggcgtcgacccaacctgcttgcaattccgacacgctcgagattatcgtgaccaagcccaattccagcactgagttcttcaactggaccgagaagcgagtttctccttgttgggttcgcgatgagggcccgtccaacgagctcaagtacaatgacgccttcgatgcctgcgtcctcattctgattgaaggacttgatgtcaatcgcgaccgagtcgccatcatgcgtgctttcacgctgcgagctgcatcggacttaacattctactggcctcggaactacggacgaagggttaacggaaccatcagggattggtgcatcgtggcggctgaggaggattctctagtcctcgacatcatacgccgtctctccggggtcagcttcaccgacccgaatcacggtagcatcaccacgactatcagtgccgagcatatggagtcctcatgggacgaaaaccccattccttacactaccttcgccagctcaaactttttcagctatgacgcttacggcgcttag

SEQ ID NO: 1262 - protein, 267 aa, Muscodor strobelii
  misc_feature: SGI Peptide ID NO. 560017
MSSDDHSNVENDQPMTIASEGGSDAETELPSLADMLTMSLSLTFPYASEDNIRKALGAFDNDVREVWRFLEFKGHKPVSEVHKRLCQSSSEAQAQQASTQPACNSDTLEIIVTKPNSSTEFFNWTEKRVSPCWVRDEGPSNELKYNDAFDACVLILIEGLDVNRDRVAIMRAFTLRAASDLTFYWPRNYGRRVNGTIRDWCIVAAEEDSLVLDIIRRLSGVSFTDPNHGSITTTISAEHMESSWDENPIPYTTFASSNFFSYDAYGA

SEQ ID NO: 1263 - DNA, 1557 bp, Muscodor strobelii
  misc_feature: SGI cDNA ID NO. 560019
  misc_feature: Encodes the peptide sequence at SEQ ID NO 1264
atggagataaagatacgcaagaatgagcagcatgttggaaaagccaccattggtggagtcattgccggagacgataaatatttcgcattaaccgtcggtcatgttttctatccatgtccattaccaacagctgaaccattcgagatcgatgtgtccgaattaaaagaccttttctacggcgttgacaacgtaaatagcagcattgaagagaaggccgacatgccatcaagttcgcgatctcccgcgtcgtacacagctactggcgaaatatgtattggaaatgcaagctttgtctcgaacattcaaaatcatcatgagaaaactcaccacgccctggattgggcactgatcaaactcaattccggcatatctttcgaaagcatgcagggcatcgaaactcctattggtacctcagaccaagtgacaatccggacgcatcatggttttctccaaggcaagctccaatctggtggtgtcttcggtctgcccatggttgcaagtctacagcaagtgtctgctatcaagcttgactctgctcacgcgggaggatccattcgggaaggcgattccgggtcctgggtcatgaaccacaacaataacaaagtaattggaatgttgataggagtgtgcccatctttgcatgaagcctattttttaggcatggaagaaataataaaggacattgagcaacagaccaggttgagattagaagtaactctggaacctagtccggttttaggcagtgcgagagagaccaatattaacagaagtcttgcagaagaaccaaattggagacgagaaaggtctctacaggccatcgcatcacgtctcgaagacgaggactcgtcggttcgacgactagctatagaaatattaggcaagcagtcggctataccggaaaagaccgtcgaagctatcacattatacctcaaggacgaggactcgtttgttcgactattagctatagaagtactaagcaagcagtcggccataccggaaaagatcttcgaggccattgtatcacgctttgaagactcagactcgtttgttcgacgattagctatagaagtattaaacaagcagtcggccatatcggaaaagatcctcgaggccattgtattacgtctcgaacactcggactcgtttgttcgacaatctgctatagaagtgctcaacaagcagtcggccataccagaaaagatcgttgacgtatatcataacctcattggacgatatgttcataacgtcagaaataccacgatactcccgttgaataacgcagatcacctacacacggtgacttacacttataaatccattgctaaattcacccagacctttaccgtactggttccttggacctttccgatcgctgccattctcgttttgtatattgttgagaatatggcaacacggcttggcataatcgcggctttgaccgggctgttttctgtctccatgagtttgctgacaatggcgacactgcaagagatcttcgcgtgtactgcggcattcgcaggcattctggtcttcttccttgggagcacgactggatag

SEQ ID NO: 1264 - protein, 518 aa, Muscodor strobelii
  misc_feature: SGI Peptide ID NO. 560019
  misc_feature (3)..(244): NCBI GI: 256734727 Blast Desc: NECHADRAFT_75267 [Nectria haematococca mpVI 77-13-4]
  misc_feature (270)..(421): NCBI GI: 242826640 Blast Desc: TSTA_111040 [Talaromyces stipitatus ATCC 10500] gi|218712501|gb|EED11927.1| TSTA_111040 [Talaromyces stipitatus ATCC 10500]
  misc_feature (270)..(402): NCBI GI: 242826640 Blast Desc: TSTA_111040 [Talaromyces stipitatus ATCC 10500] gi|218712501|gb|EED11927.1| TSTA_111040 [Talaromyces stipitatus ATCC 10500]
  misc_feature (270)..(399): NCBI GI: 242826640 Blast Desc: TSTA_111040 [Talaromyces stipitatus ATCC 10500] gi|218712501|gb|EED11927.1| TSTA_111040 [Talaromyces stipitatus ATCC 10500]
  misc_feature (269)..(402): NCBI GI: 242826640 Blast Desc: TSTA_111040 [Talaromyces stipitatus ATCC 10500] gi|218712501|gb|EED11927.1| TSTA_111040 [Talaromyces stipitatus ATCC 10500]
  misc_feature (270)..(411): NCBI GI: 242826640 Blast Desc: TSTA_111040 [Talaromyces stipitatus ATCC 10500] gi|218712501|gb|EED11927.1| TSTA_111040 [Talaromyces stipitatus ATCC 10500]
  misc_feature (267)..(402): NCBI GI: 171691430 Blast Desc: protein product [Podospora anserina] gi|170945663|emb|CAP71776.1| protein product [Podospora anserina]
  misc_feature (267)..(402): NCBI GI: 171691430 Blast Desc: protein product [Podospora anserina] gi|170945663|emb|CAP71776.1| protein product [Podospora anserina]
  misc_feature (268)..(398): NCBI GI: 242761247 Blast Desc: conserved [Talaromyces stipitatus ATCC 10500] gi|218723339|gb|EED22756.1| conserved [Talaromyces stipitatus ATCC 10500]
  misc_feature (270)..(421): NCBI GI: 242761247 Blast Desc: conserved [Talaromyces stipitatus ATCC 10500] gi|218723339|gb|EED22756.1| conserved [Talaromyces stipitatus ATCC 10500]
MEIKIRKNEQHVGKATIGGVIAGDDKYFALTVGHVFYPCPLPTAEPFEIDVSELKDLFYGVDNVNSSIEEKADMPSSSRSPASYTATGEICIGNASFVSNIQNHHEKTHHALDWALIKLNSGISFESMQGIETPIGTSDQVTIRTHHGFLQGKLQSGGVFGLPMVASLQQVSAIKLDSAHAGGSIREGDSGSWVMNHNNNKVIGMLIGVCPSLHEAYFLGMEEIIKDIEQQTRLRLEVTLEPSPVLGSARETNINRSLAEEPNWRRERSLQAIASRLEDEDSSVRRLAIEILGKQSAIPEKTVEAITLYLKDEDSFVRLLAIEVLSKQSAIPEKIFEAIVSRFEDSDSFVRRLAIEVLNKQSAISEKILEAIVLRLEHSDSFVRQSAIEVLNKQSAIPEKIVDVYHNLIGRYVHNVRNTTILPLNNADHLHTVTYTYKSIAKFTQTFTVLVPWTFPIAAILVLYIVENMATRLGIIAALTGLFSVSMSLLTMATLQEIFACTAAFAGILVFFLGSTTG

SEQ ID NO: 1265 - DNA, 2807 bp, Muscodor strobelii
  misc_feature: SGI EST ID NO. CUFF.3497.0
  misc_feature: Variant of the nucleotide sequence at SEQ ID NO 1263
ctcaccattccttgcacagccacagcccatcgaatggactggggaggcgtagcatgatacgcattgctcttccctgtttggagtgatcaactgttaactatatattgtcattgattgacattcaacaaccacggtgcccatcgatgaagttaaacatcctccagtaggaataactgttttttaattgggtttctaagaatctataagatcagccgctgatccaacaaggtttatgtttgttctagctgagacaatctcaatgatggctgcgcaaccaccgcatctcgacgggttgcagaccattcagtaccgaatgaggaacacagatcctaatcacataaattcctttggtgatctgatacatgaattcaaattttctttgggacggctaagaatgtggagtatcactggcgaacttgagcacgaggcgaaccaatggcaagaaacccttaccaagttttgcgaggaccaactagagagggagcaacctatccatccttatttcattcggtgctgtcttctcggggttgacaaagaccatgcttgcccgagcatcgctgtgcattgcgaggaccggaattccagcttggtcgtgaaaagaacaattgataacgcaaggcttcaaatctggccttgtgtaaggttaccacttgtggttcaagccgtgatggtgtcaggagacttagctctcatgcccaacgactcaaacgagtaccaaatcttcgctctaggcaaccagatacccctgtgtctagacgcgatggagataaagatacgcaagaatgagcagcatgttggaaaagccaccattggtggagtcattgccggagacgataaatatttcgcattaaccgtcggtcatgttttctatccatgtccattaccaacagctgaaccattcgagatcgatgtgtccgaattaaaagaccttttctacggcgttgacaacgtaaatagcagcattgaagagaaggccgacatgccatcaagttcgcgatctcccgcgtcgtacacagctactggcgaaatatgtattggaaatgcaagctttgtctcgaacattcaaaatcatcatgagaaaactcaccacgccctggattgggcactgatcaaactcaattccggcatatctttcgaaagcatgcagggcatcgaaactcctattggtacctcagaccaagtgacaatccggacgcatcatggttttctccaaggcaagctccaatctggtggtgtcttcggtctgcccatggttgcaagtctacagcaagtgtctgctatcaagcttgactctgctcacgcgggaggatccattcgggaaggcgattccgggtcctgggtcatgaaccacaacaataacaaagtaattggaatgttgataggagtgtgcccatctttgcatgaagcctattttttaggcatggaagaaataataaaggacattgagcaacagaccaggttgagattagaagtaactctggaacctagtccggttttaggcagtgcgagagagaccaatattaacagaagtcttgcagaagaaccaaattggagacgagaaaggtctctacaggccatcgcatcacgtctcgaagacgaggactcgtcggttcgacgactagctatagaaatattaggcaagcagtcggctataccggaaaagaccgtcgaagctatcacattatacctcaaggacgaggactcgtttgttcgactattagctatagaagtactaagcaagcagtcggccataccggaaaagatcttcgaggccattgtatcacgctttgaagactcagactcgtttgttcgacgattagctatagaagtattaaacaagcagtcggccatatcggaaaagatcctcgaggccattgtattacgtctcgaacactcggactcgtttgttcgacaatctgctatagaagtgctcaacaagcagtcggccataccagaaaagatcgttgacgtatatcataacctcattggacgatatgttcataacgtcagaaataccacgatactcccgttgaataacgcagatcacctacacacggtgacttacacttataaatccattgctaaattcacccagacctttaccgtactggttccttggacctttccgatcgctgccattctcgttttgtatattgttgagaatatggcaacacggcttggcataatcgcggctttgaccgggctgttttctgtctccatgagtttgctgacaatggcgacactgcaagagatcttcgcgtgtactgcggcattcgcaggcattctggtcttcttccttgggagcacgactggatagattggcggcatggcgggacgaccgcaaactcgaagaaggaattagactactgttacagaatagttcggcaagttgtatgggtagctgtcggtactcaatatggaaatgccatgcgggttgcatagggctacattgggggctgatgtacctaaattccgacatgatcacacagcggcagggtgagagggacccattggctagagcacccgggccggccccagacaggatgagaaaatacatgtaggcttgcagctgtaggaagaacggtaaaattatgcaagtcaatatcagtgtattgtcctgctttacaataagcgttcaaattaccaacttgatttatgccagaatattggagtgtacggcctcatgcccatcttcattcatgcctcacgcgtagtgccaatcatccctacgcgtacatacatttccgggcatgtatatagtatttgatcgtattgatcaatcactatttaggtaacttgcattacga

SEQ ID NO: 1266 - DNA, 1572 bp, Muscodor strobelii
  misc_feature: SGI cDNA ID NO. 560020
  misc_feature: Elevated expression when VOC is produced
  misc_feature: Encodes the peptide sequence at SEQ ID NO 1267
atgggacagcccagagtggtcatgtctcaagcagcttttggacttacgatggttctcgagaatttggattattcaggaggtagtgcactcgcggcgggatcctattattatccatggacaaaccatacacagttggcatcgcctgggctgggatacttcatggttgcgtcgaaagggctatgcgcgactcccgcggatatcgcaaaccatctaaatatagatatgctgtgcatccttcgatgttcccgcgttgcctggccactagacgcactgctgtcgatcacgcaggtcaagttccatgccaccgaccaacgagacaaagtctggagcctgctagggcttgcggccgagtgtcgcccagatcaagaaaggggcgcgaggatagtacgctcggtggagtgcgtgccctacgagttgcgtcccgactatactctcggcacgactcaggtatatgaacgtgtcagtcggtacctgctcatgcacagtaacactccggccttactgacacgcacacgagggctcatcggcagtctaagccggacgcagcgcacggccgaattaccgggtctgccctcttgggtgcccgactggagcgactttgtgggccataaccgccatgttcggaccagcttctcatgggtccactacgctccggatgaacagcaacagcctgctactctaggatactccaaaaactacgccgtggtaactcggactgaattgaagatctacgatcaggaggcgccctggggtgccggtaattatgtgaacaagcccccaaatgagtctatcctctgcgtcggtggtcttgtgataactcatatcaagcgtgtggtgtcactcagcaaaaatcccacgtgtagagaacagttttgcgcgtcttttgaccgtatcattgttcttatcattcaggccgctctgtcgcttctgcaccgcgacgtggacttaggcacagccccatgggacagaggagatcaggacagagaaatgattagaaactgggtggctactcttattagagtaacaatcgcagatcaacataacttaagtggctgcacgtgggagcagtgcttacaagatggctcgcggtacttgcggaatatgatacttagctgtcgggaggacatactgttatgcccctggctctcttccgcctctcgagcaaacaatgtccttctagatattcttctagagaccctcctaccggaggctgaagacatgggcggccagcagttcgaggctgtctatgtttccatagcgcgaaatttttgttttaataggacttttttcatcacggcggatgaaaggatggctattggtccatccgcagcacagaccggtgatactgtcgccctcatatttggtagcggtgtaccgtttgtgttaagagcacaagagggcacgcagccgcaagagcaggacgggatcggtctggacgagaggaaagggcggagatctcaggattattactggcgcgtggttggagaatcatacatacagggtcttatgaatggagaggctatcgaggcagagaggcaaggcacactagagggggttctggccttagtctaa

SEQ ID NO: 1267 - protein, 523 aa, Muscodor strobelii
  misc_feature: SGI Peptide ID NO. 560020
  misc_feature (69)..(458): NCBI GI: 46115936 Blast Desc: FG03810.1 [Gibberella zeae PH-1]
  misc_feature (30)..(365): NCBI GI: 46111897 Blast Desc: FG02830.1 [Gibberella zeae PH-1]
  misc_feature (8)..(508): NCBI GI: 256721874 Blast Desc: NECHADRAFT_88090 [Nectria haematococca mpVI 77-13-4]
  misc_feature (99)..(463): NCBI GI: 225562563 Blast Desc: HET domain-containing protein [Ajellomyces capsulatus G186AR]
  misc_feature (98)..(513): NCBI GI: 6578961 Blast Desc: heterokaryon incompatibility protein [Neurospora crassa]
  misc_feature (397)..(523): NCBI GI: 169598444 Blast Desc: SNOG_02026 [Phaeosphaeria nodorum SN15] gi|160704398|gb|EAT90238.2| SNOG_02026 [Phaeosphaeria nodorum SN15]
  misc_feature (102)..(513): NCBI GI: 164427474 Blast Desc: NCU03533 [Neurospora crassa OR74A] gi|157071757|gb|EAA27576.2| conserved [Neurospora crassa OR74A]
  misc_feature (426)..(511): NCBI GI: 171678233 Blast Desc: protein product [Podospora anserina] gi|170937186|emb|CAP61843.1| protein product [Podospora anserina]
  misc_feature (426)..(517): NCBI GI: 116205716 Blast Desc: CHGG_02151 [Chaetomium globosum CBS 148.51] gi|88182748|gb|EAQ90216.1| CHGG_02151 [Chaetomium globosum CBS 148.51]
  misc_feature (416)..(508): NCBI GI: 256722832 Blast Desc: [Nectria haematococca mpVI 77-13-4]
  misc_feature: Useful for introducing or modulating the production of volatile compounds
MGQPRVVMSQAAFGLTMVLENLDYSGGSALAAGSYYYPWTNHTQLASPGLGYFMVASKGLCATPADIANHLNIDMLCILRCSRVAWPLDALLSITQVKFHATDQRDKVWSLLGLAAECRPDQERGARIVRSVECVPYELRPDYTLGTTQVYERVSRYLLMHSNTPALLTRTRGLIGSLSRTQRTAELPGLPSWVPDWSDFVGHNRHVRTSFSWVHYAPDEQQQPATLGYSKNYAVVTRTELKIYDQEAPWGAGNYVNKPPNESILCVGGLVITHIKRVVSLSKNPTCREQFCASFDRIIVLIIQAALSLLHRDVDLGTAPWDRGDQDREMIRNWVATLIRVTIADQHNLSGCTWEQCLQDGSRYLRNMILSCREDILLCPWLSSASRANNVLLDILLETLLPEAEDMGGQQFEAVYVSIARNFCFNRTFFITADERMAIGPSAAQTGDTVALIFGSGVPFVLRAQEGTQPQEQDGIGLDERKGRRSQDYYWRVVGESYIQGLMNGEAIEAERQGTLEGVLALV

SEQ ID NO: 1268 - DNA, 2261 bp, Muscodor strobelii
  misc_feature: SGI EST ID NO. CUFF.3506.0
  misc_feature: Variant of the nucleotide sequence at SEQ ID NO 1266
cgttgcttgttattttccaggctgccctaggaatcattctttgctcttcaccgaatcgagttaacgctattgttgtgagcaaccttagatagaacgggaagcaaccgtgaagtcccgaatactcatctatcgccttatagcattcgtttactgcatattaacgtcgacatatgcgatccagatgctggggagcttatggtggtgcatctcgacgagtcgcctccgtactatgctcttagccattcctggggacatcagggtcaaaacactgatattgttatcgggggtaccttgatctccatccaaacagaactctatagggcaatccaacggctccgcgcattggcggcttctgctaccggtgatccggccttaaatcctcctttagagtacatatggatagatagcatttgcatcaaccaacacgacgcccaagaacgctccacgcaggtccaactgatgggcaccatatacttcggggccattaggaccctcgtatggctcggattcgagttcgactcgtcttccaaagcgtggcagttgatagacgacatctacgatatatttcatgcggaaaccccaacagcaagaaccctggaagacatacctcaaagcatgtattcagatgcttttcacgctagattcggattgccgccatgggacagcccagagtggtcatgtctcaagcagcttttggacttacgatggttctcgagaatttggattattcaggaggtagtgcactcgcggcgggatcctattattatccatggacaaaccatacacagttggcatcgcctgggctgggatacttcatggttgcgtcgaaagggctatgcgcgactcccgcggatatcgcaaaccatctaaatatagatatgctgtgcatccttcgatgttcccgcgttgcctggccactagacgcactgctgtcgatcacgcaggtcaagttccatgccaccgaccaacgagacaaagtctggagcctgctagggcttgcggccgagtgtcgcccagatcaagaaaggggcgcgaggatagtacgctcggtggagtgcgtgccctacgagttgcgtcccgactatactctcggcacgactcaggtatatgaacgtgtcagtcggtacctgctcatgcacagtaacactccggccttactgacacgcacacgagggctcatcggcagtctaagccggacgcagcgcacggccgaattaccgggtctgccctcttgggtgcccgactggagcgactttgtgggccataaccgccatgttcggaccagcttctcatgggtccactacgctccggatgaacagcaacagcctgctactctaggatactccaaaaactacgccgtggtaactcggactgaattgaagatctacgatcaggaggcgccctggggtgccggtaattatgtgaacaagcccccaaatgagtctatcctctgcgtcggtggtcttgtgataactcatatcaagcgtgtggtgtcactcagcaaaaatcccacgtgtagagaacagttttgcgcgtcttttgaccgtatcattgttcttatcattcaggccgctctgtcgcttctgcaccgcgacgtggacttaggcacagccccatgggacagaggagatcaggacagagaaatgattagaaactgggtggctactcttattagagtaacaatcgcagatcaacataacttaagtggctgcacgtgggagcagtgcttacaagatggctcgcggtacttgcggaatatgatacttagctgtcgggaggacatactgttatgcccctggctctcttccgcctctcgagcaaacaatgtccttctagatattcttctagagaccctcctaccggaggctgaagacatgggcggccagcagttcgaggctgtctatgtttccatagcgcgaaatttttgttttaataggacttttttcatcacggcggatgaaaggatggctattggtccatccgcagcacagaccggtgatactgtcgccctcatatttggtagcggtgtaccgtttgtgttaagagcacaagagggcacgcagccgcaagagcaggacgggatcggtctggacgagaggaaagggcggagatctcaggattattactggcgcgtggttggagaatcatacatacagggtcttatgaatggagaggctatcgaggcagagaggcaaggcacactagagggggttctggccttagtctaatggaactctgagtactagatctcgaggttcccc

SEQ ID NO: 1269 - DNA, 1995 bp, Muscodor strobelii
  misc_feature: SGI cDNA ID NO. 560021
  misc_feature: Elevated expression when VOC is produced
  misc_feature: Encodes the peptide sequence at SEQ ID NO 1270
atgctacctagcgtaatcccacaggctcgcatactcacctatgattggaatgccaactatgccgaggacgcttccgtggaccggttcctcgggcatgccgatgccttgttgaatcgattgcagcaaaaccgactcgacaacgcatattcaggtcgtcctctcgtctttatcgcctcctgctttggtgggctgctgttagcgaaggcccttactcgagcggcttacctggatcacgaaatcttcaaatccattgttggtatcgttttccttggcactcctttccgagggagttgggaggaagggtattacatagcgaagtatcgctattgctctaggcaagatcaaggccttgaaggctcagaggagctaattcaatacctgagaccggatggtcgaggtgatgcgagaagtggccccagtcccctggatgacatggtccgccaattcgcggaggtcatacgccctgacaagtacaaatcgaaaatcgtatttttctacgagacactcactaccgaacttaattcgcatctcagagatttgccggcagatcagcaggagattggcccgtctcgccgggcagtggttgtaccacagagctcggcctgcttggacggcttcgcccgatttggattagacgtgagacataatctgttacacaagcatgcacggcccgaaggggatgctttccgacagattgcgaagagtgtgaaggaattggttgagcaagctattcaacagactccagatgtatggatacacgaaaaacactatgcggacgaagcccttaggatcaagcggctcctaggtaaacctccgcccatggagcaatgctatatcaatcttgcgatagtatggcagcccgcggacgagcttcgtcgctcgggagatcagaactcacatatcgagatacgaacgctctttaacccgcgcaagatgcccgatggccaaatgaaagcaccgagacgaatcttgatccggggtcgtgcaggcgtcgggaagacaacattatgtcaccccaatgcgcgcagtctttccaaatccttatggaacgatttggaagagacacattgttgcgataccctgtttctactcgacggcgtggatgaagtattcgagttccttgatcaagagcattctggatatagtcttctccaatctcttttcgggatgccaaacgtcattatcacaacccggccccacacaacgattccgtactacttccagaagccagatatagagctagaaaccgtaggattcctgccggaagaagtccaggcctatctagagaaggtggttcaaaatcccggcaaggtccaggagatccagcatctcttgcgcaagcattggctcttgcaaagtcttgttcgaattccgatccagctggatgtactttgctccttgtgggatcataaatttcttaacacagagattcccgagactatggcaggcgtgtatgaggcaatagtgcaacgactgtgggaaaaggacgtcacacggctcggcaaattacgagaaacctccgctgaaaatgcccatccagaagagattgatcgtcacatcgagcccatcaaggaagtggtcgagtgccttgcatttaatggcatgtataacgacgtggttgagttacagccgcatcatcgtggcactatactcaagttgatcaacctgcctaaggagtggggtacactcgacgagtgcctcggaagtatctcttttctaagggcgtccgatcccttggcatccgcgtctgaacgaaatcatcacttcctacatttgacatttcaggagttctttgctgcgaaatatttcgtacgacagtggaaaaataataccaagatggaatactgcgattttaaaacaaagaagcgggaaatgatcgaccctgcccaattcttgcaacagcataaatatgctactcgttacgacatcgtatggcgaaccaatcgacttgctcgggccgacgcaccatcggctggtgatgcattgcttaactga

SEQ ID NO: 1270 - protein, 664 aa, Muscodor strobelii
  misc_feature: SGI Peptide ID NO. 560021
  misc_feature (1)..(646): NCBI GI: 171691430 Blast Desc: protein product [Podospora anserina] gi|170945663|emb|CAP71776.1| protein product [Podospora anserina]
  misc_feature (1)..(646): NCBI GI: 115391829 Blast Desc: [Aspergillus terreus NIH2624] gi|114194343|gb|EAU36043.1| [Aspergillus terreus NIH2624]
  misc_feature (1)..(646): NCBI GI: 255944489 Blast Desc: Pc20g04700 [Penicillium chrysogenum Wisconsin 54-1255] gi|211587747|emb|CAP85799.1| Pc20g04700 [Penicillium chrysogenum Wisconsin 54-1255]
  misc_feature (195)..(646): NCBI GI: 46130706 Blast Desc: FG08957.1 [Gibberella zeae PH-1]
  misc_feature (262)..(646): NCBI GI: 242825926 Blast Desc: conserved [Talaromyces stipitatus ATCC 10500] gi|218712357|gb|EED11783.1| conserved [Talaromyces stipitatus ATCC 10500]
  misc_feature (262)..(646): NCBI GI: 212547167 Blast Desc: conserved [Penicillium marneffei ATCC 18224] gi|210064392|gb|EEA18489.1| conserved [Penicillium marneffei ATCC 18224]
  misc_feature (262)..(646): NCBI GI: 212547165 Blast Desc: conserved [Penicillium marneffei ATCC 18224] gi|210064391|gb|EEA18488.1| conserved [Penicillium marneffei ATCC 18224]
  misc_feature (8)..(640): NCBI GI: 238841694 Blast Desc: peptidase C14 [Microsporum canis CBS 113480]
  misc_feature (262)..(646): NCBI GI: 212539890 Blast Desc: PMAA_053000 [Penicillium marneffei ATCC 18224] gi|210067399|gb|EEA21491.1| PMAA_053000 [Penicillium marneffei ATCC 18224]
  misc_feature (265)..(646): NCBI GI: 115397207 Blast Desc: conserved [Aspergillus terreus NIH2624] gi|114192386|gb|EAU34086.1| conserved [Aspergillus terreus NIH2624]
  misc_feature: Useful for introducing or modulating the production of volatile compounds
MLPSVIPQARILTYDWNANYAEDASVDRFLGHADALLNRLQQNRLDNAYSGRPLVFIASCFGGLLLAKALTRAAYLDHEIFKSIVGIVFLGTPFRGSWEEGYYIAKYRYCSRQDQGLEGSEELIQYLRPDGRGDARSGPSPLDDMVRQFAEVIRPDKYKSKIVFFYETLTTELNSHLRDLPADQQEIGPSRRAVVVPQSSACLDGFARFGLDVRHNLLHKHARPEGDAFRQIAKSVKELVEQAIQQTPDVWIHEKHYADEALRIKRLLGKPPPMEQCYINLAIVWQPADELRRSGDQNSHIEIRTLFNPRKMPDGQMKAPRRILIRGRAGVGKTTLCHPNARSLSKSLWNDLEETHCCDTLFLLDGVDEVFEFLDQEHSGYSLLQSLFGMPNVIITTRPHTTIPYYFQKPDIELETVGFLPEEVQAYLEKVVQNPGKVQEIQHLLRKHWLLQSLVRIPIQLDVLCSLWDHKFLNTEIPETMAGVYEAIVQRLWEKDVTRLGKLRETSAENAHPEEIDRHIEPIKEVVECLAFNGMYNDVVELQPHHRGTILKLINLPKEWGTLDECLGSISFLRASDPLASASERNHHFLHLTFQEFFAAKYFVRQWKNNTKMEYCDFKTKKREMIDPAQFLQQHKYATRYDIVWRTNRLARADAPSAGDALLN

SEQ ID NO: 1271 - DNA, 3409 bp, Muscodor strobelii
  misc_feature: SGI EST ID NO. CUFF.3605.1
  misc_feature: Variant of the nucleotide sequence at SEQ ID NO 1269
ccctgatttacaaagtattggacacctcgcaagtagactagatcggaagcctgaggcgtattttggtcggcatgcgcatcagcaagagcgggcttcaatgagaaacaccagcaggcccatgtgatgaaacgcgcgccacctgccctctctatgtagattgattcccatgcgggcagaggaaattgattgggtgtcatctagacatgcgagaacgcccagaaggaccttgggcacgtagtggaacggaaacccctcccccccaccttcccttgcaggtcgggcgtctgcatcgggctgaaaatgccttggatggtgtgcatataagacgtagattgttgggtcaaggctttccgtccgaactattgtgtgttctcggaatttcattttcctttccatcgttttttttgacctggggccatctgcacatcactgatcctagtatgtgacactggtctacctacattggcgtgaggcaataagcaatatcttattgatacttcaatggctctttacccattccatgaacaaccgcaacatccaggcacggtagacttgcgagtcgggttagtacaacaatttccggatcctaaagacaattttgcgactcgcaagacaactatagacgtcgtcgcccttcatggactccgtgctcaatcgcccaagacgtggatcgcctggaaagatgataaatgcgcggcttctggggagataaattggctacaggatcccaatatgctacctagcgtaatcccacaggctcgcatactcacctatgattggaatgccaactatgccgaggacgcttccgtggaccggttcctcgggcatgccgatgccttgttgaatcgattgcagcaaaaccgactcgacaacgcatattcaggtcgtcctctcgtctttatcgcctcctgctttggtgggctgctgttagcgaaggcccttactcgagcggcttacctggatcacgaaatcttcaaatccattgttggtatcgttttccttggcactcctttccgagggagttgggaggaagggtattacatagcgaagtatcgctattgctctaggcaagatcaaggccttgaaggctcagaggagctaattcaatacctgagaccggatggtcgaggtgatgcgagaagtggccccagtcccctggatgacatggtccgccaattcgcggaggtcatacgccctgacaagtacaaatcgaaaatcgtatttttctacgagacactcactaccgaacttaattcgcatctcagagatttgccggcagatcagcaggagattggcccgtctcgccgggcagtggtaacaccatccactctgatgtgttgttgatttcgtgtactcatatacatatataggttgtaccacagagctcggcctgcttggacggcttcgcccgatttggattagacgtgagacataatctgttacacaagcatgcacggcccgaaggggatgctttccgacagattgcgaagagtgtgaaggaattggttgagcaagctattcaacagactccagatgtatggatacacgaaaaacactatgcggacgaagcccttaggatcaagcggctcctaggtaaacctccgcccatggagcaatgctatatcaatcttgcgatagtatggcagcccgcggacgagcttcgtcgctcgggaggtcggtcggatgatctgatatctagagattctcgattttctctatctaaccggctaaaagtccagataccagatcagaactcacatatcgagatacgaacgctctttaacccgcgcaagatgcccgatggccaaatgaaagcaccgagacgaatcttgatccggggtcgtgcaggcgtcgggaagacaacattatgtaagaaaattgttcatgagtaccttcacaaccatatttggtaggcgttgttcactcgcattttgtggctgccattgcgacgactcaagcaactagagtctagcgaatacaatcttggcgacgtatttcaccatttctactttcaaggtcaccccaatgcgcgcagtctttccaaatccttatggaacgatttggaagagacacattgttgcgataccctgtttctactcgacggcgtggatgaagtattcgagttccttgatcaagagcattctggatatagtcttctccaatctcttttcgggatgccaaacgtcattatcacaacccggccccacacaacgattccgtactacttccagaagccagatatagagctagaaaccgtaggattcctgccggaagaagtccaggcctatctagagaaggtggttcaaaatcccggcaaggtccaggagatccagcatctcttgcgcaagcattggctcttgcaaagtcttgttcgaattccgatccagctggatgtactttgctccttgtgggatcataaatttcttaacacagagattcccgagactatggcaggcgtgtatgaggcaatagtgcaacgactgtgggaaaaggacgtcacacggctcggcaaattacgagaaacctccgctgaaaatgcccatccagaagagattgatcgtcacatcgagcccatcaaggaagtggtcgagtgccttgcatttaatggcatgtataacgacgtggttgagttacagccgcatcatcgtggcactatactcaagttgatcaacctgcctaaggagtggggtacactcgacgagtgcctcggaagtatctcttttctaagggcgtccgatcccttggcatccgcgtctgaacgaaatcatcacttcctacatttgacatttcaggagttctttgctgcgaaatatttcgtacgacagtggaaaaataataccaagatggaatactgcgattttaaaacaaagaagcgggaaatgatcgaccctgcccaattcttgcaacagcataaatatgctactcgttacgacatcgtatggcggtttgctttaggcttacttgacaatgataagaagaatgagttttttactacgattcaaaaagaaccaatcgacttgctcgggccgacgcaccatcggctggtgatgcattgcttaactgaaatagatcatcaatcccaacttcggtctcgcgcggaacaaaaactggctcaatggctgctatacgaatgcaagttggccaactcagcaatgtttgcggcagactctgaatttccagacgaatccttgaagcttgccttagtagaaggttccaataaacaaaaaaggattattttgtcatatctaccaaatcgatacttgtcagaggcggccgtggaagcgatcatcaagctctcacgtaatgcagatgaatatgtccgacaggccgccgttcgcgccctaagcaaccaatcgagcttgtcagaggcggccgtggcaacgctcatcaagctctcacgcgatgcaca

SEQ ID NO: 1272 - DNA, 972 bp, Muscodor strobelii
  misc_feature: SGI cDNA ID NO. 560022
  misc_feature: Encodes the peptide sequence at SEQ ID NO 1273
atgcttacgaactctcgaggtactaaacgccgagcagcagatatccttcgagacgtggagaatacggataacagccctaagtcctcacagagagatccacggccgccgcgacgcgccaccagcttgcgcgcctcctcggcagccgcagaccgtacatcgcgagcaccaaaagccaagggcctcggtgccctcacaattgctgccgatggtggcagacacggtgatcggacagtgctgagaccaagggaaataccacggccgtcactcaacccgcactcgaaagacgccgcaacggacatccgcacagatacggttgccaactccgcgggtgccaaaagtatagatgcagatcgcgaccaacgaggctcgctggttccagaggctatgatgggtggtccagctcccttagtaccgaatgccctccatgatgcagccccagccagggtcgtcgctgagctcgacccgattggcaaagtcgacacggcccgcgccgagcccggattacccttgcaagcgtacaatcacgacaatgacgacggcgagatacacgaaataagtagcttgctcaaccatcgcatggccgacgatcagagcggtactgttgaactacaggtgcactggctcggcgagagccgggcgcaagctacatgggtagccgaggaggaaatccagcgaggagcggaggagatgctgtacgcgtattggagggctcgaggagggcgccagagcgtgctcttccacaagcccagggaccccccaaccgagaagtatcatgtcttcaagctgttacgtcacaaaaaacagcaagggagcctccgattagaggttcaatgggttggccattcgaccgaagcccacgagaccacaatggaacccgagagcaaggtcaggagcatcgccccgacactattagacgagtattggaggaaagccggtggccgtgcatgttgcctcgcggcgcggagtagatag

SEQ ID NO: 1273 - protein, 323 aa, Muscodor strobelii
  misc_feature: SGI Peptide ID NO. 560022
  misc_feature (183)..(237): Pfam Id: PF00385 Pfam Desc: 'chromo' (CHRromatin Organisation MOdifier) domain
  misc_feature (257)..(310): Pfam Id: PF00385 Pfam Desc: 'chromo' (CHRromatin Organisation MOdifier) domain
  misc_feature (184)..(307): NCBI GI: 46110525 Blast Desc: FG02144.1 [Gibberella zeae PH-1]
  misc_feature (181)..(313): NCBI GI: 256730107 Blast Desc: NECHADRAFT_101114 [Nectria haematococca mpVI 77-13-4]
  misc_feature (184)..(307): NCBI GI: 256728634 Blast Desc: NECHADRAFT_97011 [Nectria haematococca mpVI 77-13-4]
  misc_feature (167)..(308): NCBI GI: 39940376 Blast Desc: [Magnaporthe grisea 70-15] gi|145010700|gb|EDJ95356.1| [Magnaporthe grisea 70-15]
  misc_feature (183)..(313): NCBI GI: 46117430 Blast Desc: FG04557.1 [Gibberella zeae PH-1]
  misc_feature (183)..(314): NCBI GI: 256729555 Blast Desc: NECHADRAFT_84250 [Nectria haematococca mpVI 77-13-4]
  misc_feature (201)..(307): NCBI GI: 256721145 Blast Desc: NECHADRAFT_88862 [Nectria haematococca mpVI 77-13-4]
MLTNSRGTKRRAADILRDVENTDNSPKSSQRDPRPPRRATSLRASSAAADRTSRAPKAKGLGALTIAADGGRHGDRTVLRPREIPRPSLNPHSKDAATDIRTDTVANSAGAKSIDADRDQRGSLVPEAMMGGPAPLVPNALHDAAPARVVAELDPIGKVDTARAEPGLPLQAYNHDNDDGEIHEISSLLNHRMADDQSGTVELQVHWLGESRAQATWVAEEEIQRGAEEMLYAYWRARGGRQSVLFHKPRDPPTEKYHVFKLLRHKKQQGSLRLEVQWVGHSTEAHETTMEPESKVRSIAPTLLDEYWRKAGGRACCLAARSR

SEQ ID NO: 1274 - DNA, 1236 bp, Muscodor strobelii
  misc_feature: SGI EST ID NO. CUFF.3758.2
  misc_feature: Variant of the nucleotide sequence at SEQ ID NO 1272
caaaccttcgtgtcctgtccgcgactgaccgagtatggttctatcgccattcatcttgccacaatatatacagcattggtagtctcttgcgctaaaaaatacagcacactgccgacatcatttaaacactcataccaccaccaatgaaaaggacatgcttacgaactctcgaggtactaaacgccgagcagcagatatccttcgagacgtggagaatacggataacagccctaagtcctcacagagagatccacggccgccgcgacgcgccaccagcttgcgcgcctcctcggcagccgcagaccgtacatcgcgagcaccaaaagccaagggcctcggtgccctcacaattgctgccgatggtggcagacacggtgatcggacagtgctgagaccaagggaaataccacggccgtcactcaacccgcactcgaaagacgccgcaacggacatccgcacagatacggttgccaactccgcgggtgccaaaagtatagatgcagatcgcgaccaacgaggctcgctggttccagaggctatgatgggtggtccagctcccttagtaccgaatgccctccatgatgcagccccagccagggtcgtcgctgagctcgacccgattggcaaagtcgacacggcccgcgccgagcccggattacccttgcaagcgtacaatcacgacaatgacgacggcgagatacacgaaataagtagcttgctcaaccatcgcatggccgacgatcagagcggtactgttgaactacaggtgcactggctcggcgagagccgggcgcaagctacatgggtagccgaggaggaaatccagcgaggagcggaggagatgctgtacgcgtattggagggctcgaggagggcgccagagcgtgctcttccacaagcccagggaccccccaaccgagaagtatcatgtcttcaagctgttacgtcacaaaaaacagcaagggagcctccgattagaggttcaatgggttggccattcgaccgaagcccacgagaccacaatggaacccgagagcaaggtcaggagcatcgccccgacactattagacgagtattggaggaaagccggtggccgtgcatgttgcctcgcggcgcggagtagataggaaaacccgcgtccagtaggcaggaatgctacaacgattcctccattagaggccggagtgtcatagaagacagtagcatgtgcccaataaatattgttgacaaaccatag

SEQ ID NO: 1275 - DNA, 1449 bp, Muscodor strobelii
  misc_feature: SGI cDNA ID NO. 560023
  misc_feature: Reduced expression when VOC is produced
  misc_feature: Encodes the peptide sequence at SEQ ID NO 1276
atggaccctggacaaccaccacccaacaacaacttctttgggttctccagccccggctccatgaaccacatggccacagacaatcaaaatgacatcatgtccatgtttgatagcaacatgttcgatggcatgtccatgaactttgacagcttcggtgacttttcgcttcctcagcagcagtttcagcccgtcgagaacaatgagacaccgcctcaggccttcgcgcagtccgacaacgcgtcgcggatatcttccaaccccgaagacagtcccatgggcccacctgcacccatgaacaacggcaatgtgggcacaccagcgcagcagtcagggcagatgggcggcgcattgactgagttcacgaaacggaggaactggcccgctaaagtggtggaggagctcaaagatctactccacatattggacgctcacggtcgcgtcaagtatgtatcgccaagcgtctcggcgctaattggctttgagcctgaagagattgtagacacatttctgagagagcttattcaccccgacgatgtagggaccttcacatctgagatgaacgagtgcatagccacgggcaacccgtttcgcatgttttatcgaataaggaagaaagatcatcaatatggcatttttgagtctgttggccatgcgcatattgcagctgccaagttcgctcctaaccccgagaaccagtcgccgttctgccaggccgtatttgtcatgtccagaccctatccgacgaggaacgcatttttattagacacttttttggagcacaagatcgaaaatgagagattaagacgccgaattgcagagcttcgaagggaagaggaggaagacgaagaggcttctcaactaagctatcttctagagagccggtcagatgcggcgcaatcagaggacaccatgatgtctaattcccagggccaccctatgctatcccattccaattcactgtccgatgcccaagctatgccaccaccggaacgaccgttgaatatcgcattaacgagagagaacctagaaggagttgcaggcagcagaccagattctatcggagataagatggcccgatacgaggggtcacataccgacaccattgagatgctgactggtctacgatacttggaaggcgagcgaagccgcggtattaccaccggaggttcaagcccgacattaattaaaggcgatgctgggattgctattcctgtcgatcgcgatccgaaaactggcgagaaaaagaagaagttgaagatagcagaggaatatgtgtgtacagactgcggcacactagattcgccggagtggcggaaaggacccagcggtccaaaaacattatgcaatgcttgcggtttaagatgggccaaaaaggagaaaaagaggaacgcttcggggtccggcaccggtcaccaggctccatcacttcctaccggcgacagtgtgtga

SEQ ID NO: 1276 - protein, 482 aa, Muscodor strobelii
  misc_feature: SGI Peptide ID NO. 560023
  misc_feature (426)..(461): Pfam Id: PF00320 Pfam Desc: GATA zinc finger
  misc_feature (147)..(232): Pfam Id: PF08447 Pfam Desc: PAS fold
  misc_feature (147)..(216): Pfam Id: PF08447 Pfam Desc: PAS fold
  misc_feature (23)..(474): NCBI GI: 2494694 Blast Desc: CGPB_FUSSO RecName: Full=Cutinase gene palindrome-binding protein; Short=PBP gi|763042|gb|AAA85727.1| cutinase gene palindrome-binding protein [Nectria haematococca]
  misc_feature (1)..(456): NCBI GI: 164428673 Blast Desc: zinc finger white collar 2 protein WC-2 [Neurospora crassa OR74A] gi|157072237|gb|EAA34583.2| zinc finger white collar 2 protein WC-2 [Neurospora crassa OR74A]
  misc_feature (1)..(456): NCBI GI: 2494693 Blast Desc: WC2_NEUCR RecName: Full=White collar 2 protein; Short=WC2 gi|1835159|emb|CAA70336.1| white collar 2 [Neurospora crassa] gi|38636461|emb|CAE81996.1| zinc finger protein white 2
  misc_feature (30)..(465): NCBI GI: 46107654 Blast Desc: CGPB_FUSSO Cutinase gene palindrome-binding protein (PBP) [Gibberella zeae PH-1]
  misc_feature (114)..(470): NCBI GI: 145614598 Blast Desc: MGG_04521 [Magnaporthe grisea 70-15] gi|145021503|gb|EDK05632.1| MGG_04521 [Magnaporthe grisea 70-15]
  misc_feature (117)..(467): NCBI GI: 56130906 Blast Desc: white collar 2 [Hypocrea jecorina]
  misc_feature (9)..(463): NCBI GI: 116182588 Blast Desc: CHGG_01922 [Chaetomium globosum CBS 148.51] gi|88186219|gb|EAQ93687.1| CHGG_01922 [Chaetomium globosum CBS 148.51]
  misc_feature (73)..(482): NCBI GI: 126149257 Blast Desc: blue light regulator 2 [Bipolaris oryzae]
  misc_feature (30)..(430): NCBI GI: 171694912 Blast Desc: protein product [Podospora anserina] gi|170947698|emb|CAP59860.1| protein product [Podospora anserina]
  misc_feature (114)..(482): NCBI GI: 189197017 Blast Desc: cutinase gene palindrome-binding protein [Pyrenophora tritici-repentis Pt-1C-BFP] gi|187980794|gb|EDU47420.1| cutinase gene palindrome-binding protein [Pyrenophora tritici-repentis
  misc_feature: Useful for introducing or modulating the production of volatile compounds
MDPGQPPPNNNFFGFSSPGSMNHMATDNQNDIMSMFDSNMFDGMSMNFDSFGDFSLPQQQFQPVENNETPPQAFAQSDNASRISSNPEDSPMGPPAPMNNGNVGTPAQQSGQMGGALTEFTKRRNWPAKVVEELKDLLHILDAHGRVKYVSPSVSALIGFEPEEIVDTFLRELIHPDDVGTFTSEMNECIATGNPFRMFYRIRKKDHQYGIFESVGHAHIAAAKFAPNPENQSPFCQAVFVMSRPYPTRNAFLLDTFLEHKIENERLRRRIAELRREEEEDEEASQLSYLLESRSDAAQSEDTMMSNSQGHPMLSHSNSLSDAQAMPPPERPLNIALTRENLEGVAGSRPDSIGDKMARYEGSHTDTIEMLTGLRYLEGERSRGITTGGSSPTLIKGDAGIAIPVDRDPKTGEKKKKLKIAEEYVCTDCGTLDSPEWRKGPSGPKTLCNACGLRWAKKEKKRNASGSGTGHQAPSLPTGDSV

SEQ ID NO: 1277 - DNA, 4052 bp, Muscodor strobelii
  misc_feature: SGI EST ID NO. CUFF.3784.2
  misc_feature: Variant of the nucleotide sequence at SEQ ID NO 1275
gtcggtctccagtcggcccatagcaatgggcccctcgctccccctgatgacggaagccatccgaagattctgacgtagtcgcatcgcgtagtgagagaaacgtcgcttccaatgaatggtcccgacgagccgactgctccagcttcgcttgacgtcgtctctgatcgtctggctgactgatagacgcaccacgagccagagcccgaagagccccagctctgggcaaccagaaggagcatcgtcgtgcagtagtagccgcgagtggtagttcggcgacgatcaatcacagcccgcacaccctggcaatctcggcctgaggccctggcatcctggagcggtacctccccagccaggaaaggatcaggcaaattgaagcagagctagaccacacagtagtgtggcaacacaagcacagaatcccgtaccagacattggcagacaatccggttccactctggactatcgagaaggtgaaatcccatctttacgaaaataacccccatttcaccaagagtcaatcccacccatcatcatcatcccccatcctcgaggacaagttcaggccaaacacaggccaaaccgcgcactcgctacacccgacgacgggcggcgaatacaacggcaacattcggcgtggattcggtgtaccaggatatctgtccccagcagtaggagcgaatgcgcacggccagatgcagcacagctccgggcgcatttgtcgacagcgctgcctcccgtaatcgaaccgctgtggtgagaccgccaccacagcccacgctgccgccctcagcagcactcacccgcaccgcaccgcccgccgtccactatcgctatcagccatggaccctggacaaccaccacccaacaacaacttctttgggttctccagccccggctccatgaaccacatggccacagacaatcaaaatgacatcatgtccatgtttgatagcaacatgttcgatggcatgtccatgaactttgacagcttcggtgacttttcgcttcctcagcagcagtttcagcccgtcgagaacaatgagacaccgcctcaggccttcgcgcagtccgacaacgcgtcgcggatatcttccaaccccgaagacagtcccatgggcccacctgcacccatgaacaacggcaatgtgggcacaccagcgcagcagtcagggcagatgggcggcgcattgactgagttcacgaaacggaggaactggcccgctaaagtggtggaggagctcaaagatctactccacatattggacgctcacggtcgcgtcaagtatgtatcgccaagcgtctcggcgctaattggctttgagcctgaagagattgtagacacatttctgagagagcttattcaccccgacgatgtagggaccttcacatctgagatgaacgagtgcatagccacgggcaacccgtttcgcatgttttatcgaataaggaagaaagatcatcaatatggcatttttgagtctgttggccatgcgcatattgcagctgccaagttcgctcctaaccccgagaaccagtcgccgttctgccaggccgtatttgtcatgtccagaccctatccgacgaggaacgcatttttattagacacttttttggagcacaagatcgaaaatgagagattaagacgccgaattgcagagcttcgaagggaagaggaggaagacgaagaggcttctcaactaagctatcttctagagagccggtcagatgcggcgcaatcagaggacaccatgatgtctaattcccagggccaccctatgctatcccattccaattcactgtccgatgcccaagctatgccaccaccggaacgaccgttgaatatcgcattaacgagagagaacctagaaggagttgcaggcagcagaccagattctatcggagataagatggcccgatacgaggggtcacataccgacaccattgagatgctgactggtctacgatacttggaaggcgagcgaagccgcggtattaccaccggaggttcaagcccgacattaattaaaggcgatgctgggattgctattcctgtcgatcgcgatccgaaaactggcgagaaaaagaagaagttgaagatagcagaggaatatgtgtgtacagactgcggcacactagattcgccggagtggcggaaaggacccagcggtccaaaaacattatgcaatgcttgcggtttaagatgggccaaaaaggagaaaaagaggaacgcttcggggtccggcaccggtcaccaggctccatcacttcctaccggcgacagtgtgtgaggcataagattttatttaccagcatcagactcgctccaggtagactttcggtagatctgtgcgatttgcggcgttcatgcggcgggttgcttttgggaaggagcgccattgtacaaggtcagttcaagcaagggtgtcgggcattaaaatgtacaacgaggctgatgatttctctctcttcggttccatcatgacagcctggaatgatttttttccttctacatttcgtaacgatatatttactcttggaatgattccgagctacaatcttcatgaatctcggttggggcggcagcattggtttgggtaaagaggatacatctcacaggcaacaaggttcgagatgggttgattttgagggagttatataccatatctagattcgattttaggaagaatcaaaatcggcgttttgtttacgatgcatatatgtttttggccactacggcatgatattttgaatacaacaaaacattgctttaggattgcatatgatatacaacaacatcaagatatatcaacaacgcatcatccctagagtttaaaccgcgcctgtgtcaatcagagcttactcttaggatacaaaaacttgctctcatcattctgcgtgtcccaccatggccaattcgtaggcttatcatcttcccacgtcgcgctaaacttgggctctctcttctccaggaaactcttaattccctcgacactgtccttgcccctaaacagatcgaagaacaccctactctccagcaagaatgcctcttcgggacttgcaggggcgccagcatacatcatgtctttcatggcgcggatcgagaccgtgcttgttttctccgcgagttcagtggcgagttccacggcccggggtatgacggcctcgggagcgactacttctgcgaagagatcccgcacgtatggggaggtggcgggatatacaccacctgtcgtgagtaaagtgagagctttccccgaaccgaggatccggggaaggaagaatgaggaacaggcttctgtgtttattccacgacgcgagaaaacaaagccgattttcgcgccggccgatgcgatgcggatgttgcacgggagcgtcatggtgattcctacaccgaccgctgaaccgttcaaagcggcgatgacgggtttagaacaccggtagatcgctaggctgacttgtgcgccgccgtcgcggtaggattctttggcctttcgcacttcggcggttaaggggccggagatcttggagttcgctccgagggagagagaaccgattccggcgccgccggaagaggatgaggcggcgtctagatccatgcctggacagaagatcttgttgttggggtctgacgaggtgaatactatggcttttactcgcgggtcggaggatagagtgttgaaggctgacacgagtgaggttaccatgatgtctgtgaatgcatttttggctttgggtcggtctagacgtaggattatgacgggtgttgctgttgcggcggtggccggtacgtgctggaaggagagttgggggagggaggtatatgttgcgtatgaagaggggggttgagatgccatgttgagtgttttgtggtgatgctttgcttgaggcgtttgggttgatgtgatgagaatgtgatgaaataataagtaagtcgtaagtcctggtgtccttcaactaagtggcaggttatcaattgatttatatatttgacttcgacaattctcaatcgtagtgacgtgcgttaaaggcattcgagatatggagcaagtctg

SEQ ID NO: 1278 - DNA, 1005 bp, Muscodor strobelii
  misc_feature: SGI cDNA ID NO. 560024
  misc_feature: Encodes the peptide sequence at SEQ ID NO 1279
atggcatctcaacccccctcttcatacgcaacatatacctccctcccccaactctccttccagcacgtaccggccaccgccgcaacagcaacacccgtcataatcctacgtctagaccgacccaaagccaaaaatgcattcacagacatcatggtaacctcactcgtgtcagccttcaacactctatcctccgacccgcgagtaaaagccatagtattcacctcgtcagaccccaacaacaagatcttctgtccaggcatggatctagacgccgcctcatcctcttccggcggcgccggaatcggttctctctccctcggagcgaactccaagatctccggccccttaaccgccgaagtgcgaaaggccaaagaatcctaccgcgacggcggcgcacaagtcagcctagcgatctaccggtgttctaaacccgtcatcgccgctttgaacggttcagcggtcggtgtaggaatcaccatgacgctcccgtgcaacatccgcatcgcatcggccggcgcgaaaatcggctttgttttctcgcgtcgtggaataaacacagaagcctgttcctcattcttccttccccggatcctcggttcggggaaagctctcactttactcacgacaggtggtgtatatcccgccacctccccatacgtgcgggatctcttcgcagaagtagtcgctcccgaggccgtcataccccgggccgtggaactcgccactgaactcgcggagaaaacaagcacggtctcgatccgcgccatgaaagacatgatgtatgctggcgcccctgcaagtcccgaagaggcattcttgctggagagtagggtgttcttcgatctgtttaggggcaaggacagtgtcgagggaattaagagtttcctggagaagagagagcccaagtttagcgcgacgtgggaagatgataagcctacgaattggccatggtgggacacgcagaatgatgagagcaagtttttgtatcctaagagtaagctctga

SEQ ID NO: 1279 - protein, 334 aa, Muscodor strobelii
  misc_feature: SGI Peptide ID NO. 560024
  misc_feature (34)..(229): Pfam Id: PF00378 Pfam Desc: Enoyl-CoA hydratase/isomerase family
  misc_feature (137)..(215): Pfam Id: PF00378 Pfam Desc: Enoyl-CoA hydratase/isomerase family
  misc_feature (34)..(89): Pfam Id: PF00378 Pfam Desc: Enoyl-CoA hydratase/isomerase family
  misc_feature (2)..(327): NCBI GI: 261358694 Blast Desc: enoyl-CoA hydratase [Verticillium albo-atrum VaMs.102]
  misc_feature (1)..(318): NCBI GI: 46107642 Blast Desc: FG00704.1 [Gibberella zeae PH-1]
  misc_feature (6)..(318): NCBI GI: 256735471 Blast Desc: [Nectria haematococca mpVI 77-13-4]
  misc_feature (6)..(318): NCBI GI: 156040437 Blast Desc: SS1G_12235 [Sclerotinia sclerotiorum 1980] gi|154696291|gb|EDN96029.1| SS1G_12235 [Sclerotinia sclerotiorum 1980]
  misc_feature (5)..(319): NCBI GI: 258578345 Blast Desc: Akt3-1 protein [Uncinocarpus reesii 1704] gi|237903620|gb|EEP78021.1| Akt3-1 protein [Uncinocarpus reesii 1704]
  misc_feature (1)..(318): NCBI GI: 225677698 Blast Desc: enoyl-CoA hydratase/isomerase family protein [Paracoccidioides brasiliensis Pb03]
  misc_feature (1)..(318): NCBI GI: 226278676 Blast Desc: enoyl-CoA hydratase/isomerase family protein [Paracoccidioides brasiliensis Pb01]
  misc_feature (3)..(326): NCBI GI: 169777829 Blast Desc: [Aspergillus oryzae RIB40] gi|238495058|ref|XP_002378765.1| conserved [Aspergillus flavus NRRL3357] gi|83772117|dbj|BAE62247.1| protein product oryzae]
  misc_feature (4)..(318): NCBI GI: 238837526 Blast Desc: enoyl-CoA hydratase/isomerase family protein [Microsporum canis CBS 113480]
  misc_feature (6)..(319): NCBI GI: 240108705 Blast Desc: enoyl-CoA hydratase/isomerase family protein [Coccidioides posadasii C735 delta SOWgp]
  misc_feature (33)..(309): SWISSPROT Homolog: EC 4.2.1.17 Enoyl-CoA hydratase
MASQPPSSYATYTSLPQLSFQHVPATAATATPVIILRLDRPKAKNAFTDIMVTSLVSAFNTLSSDPRVKAIVFTSSDPNNKIFCPGMDLDAASSSSGGAGIGSLSLGANSKISGPLTAEVRKAKESYRDGGAQVSLAIYRCSKPVIAALNGSAVGVGITMTLPCNIRIASAGAKIGFVFSRRGINTEACSSFFLPRILGSGKALTLLTTGGVYPATSPYVRDLFAEVVAPEAVIPRAVELATELAEKTSTVSIRAMKDMMYAGAPASPEEAFLLESRVFFDLFRGKDSVEGIKSFLEKREPKFSATWEDDKPTNWPWWDTQNDESKFLYPKSKL

SEQ ID NO: 1280 - DNA, 4302 bp, Muscodor strobelii
  misc_feature: SGI EST ID NO. CUFF.3785.3
  misc_feature: Variant of the nucleotide sequence at SEQ ID NO 1278
tgagcttctaatcaattatactcaattgaatagtttgatatttggctgcacgttttagaagagaattagtctgcccgcagtatcctaggcgctactaccacttcacacccatacttgctccatatctcgaatgcctttaacgcacgtcactacgattgagaattgtcgaagtcaaatatataaatcaattgataacctgccacttagttgaaggacaccaggacttacgacttacttattatttcatcacattctcatcacatcaacccaaacgcctcaagcaaagcatcaccacaaaacactcaacatggcatctcaacccccctcttcatacgcaacatatacctccctcccccaactctccttccagcacgtaccggccaccgccgcaacagcaacacccgtcataatcctacgtctagaccgacccaaagccaaaaatgcattcacagacatcatggtaacctcactcgtgtcagccttcaacactctatcctccgacccgcgagtaaaagccatagtattcacctcgtcagaccccaacaacaagatcttctgtccaggcatggatctagacgccgcctcatcctcttccggcggcgccggaatcggttctctctccctcggagcgaactccaagatctccggccccttaaccgccgaagtgcgaaaggccaaagaatcctaccgcgacggcggcgcacaagtcagcctagcgatctaccggtgttctaaacccgtcatcgccgctttgaacggttcagcggtcggtgtaggaatcaccatgacgctcccgtgcaacatccgcatcgcatcggccggcgcgaaaatcggctttgttttctcgcgtcgtggaataaacacagaagcctgttcctcattcttccttccccggatcctcggttcggggaaagctctcactttactcacgacaggtggtgtatatcccgccacctccccatacgtgcgggatctcttcgcagaagtagtcgctcccgaggccgtcataccccgggccgtggaactcgccactgaactcgcggagaaaacaagcacggtctcgatccgcgccatgaaagacatgatgtatgctggcgcccctgcaagtcccgaagaggcattcttgctggagagtagggtgttcttcgatctgtttaggggcaaggacagtgtcgagggaattaagagtttcctggagaagagagagcccaagtttagcgcgacgtgggaagatgataagcctacgaattggccatggtgggacacgcagaatgatgagagcaagtttttgtatcctaagagtaagctctgattgacacaggcgcggtttaaactctagggatgatgcgttgttgatatatcttgatgttgttgtatatcatatgcaatcctaaagcaatgttttgttgtattcaaaatatcatgccgtagtggccaaaaacatatatgcatcgtaaacaaaacgccgattttgattcttcctaaaatcgaatctagatatggtatataactccctcaaaatcaacccatctcgaaccttgttgcctgtgagatgtatcctctttacccaaaccaatgctgccgccccaaccgagattcatgaagattgtagctcggaatcattccaagagtaaatatatcgttacgaaatgtagaaggaaaaaaatcattccaggctgtcatgatggaaccgaagagagagaaatcatcagcctcgttgtacattttaatgcccgacacccttgcttgaactgaccttgtacaatggcgctccttcccaaaagcaacccgccgcatgaacgccgcaaatcgcacagatctaccgaaagtctacctggagcgagtctgatgctggtaaataaaatcttatgcctcacacactgtcgccggtaggaagtgatggagcctggtgaccggtgccggaccccgaagcgttcctctttttctcctttttggcccatcttaaaccgcaagcattgcataatgtttttggaccgctgggtcctttccgccactccggcgaatctagtgtgcctgcagagacgaattatatgagccgttggttcagcgaagctggataccgagacacttaccgcagtctgtacacacatattcctctgctatcttcaacttcttctttttctcgccagttttcggatcgcgatcgacaggaatagcaatcccagcatcgcctttaattaatgtcgggcttgaacctccggtggtaataccgcggcttcgctcgccttccaagtatcgtagaccagtcagcatctcaatggtgtcggtatgtgacccctcgtatcgggccatcttatctccgatagaatctggtctgctgcctgcaactccttctaggttctctctcgttaatgcgatattcaacggtcgttccggtggtggcatagcttgggcatcggacagtgaattggaatgggatagcatagggtggccctgggaattagacatcatggtgtcctctgattgcgccgcatctgaccggctctctagaagatagcttagttgagaagcctcttcgtcttcctcctcttcccttcgaagctctgcaattcggcgtcttaatctctcattttcgatcttgtgctccaaaaaagtgtctaataaaaatgcgttcctcgtcggatagggtctggacatgacaaatacggcctggcagaacggcgactggttctcggggttaggagcgaacttggcagctgcaatatgcgcatggccaacagactcaaaaatgccatattgatgatctttcttccttattcgataaaacatgcgaaacgggttgcccgtggctatgcactcgttcatctcagatgtgaaggtccctacatcgtcggggtgaataagctctctcagaaatgtgtctacaatctcttcaggctcaaagccaattagcgccgagacgcttggcgatacatacttgacgcgaccgtgagcgtccaatatgtggagtagatctttgagctcctccaccactttagcgggccagttcctccgtttcgtgaactcagtcaatgcgccgcccatctgccctgactgctgcgctggtgtgcccacattgccgttgttcatgggtgcaggtgggcccatgggactgtcttcggggttggaagatatccgcgacgcgttgtcggactgcgcgaaggcctgaggcggtgtctcattgttctcgacgggctgaaactgctgctgaggaagcgaaaagtcaccgaagctgtcaaagttcatggacatgccatcgaacatgttgctatcaaacatggacatgatgtcattttgattgtctgtggccatctggaggggcagttacgtccatgtcagagtgcgaatcctaacatgcgagcagatgcatacaaaggagatttaatgggcatacgtggttcatggagccggggctggagaacccaaagaagttgttgttgggtggtggttgtccagggtccatggctgatagcgatagtggacggcgggcggtgcggtgcgggtgagtgctgctgagggcggcagcgtgggctgtggtggcggtctcaccacagcggttcgattacgggaggcagcgctgtcgacaaatgcgcccggagctgtgctgcatctggccgtgcgcattcgctcctactgctggggacagatatcctggtacaccgaatccacgccgaatgttgccgttgtattcgccgcccgtcgtcgggtgtagcgagtgcgcggtttggcctgtgtttggcctgaacttgtcctcgaggatgggggatgatgatgatgggtgggattgactcttggtgaaatgggggttattttcgtaaagatgggatttcaccttctcgatagtccagagtggaaccggattgtctgccaatgtctggtacgggattctgtgcttgtgttgccacactactgtgtggtctagctctgcttcaatttgcctgatcctttcctggctggggaggtaccgctccaggatgccagggcctcaggccgagattgccagggtgtgcgggctgtgattgatcgtcgccgaactaccactcgcggctactactgcacgacgatgctccttctggttgcccagagctggggctcttcgggctctggctcgtggtgcgtctatcagtcagccagacgatcagagacgacgtcaagcgaagctggagcagtcggctcgtcgggaccattcattggaagcgacgtttctctcactacgcgatgcgactacgtcagaatcttcggatggcttccgtcatcagggggagcgaggggcccattgctatgggccgactggagaccgac

SEQ ID NO: 1281 - DNA, 546 bp, Muscodor strobelii
  misc_feature: SGI cDNA ID NO. 560025
  misc_feature: Elevated expression when VOC is produced
  misc_feature: Encodes the peptide sequence at SEQ ID NO 1282
atggacaagcttcaagatttccttggcggcggtaataaaacccatggcggttcataccccgctggatatgacgacgacttctctggcgcagctgagcatgctagcaagcatgccggcagctctggtgacaccgatcttttctccaatattctaggcgctctcggagagaagaagcagaaaattgccgacgaagaccttgacgaggaagaggctgtccgagctcatcgcaagcactttgagggaggcgatgacggtagcgaggctgattccaaatccattggcgctggcgccgctatgcaagctctgaaaatgttcagcagtggctctggcggaagccagagcaagagcgagtttatcggtctcgccatgagcgaagccagcaagctgtttgatgagaaagcttcaaaggggcaggtcactggtgatagcgacaagcagtctgccgtcatgcaagcaggagagatggccctgaagatgtacctgaagagccagggaagccagggcggttcttccggactcctcggcctcgcatctaaattcatgtag

SEQ ID NO: 1282 - protein, 181 aa, Muscodor strobelii
  misc_feature: SGI Peptide ID NO. 560025
  misc_feature (26)..(181): NCBI GI: 256735473 Blast Desc: NECHADRAFT_75348 [Nectria haematococca mpVI 77-13-4]
  misc_feature (24)..(181): NCBI GI: 46107652 Blast Desc: FG00709.1 [Gibberella zeae PH-1]
  misc_feature (18)..(181): NCBI GI: 39945080 Blast Desc: MGG_04522 [Magnaporthe grisea 70-15] gi|145021501|gb|EDK05630.1| MGG_04522 [Magnaporthe grisea 70-15]
  misc_feature (4)..(181): NCBI GI: 70983678 Blast Desc: AFUA_8G05650 [Aspergillus fumigatus Af293] gi|66844992|gb|EAL85328.1| AFUA_8G05650 [Aspergillus fumigatus Af293] gi|159123629|gb|EDP48748.1| AFUB_081900 [Aspergillus
  misc_feature (4)..(181): NCBI GI: 259486883 Blast Desc: TPA: conserved [Aspergillus nidulans FGSC A4]
  misc_feature (24)..(164): NCBI GI: 154299857 Blast Desc: BC1G_10819 [Botryotinia fuckeliana B05.10] gi|150857099|gb|EDN32291.1| BC1G_10819 [Botryotinia fuckeliana B05.10]
  misc_feature (24)..(168): NCBI GI: 85111192 Blast Desc: NCU00903 [Neurospora crassa OR74A] gi|28925558|gb|EAA34584.1| [Neurospora crassa OR74A] gi|38636460|emb|CAE81995.1| [Neurospora crassa]
  misc_feature (30)..(181): NCBI GI: 119484932 Blast Desc: NFIA_098410 [Neosartorya fischeri NRRL 181] gi|119410264|gb|EAW20211.1| [Neosartorya fischeri NRRL 181]
  misc_feature (24)..(181): NCBI GI: 121719944 Blast Desc: ACLA_059070 [Aspergillus clavatus NRRL 1] gi|119404882|gb|EAW15244.1| ACLA_059070 [Aspergillus clavatus NRRL 1]
  misc_feature (25)..(181): NCBI GI: 169603305 Blast Desc: SNOG_04661 [Phaeosphaeria nodorum SN15] gi|111067301|gb|EAT88421.1| SNOG_04661 [Phaeosphaeria nodorum SN15]
  misc_feature: Useful for introducing or modulating the production of volatile compounds
MDKLQDFLGGGNKTHGGSYPAGYDDDFSGAAEHASKHAGSSGDTDLFSNILGALGEKKQKIADEDLDEEEAVRAHRKHFEGGDDGSEADSKSIGAGAAMQALKMFSSGSGGSQSKSEFIGLAMSEASKLFDEKASKGQVTGDSDKQSAVMQAGEMALKMYLKSQGSQGGSSGLLGLASKFM

SEQ ID NO: 1283 - DNA, 1684 bp, Muscodor strobelii
  misc_feature: SGI EST ID NO. CUFF.3525.0
  misc_feature: Variant of the nucleotide sequence at SEQ ID NO 1281
gctccagcgaagtgtgcaattgtgctcggaccagtgattgaaaagccaagaaattcaacggcttaggatgccgaaaaggcacgtgctatagagaatttttgagaggcagtcattggtagcttcactggcgtcatgattggtcttgagaaagcagcgggttgtggagagatacataattgtaggatgttttgaaaacaacaagatgctcatgtatgttgagttgattggcagatttagacccctctatgaaacaatgaagctgccccgcacacgtcatccagtgcctcagctgtgtcacatagcttcacagatcattgtgagtaggcaacacttaaacttcataaatcaacttccaggtcccagcacaaatttgacgtgcatcagaattaatttgagcactacataaaccttttcgatcgcgagaccttcatcactcaccataatggacaagcttcaagatttccttggcggcggtaataaaacccatggcggttcataccccgctggatatgacgacgacttctctggcgcagctgagcatgctagcaagcatgccggcagctctggtgacaccgatcttttctccaatattctaggcgctctcggagagaagaagcagaaaattgccgacgaagaccttgacgaggaagaggctgtccgagctcatcgcaagcactttgagggaggcgatgacggtagcgaggctgattccaaatccattggcgctggcgccgctatgcaagctctgaaaatgttcagcagtggctctggcggaagccagagcaagagcgagtttatcggtctcgccatgagcgaagccagcaagctgtttgatgagaaagcttcaaaggggcaggtcactggtgatagcgacaagcagtctgccgtcatgcaagcaggagagatggccctgaagatgtacctgaagagccagggaagccagggcggttcttccggactcctcggcctcgcatctaaattcatgtagagttatcagcttcgctattccagctaggtcgcgagttccagtgacatcttacgtgtgagatgttgatgaatgaatgcaatcagatctgagtttggaagctcagaagcctctgcagatgctccaagggttttccaaatatttgacaaaaatgatcacaggcaatcaacctatctatgaacatatgttcgcgtgcctaataacttcgtacacatttcttcagcgctgactttatcttagcaaccactcagatgctgccaacatgttattcaacgctaactggccgagccttgttccaaatggctgatttatcgcagaatccactctcggcaatgaggagtaccatgattactattcatcgtagcggcgaaataattgacgatacctgcagctttccgcattcatacagctttcaggttgagcctcggcaatgtaccccaatctcgatccccacatctacgttcgaggcaggcatttagccctccctaggcgatttggcaatttctcagcgctgaagtgataatgatttcaactctcttacaggacggccgctcagaacgatctgagagagtaaaagacatgttagacattaatgacttgtgtctccggccttgttgtctacagcaagatgcgcaatcggccatggccgatgttcttcccaccttttccctgggatcgattgtaaaaacttaattatca

SEQ ID NO: 1284 - DNA, 687 bp, Muscodor strobelii
  misc_feature: SGI cDNA ID NO. 560026
  misc_feature: Elevated expression when VOC is produced
  misc_feature: Encodes the peptide sequence at SEQ ID NO 1285
atgaaggcaacaatcgctactatcatgtttgtgttcgctgtcgcttcggaagcgtacccacgagcgatacgaacgacacacattccagcattgaagccaagtcaaatgagatggaattcattggattattccaaacataattggactcttcaaggaactgttcaggagatcgagatgcaaattcgcgtaaaggaaaatgctcctgacttcaactacgcagacgataatagccagaatccccttccagcgcaaggggcttgtgagggtgctttttactgcgagattggacagccagctccaattacatatatgtctggcctggctgttcagcttcaaaagggtcccgctggcgcacaatgctcgataggtttccaatcttgcgctgccgtctccttgcccgctccggaccaaatagattcgactgcgatatacatgtgtaatcctaccaacgtcaccgccacgatgctttgtagtgatatcggatatcgcgttgatgaaatccttaattcttgcggcgactcttctaccacctcacacggagtgttctcttctcaacgcttgactgagggagacaaacctaagcagcccagctactcatatcccactagaaggagccctcttatccttacagagcctttcattgttgcaactggggacggatacaatcctgtggtcaacttttcgtaa

SEQ ID NO: 1285 - protein, 228 aa, Muscodor strobelii
  misc_feature: SGI Peptide ID NO. 560026
  misc_feature: Useful for introducing or modulating the production of volatile compounds
MKATIATIMFVFAVASEAYPRAIRTTHIPALKPSQMRWNSLDYSKHNWTLQGTVQEIEMQIRVKENAPDFNYADDNSQNPLPAQGACEGAFYCEIGQPAPITYMSGLAVQLQKGPAGAQCSIGFQSCAAVSLPAPDQIDSTAIYMCNPTNVTATMLCSDIGYRVDEILNSCGDSSTTSHGVFSSQRLTEGDKPKQPSYSYPTRRSPLILTEPFIVATGDGYNPVVNFS

SEQ ID NO: 1286 - DNA, 1041 bp, Muscodor strobelii
  misc_feature: SGI EST ID NO. CUFF.3528.0
  misc_feature: Variant of the nucleotide sequence at SEQ ID NO 1284
atcagttctctcagcaaaccaaactcaccttccaactctttcctgtgtttttcctttgtatttccatttgtctctcaacatttcaaatcaactcaaaaaaaaaattctattctctatattaattatttctcaatttgtcaagatgaaggcaacaatcgctactatcatgtttgtgttcgctgtcgcttcggaagcgtacccacgagcgatacgaacgacacacattccagcattgaagccaagtcaaatgagatggaattcattggattattccaaacataattggactcttcaaggaactgttcaggagatcgagatgcaaattcgcgtaaaggaaaatgctcctgacttcaactacgcagacgataatagccagaatccccttccagcgcaaggggcttgtgagggtgctttttactgcgagattggacagccagctccaattacatatatgtctggcctggctgttcagcttcaaaagggtcccgctggcgcacaatgctcgataggtttccaatcttgcgctgccgtctccttgcccgctccggaccaaatagattcgactgcgatatacatgtgtaatcctaccaacgtcaccgccacgatgctttgtagtgatatcggatatcgcgttgatgaaatccttaattcttgcggcgactcttctaccacctcacacggagtgttctcttctcaacgcttgactgagggagacaaacctaagcagcccagctactcatatcccactagaaggagccctcttatccttacagagcctttcattgttgcaactggggacggatacaatcctgtggtcaacttttcgtaaatgtctggttgcgttcatatgctccattccggctgaaagagttcttttgggaaaggtctaaaccaccagtttcgtgcatgagataatattgacactttggcgtttttctgttctcaaggtgtccagttgctgtgtcttcttagaatggaggtgtttgggtaattattttggcacaattaaatcattttggaatactattttcataactccca

SEQ ID NO: 1287 - DNA, 471 bp, Muscodor strobelii
  misc_feature: SGI cDNA ID NO. 560027
  misc_feature: Encodes the peptide sequence at SEQ ID NO 1288
atggcgcccaacaccgcatcccttctgcccttgatcccacgaatcttcttcgtgtacatcgagccagtttgcataacctacggtgcgatgatgcaatacgctacctcccatgagctcttctcactctcatcatcgtcttcgtctcctctctccatcccagcgctggttgtgccgggtctttcagcaacttatctcttcagcatgatgctatacggcctcatgatcctactcgcaacgccaccaagcaagagccttctgaagctacacatttgggtcctggtcattgccgattttacccattgggctgccttactgactacaattgctcgaaatgaccctcgaggttgggctgcgatattcgacacgaagggtatggacccagacacttggcaattgctcacatatcccattggcactttattcatcaagttcgcaacgcttcttggcttgtttggccaaatcaagggctga

SEQ ID NO: 1288 - protein, 156 aa, Muscodor strobelii
  misc_feature: SGI Peptide ID NO. 560027
MAPNTASLLPLIPRIFFVYIEPVCITYGAMMQYATSHELFSLSSSSSSPLSIPALVVPGLSATYLFSMMLYGLMILLATPPSKSLLKLHIWVLVIADFTHWAALLTTIARNDPRGWAAIFDTKGMDPDTWQLLTYPIGTLFIKFATLLGLFGQIKG

SEQ ID NO: 1289 - DNA, 973 bp, Muscodor strobelii
  misc_feature: SGI EST ID NO. CUFF.3546.0
  misc_feature: Variant of the nucleotide sequence at SEQ ID NO 1287
tttggctccttcatttatatcaactcaagcgcattcaccaatcgtgttttcttcatcatacttcattctcaaatatcttcagtagttttcatttgtgatctaaggaacaacatggcgcccaacaccgcatcccttctgcccttgatcccacgaatcttcttcgtgtacatcgagccagtttgcataacctacggtgcgatgatgcaatacgctacctcccatgagctcttctcactctcatcatcgtcttcgtctcctctctccatcccagcgctggttgtgccgggtctttcagcaacttatctcttcagcatgatgctatacggcctcatgatcctactcgcaacgccaccaagcaagagccttctgaagctacacatttgggtcctggtcattgccgattttacccattgggctgccttactgactacaattgctcgaaatgaccctcgaggttgggctgcgatattcgacacgaagggtatggacccagacacttggcaattgctcacatatcccattggcactttattcatcaagttcgcaacgcttcttggcttgtttggccaaatcaagggctgaacgagaatggagatatctatcacgaaagggggggcgggtgggggagatagtcactatcaatgtagaaagacacagtggtccagtgtagacaagggcaactagggtcatatgtggattttgctacgcctcgcaacttcaattctcgctcccggtcagcttttacaactcccaaagcgaaacttgtggacatcgaaagaatatgacccagtgtgctcattctcgaccaccccaggacgaccataagcacgattagatagtagcaaggtctcgaattgatagaagaatgtttcccatattgctcttcaatgcggctaaggccattgttggcccaagcaatcctgcaacataggaaaaagatcagacatcaatgacacggccttttcttcctcca

SEQ ID NO: 1290 - DNA, 318 bp, Muscodor strobelii
  misc_feature: SGI cDNA ID NO. 560028
  misc_feature: Encodes the peptide sequence at SEQ ID NO 1291
atgtccagctacgagaacgaagctccctccggccaggtcgccgatgagtcttacgtcagccgtccaggacataagggcgaggagattcctgttgtttctgaccaagagcgcatcgaagacccaattgatggggccaaggccgactctgacgagcaacttgttcgtgacgataatgaagccatcgatgagtccaacattctcgacgagcgaactcgtggtgctagccagcccaagggtacctaccgtgagcctggtgacgaggagggcctccctaccgatgatggaacgagctcggctgatgtaaagtctgctgaataa

SEQ ID NO: 1291 - protein, 105 aa, Muscodor strobelii
  misc_feature: SGI Peptide ID NO. 560028
  misc_feature (1)..(99): NCBI GI: 46124415 Blast Desc: FG06585.1 [Gibberella zeae PH-1]
  misc_feature (3)..(98): NCBI GI: 256726518 Blast Desc: NECHADRAFT_93021 [Nectria haematococca mpVI 77-13-4]
  misc_feature (3)..(97): NCBI GI: 261354797 Blast Desc: [Verticillium albo-atrum VaMs.102]
  misc_feature (2)..(88): NCBI GI: 85077996 Blast Desc: NCU08770 [Neurospora crassa OR74A] gi|28881218|emb|CAD70457.1| [Neurospora crassa] gi|28917137|gb|EAA26855.1| [Neurospora crassa OR74A]
  misc_feature (1)..(99): NCBI GI: 189204606 Blast Desc: conserved [Pyrenophora tritici-repentis Pt-1C-BFP] gi|187985737|gb|EDU51225.1| conserved [Pyrenophora tritici-repentis Pt-1C-BFP]
  misc_feature (9)..(98): NCBI GI: 169610021 Blast Desc: SNOG_08103 [Phaeosphaeria nodorum SN15] gi|111063259|gb|EAT84379.1| SNOG_08103 [Phaeosphaeria nodorum SN15]
  misc_feature (14)..(99): NCBI GI: 171691410 Blast Desc: protein product [Podospora anserina] gi|170945653|emb|CAP71766.1| protein product [Podospora anserina]
  misc_feature (7)..(90): NCBI GI: 116208616 Blast Desc: CHGG_03601 [Chaetomium globosum CBS 148.51] gi|88184198|gb|EAQ91666.1| CHGG_03601 [Chaetomium globosum CBS 148.51]
  misc_feature (10)..(91): NCBI GI: 145253809 Blast Desc: An17g01885 [Aspergillus niger] gi|134083990|emb|CAK49145.1| protein product [Aspergillus niger]
  misc_feature (1)..(69): NCBI GI: 39942646 Blast Desc: MGG_03403 [Magnaporthe grisea 70-15] gi|145009198|gb|EDJ93909.1| [Magnaporthe grisea 70-15]
MSSYENEAPSGQVADESYVSRPGHKGEEIPVVSDQERIEDPIDGAKADSDEQLVRDDNEAIDESNILDERTRGASQPKGTYREPGDEEGLPTDDGTSSADVKSAE

SEQ ID NO: 1292 - DNA, 1377 bp, Muscodor strobelii
  misc_feature: SGI cDNA ID NO. 560029
  misc_feature: Encodes the peptide sequence at SEQ ID NO 1293
atgaagtctgtcgtcgcaggactcgctgccttctcaggcttggcttcggccgcaattcctgtctacggtcagtgtggtggtactggatggtctggcgagacagcatgtgcctcgggctcgtattgccaatatcaaaatgcttgtgcgtactttccaaattttctcttcttccaagcccagccactactcgcaatgcgttccaggggctgctacgaccaccttgaccacctcgacgacgaaggcaaccactacgactacgaaggcaacaaccactacgaaagcaactactactaccaaggccactactaccacaaaagcaaccaccacgaccgggggatcaagtgcaactggttttccggtagcgtcagcggccttcaattcaagattgacggcgagacgggctacttcgcaggtacaaatgcatactggatgagtttcctacaaagcgacgccgatatcgccacggcaatggacaacttgaaagccgccgggctcaagattcttcgtgtatggggattcaacgatgtgaattctgacccaggctctggcacgatatggtatcagctgctctcttcgagtgggtcgactatcaacaccggtgcaaacggccttcagcgtctcgacgcggtcgttaaagcggcagagtcaaggggcatcaagctgatcattccatttgtgaacaattggtctgactacggtggtatcgctgcctacaacaaagccttcggtggcactgcaacatcatggtatacagactctgcctcacaaacgcaatacaaaaagtacattcaagccgtcgtatcgcgctacagctcatcatcggctattttcgcttgggagctcggcaatgagccgcgctgcaatggctgcgcgacatccgtcatcactacttgggctacgggcattgctgcttatattaagtcacttgacaaaaaccacatggtcacttctggtatcgagggtttcggtattgcgactcagactgataatagctatccatttggttactctgagggaaccgactttgaggcactgctcaaggtccccaaccttgattttggaacactccatctgtatcctagctcgtggggtacttcaacagattggggcaatctgtggattaaggctcacggtgctgcctgcgctgctgctggtgtgccttgcttgctagaagaatacggatacccatcgaatcattgcgctatagagagcccttggcaagccacggcacttgcgacaagtggaattgccggcgatttgttctggcagtatggcacgacgcttagctttggtcagacgtccgatgatgggaacaccgtcttcacgggaacatccgattggacttgtttggtgacagatcatgttgcagatatttaa

SEQ ID NO: 1293 - protein, 458 aa, Muscodor strobelii
  misc_feature: SGI Peptide ID NO. 560029
  misc_feature (21)..(49): Pfam Id: PF00734 Pfam Desc: Fungal cellulose binding domain
  misc_feature (128)..(435): Pfam Id: PF00150 Pfam Desc: Cellulase (glycosyl hydrolase family 5)
  misc_feature (21)..(46): Pfam Id: PF00734 Pfam Desc: Fungal cellulose binding domain
  misc_feature (128)..(289): Pfam Id: PF00150 Pfam Desc: Cellulase (glycosyl hydrolase family 5)
  misc_feature (122)..(458): NCBI GI: 212546407 Blast Desc: endo-1,4-beta-mannosidase [Penicillium marneffei ATCC 18224] gi|210064877|gb|EEA18972.1| endo-1,4-beta-mannosidase [Penicillium marneffei ATCC 18224]
  misc_feature (121)..(458): NCBI GI: 255955337 Blast Desc: Pc21g14050 [Penicillium chrysogenum Wisconsin 54-1255] gi|211590132|emb|CAP96302.1| Pc21g14050 [Penicillium chrysogenum Wisconsin 54-1255]
  misc_feature (121)..(458): NCBI GI: 261355398 Blast Desc: mannan endo-1,4-beta-mannosidase [Verticillium albo-atrum VaMs.102]
  misc_feature (121)..(458): NCBI GI: 558311 Blast Desc: mannanase [Aspergillus aculeatus]
  misc_feature (121)..(458): NCBI GI: 115388683 Blast Desc: ATEG_02669 [Aspergillus terreus NIH2624] gi|114195931|gb|EAU37631.1| ATEG_02669 [Aspergillus terreus NIH2624]
  misc_feature (121)..(458): NCBI GI: 242823527 Blast Desc: endo-1,4-beta-mannosidase [Talaromyces stipitatus ATCC 10500] gi|218713002|gb|EED12427.1| endo-1,4-beta-mannosidase [Talaromyces stipitatus ATCC 10500]
  misc_feature (124)..(458): NCBI GI: 84621433 Blast Desc: beta-mannanase [Aspergillus sulphureus]
  misc_feature (124)..(458): NCBI GI: 92090683 Blast Desc: beta-mannanase [synthetic construct]
  misc_feature (119)..(458): NCBI GI: 116195218 Blast Desc: CHGG_04207 [Chaetomium globosum CBS 148.51] gi|88180120|gb|EAQ87588.1| CHGG_04207 [Chaetomium globosum CBS 148.51]
  misc_feature (121)..(458): NCBI GI: 119488588 Blast Desc: endo-1,4-beta-mannosidase [Neosartorya fischeri NRRL 181] gi|119410902|gb|EAW20847.1| endo-1,4-beta-mannosidase [Neosartorya fischeri NRRL 181]
  misc_feature (123)..(363): SWISSPROT Homolog: EC 3.2.1.78 Mannan endo-1,4-beta-mannosidase
MKSVVAGLAAFSGLASAAIPVYGQCGGTGWSGETACASGSYCQYQNACAYFPNFLFFQAQPLLAMRSRGCYDHLDHLDDEGNHYDYEGNNHYESNYYYQGHYYHKSNHHDRGIKCNWFSGSVSGLQFKIDGETGYFAGTNAYWMSFLQSDADIATAMDNLKAAGLKILRVWGFNDVNSDPGSGTIWYQLLSSSGSTINTGANGLQRLDAVVKAAESRGIKLIIPFVNNWSDYGGIAAYNKAFGGTATSWYTDSASQTQYKKYIQAVVSRYSSSSAIFAWELGNEPRCNGCATSVITTWATGIAAYIKSLDKNHMVTSGIEGFGIATQTDNSYPFGYSEGTDFEALLKVPNLDFGTLHLYPSSWGTSTDWGNLWIKAHGAACAAAGVPCLLEEYGYPSNHCAIESPWQATALATSGIAGDLFWQYGTTLSFGQTSDDGNTVFTGTSDWTCLVTDHVADI

SEQ ID NO: 1294 - DNA, 1668 bp, Muscodor strobelii
  misc_feature: SGI cDNA ID NO. 560030
  misc_feature: Elevated expression when VOC is produced
  misc_feature: Encodes the peptide sequence at SEQ ID NO 1295
atggccgatggcaaggaaagtcctcgcgactttcaaggccaatcgactttggagaacggcaccaaagacgtcaaggaagtgtcagtcgttaacgaaagcattgaagtcaatgcctcgggatataaagatcaactgagacgccagtatggtctcttaggtatcgtcggcattgcgcttacggtcgataacgcgtgggcggcgctgggatcttcaatttccgtgtctatcctcaatggaggtccgccaggactgatatatggtctcatcgtcgccatcttctggtattcgttcatcgggctaagtcttgctgagcttgcatcatcagtaccgacggctggaggcgtgtaccactgggcgactatcgctggaggacctaggtatggccggatgctgggattcttcactggctggatcaatttctacggatggatgttcgatcttgccgccctcatccagatcacgtccaatatctccgttcagatgtacgccacttatcaccaggaaacttatgttcccgcggcctggcatgtgtacgttgcatacgttgcgctgatctggatttccggcttattcgttatcttcgcaaaccgacttgtgccggtaacacaaaatctgggaatgttcttcgtcgctgttggcgggtttgtgacgattattgtgctcgcagccaagccaaaagtacatgcctcaaatcattttgtatggggctcattcagcgagaacaacttaactggttggtcgggtggcgttgccttcttaacaggtgtattgaatggagctttcacaattggcacgcctgatgcaattactcatattgcagaagagcttccaaatccgaagaaagacctgccaaaagctattgggcttcagctttcccttggcttcgcctatgccttctttttcgccattgctctaagctacgctatcacagatatctccttactacaaggcggcatcaatacataccctctagcagcaatctaccaacaagcgacggggactgctggaggcacgttcggtctcctcttcattttgtttctcagtagtctatgttgttgtataggcactgttctcacaaactcgcgaacatattgggctctcgcgagagacaatgctgtccccttttcgccacttttcagccaagtcaacgagagcctcagctgtcctgtacctgccaccattttcgtctgcacctttgctactgggcttggagctatacctttgggaagctcaagcgctttcttggctttaacgggatctttcatcgtgctcactacagtgtcatactcaattccatttgcggcgaacttactgaccggccgcaaatatttccctcccggaccgtttcatcttgggaagttcggatatgtgattaactcgacagctatcttgctagttgctttattcgacatcttcttcctcttcccatacgcgttgccgacaacggtggagtcgatgaactataacagtgtgattcttgtgggcatcatcgcagtatcggtcgcctggtggtttctacatgccacgcgacattacccagggccgaaagtcatgcaactctacatccacgatgatagtgcacctctcaacaatactgaattcgaggaaaagcagcgcgagaacccgggtattttgcaagaaggagtagtaaagaacaaggaacaatga

SEQ ID NO: 1295 - protein, 555 aa, Muscodor strobelii
  misc_feature: SGI Peptide ID NO. 560030
  misc_feature (62)..(514): Pfam Id: PF00324 Pfam Desc: Amino acid permease
  misc_feature (71)..(141): Pfam Id: PF00324 Pfam Desc: Amino acid permease
  misc_feature (3)..(555): NCBI GI: 164428494 Blast Desc: NCU00648 [Neurospora crassa OR74A] gi|157072168|gb|EAA36552.2| conserved [Neurospora crassa OR74A]
  misc_feature (6)..(541): NCBI GI: 242782232 Blast Desc: amino acid transporter, [Talaromyces stipitatus ATCC 10500] gi|218720106|gb|EED19525.1| amino acid transporter, [Talaromyces stipitatus ATCC 10500]
  misc_feature (37)..(524): NCBI GI: 212526970 Blast Desc: choline transport protein, [Penicillium marneffei ATCC 18224] gi|210073040|gb|EEA27127.1| choline transport protein, [Penicillium marneffei ATCC 18224]
  misc_feature (13)..(530): NCBI GI: 256729194 Blast Desc: NECHADRAFT_40033 [Nectria haematococca mpVI 77-13-4]
  misc_feature (9)..(516): NCBI GI: 46110653 Blast Desc: FG02208.1 [Gibberella zeae PH-1]
  misc_feature (144)..(541): NCBI GI: 171695004 Blast Desc: protein product [Podospora anserina] gi|170947744|emb|CAP59907.1| protein product [Podospora anserina]
  misc_feature (8)..(520): NCBI GI: 261204703 Blast Desc: choline transporter [Ajellomyces dermatitidis SLH14081] gi|239587350|gb|EEQ69993.1| choline transporter [Ajellomyces dermatitidis SLH14081]
  misc_feature (8)..(520): NCBI GI: 242777985 Blast Desc: choline transport protein, [Talaromyces stipitatus ATCC 10500] gi|218722763|gb|EED22181.1| choline transport protein, [Talaromyces stipitatus ATCC 10500]
  misc_feature (3)..(526): NCBI GI: 212533387 Blast Desc: choline transport protein, [Penicillium marneffei ATCC 18224] gi|210072214|gb|EEA26303.1| choline transport protein, [Penicillium marneffei ATCC 18224]
  misc_feature (8)..(520): NCBI GI: 239614111 Blast Desc: choline transporter [Ajellomyces dermatitidis ER-3]
  misc_feature: Useful for introducing or modulating the production of volatile compounds
MADGKESPRDFQGQSTLENGTKDVKEVSVVNESIEVNASGYKDQLRRQYGLLGIVGIALTVDNAWAALGSSISVSILNGGPPGLIYGLIVAIFWYSFIGLSLAELASSVPTAGGVYHWATIAGGPRYGRMLGFFTGWINFYGWMFDLAALIQITSNISVQMYATYHQETYVPAAWHVYVAYVALIWISGLFVIFANRLVPVTQNLGMFFVAVGGFVTIIVLAAKPKVHASNHFVWGSFSENNLTGWSGGVAFLTGVLNGAFTIGTPDAITHIAEELPNPKKDLPKAIGLQLSLGFAYAFFFAIALSYAITDISLLQGGINTYPLAAIYQQATGTAGGTFGLLFILFLSSLCCCIGTVLTNSRTYWALARDNAVPFSPLFSQVNESLSCPVPATIFVCTFATGLGAIPLGSSSAFLALTGSFIVLTTVSYSIPFAANLLTGRKYFPPGPFHLGKFGYVINSTAILLVALFDIFFLFPYALPTTVESMNYNSVILVGIIAVSVAWWFLHATRHYPGPKVMQLYIHDDSAPLNNTEFEEKQRENPGILQEGVVKNKEQ

SEQ ID NO: 1296 - DNA, 2363 bp, Muscodor strobelii
  misc_feature: SGI EST ID NO. CUFF.3573.0
  misc_feature: Variant of the nucleotide sequence at SEQ ID NO 1294
tataattttacttctgaatcggccggaacctcatgtacggacttgactcgtcaagaacacggggcttttttcgagcaaagattttcgatatcttgcccgtgatgcacgcagacagcacatcatattcataatcgtaatgtgttactggaattggcacagggtatgcttatctctggcccatacattcactgaggaggtagggagccagccccccctccgactaggtcttatacgtcaagacgtctcagacgatgatttcatcaaaggacttcgaatttggacatttcagctttgagtcatacgagattctcttttcccgcgctacaactctgcattgctctcgctaccacatacagctaaagtgaccgactcgctacggataatctcaaatggccgatggcaaggaaagtcctcgcgactttcaaggccaatcgactttggagaacggcaccaaagacgtcaaggaagtgtcagtcgttaacgaaagcattgaagtcaatgcctcgggatataaagatcaactgagacgccagtatggtctcttaggtatcgtcggcattgcgcttacggtcgataacgcgtgggcggcgctgggatcttcaatttccgtgtctatcctcaatggaggtccgccaggactgatatatggtctcatcgtcgccatcttctggtattcgttcatcgggctaagtcttgctgagcttgcatcatcagtaccgacggctggaggcgtgtaccactgggcgactatcgctggaggacctaggtatggccggatgctgggattcttcactggctggatcaatttctacggatggatgttcgatcttgccgccctcatccagatcacgtccaatatctccgttcagatgtacgccacttatcaccaggaaacttatgttcccgcggcctggcatgtgtacgttgcatacgttgcgctgatctggatttccggcttattcgttatcttcgcaaaccgacttgtgccggtaacacaaaatctgggaatgttcttcgtcgctgttggcgggtttgtgacgattattgtgctcgcagccaagccaaaagtacatgcctcaaatcattttgtatggggctcattcagcgagaacaacttaactggttggtcgggtggcgttgccttcttaacaggtgtattgaatggagctttcacaattggcacgcctgatgcaattactcatattgcagaagagcttccaaatccgaagaaagacctgccaaaagctattgggcttcagctttcccttggcttcgcctatgccttctttttcgccattgctctaagctacgctatcacagatatctccttactacaaggcggcatcaatacataccctctagcagcaatctaccaacaagcgacggggactgctggaggcacgttcggtctcctcttcattttgtttctcagtagtctatgttgttgtataggcactgttctcacaaactcgcgaacatattgggctctcgcgagagacaatgctgtccccttttcgccacttttcagccaagtcaacgagagcctcagctgtcctgtacctgccaccattttcgtctgcacctttgctactgggcttggagctatacctttgggaagctcaagcgctttcttggctttaacgggatctttcatcgtgctcactacagtgtcatactcaattccatttgcggcgaacttactgaccggccgcaaatatttccctcccggaccgtttcatcttgggaagttcggatatgtgattaactcgacagctatcttgctagttgctttattcgacatcttcttcctcttcccatacgcgttgccgacaacggtggagtcgatgaactataacagtgtgattcttgtgggcatcatcgcagtatcggtcgcctggtggtttctacatgccacgcgacattacccagggccgaaagtcatgcaactctacatccacgatgatagtgcacctctcaacaatactgaattcgaggaaaagcagcgcgagaacccgggtattttgcaagaaggagtagtaaagaacaaggaacaatgagtatgaaaggcacacactgtttgtagctggtgaaaggtaattttgccagttgcagtccatacactatcagctgtcgcatcagtcttcgcaccatcagtccctggacaatgtcttctaatgatctcactgaagatttatcgtaataaactgatgcgaaacttttcaaactatcgtcctgtagtcatgggcaaccccctgcctatggtgctcgacaagcttcgcgtgatccgcggtaggtcaattcatgacgtcccagcaaccgctctgtttcctacgataccaccagagaatcgcacgctgttgtca

SEQ ID NO: 1297 - DNA, 2565 bp, Muscodor strobelii
  misc_feature: SGI cDNA ID NO. 560031
  misc_feature: Elevated expression when VOC is produced
  misc_feature: Encodes the peptide sequence at SEQ ID NO 1298
atggcatctgcgatcgcgggcgactcgccgtcgtggcaaactgccgttgaagcgttcttgtcgcgccttaaaccccgcgaacgaggggcgttcaaagcccccgcaactgctgaagattgcattgccttgcttgttaagactcaacgtcgcaagacgaagctggaccgcattctgacccttttgcgccccgctattgatcctttagaacggcttcaaggtgcaattgatgttgtagttcaggtcaatgccgggattgcttctccggtatggggtccacttagagctgccatcagtttcgccgccgattactttcgaacgatagagagtattgcaatgatagttcacaaaatcatcagttcgctgcagagattttccaagtatgaccagctttttgcacacaatgaacttgttcagaccgctattggtgcgctttactgcgactatctcgacttctgtgtacgagtcacttcgtttcactcaacctcctcattcaaaacactgttttcgacatgtgagaaagactttcgcgaggtctcagacagtatacagtttcacagtcagaatgtcgacatggctgcacatgcagcccatatcgaggagagtcaacaagatgctgagcgtgcaaggctagaaagacagtcacatagcagagggaacatacagcgatggctagccccagctaacgttgaggatgatctgcagaagcatcttgacgagttgatgaaaggctcttgcgattggctcctcaattctgtggagttcgaaatgttcacctctgataagtctaatgaaccatgcgtgcttggtattgagggcttacctggaagtgggaagtctacaatcgcagcagatgtcgttcgtggtctacagcgacggggttgtagtgttgtgttcttctttttcaagtctaatcatgaggagaaagaaacactgacggccttcttgaggacgattctatcccagatgcttcgtttagatccggacctctatgtcccagtcgaaacgctctataacgagagcgggcgcgctattgctgactctttgaccgacttacagcaagcagtcatttcgtgtcttgctcggttctcagctgggtcactgttcataataatggacgcactagatgaaagtgcacagcaaaacgagactctgcgcttcttatcaagagccagcagtgtctctgcggatgtgcgaataatgttgacctcacgaccaccgttagggctttcagatgttccacaccttcatgtgagcactggcatggccaacgtttttgatatcgaggagtatattagacagcgtgtcaagcgaaatcggaacttacacagcactgcactcgggactagagtcgtatcatctgtctcacaagctgcgaatggactttggctctacgcgcgtctgatgatggatgatattgatcgatcactgtcggaacatcagatatcgaggcaactcacgatgcttccaaagggtttcaccgaactatatactcgtatgttgaaggcaaaggaagcttcatttactccaattgagctcaagttggcacaacagctccatctgtggcttcaagtgagcgactacatgccgcgcttcctaaatggagttggtgagatgctcgactatcacgttctcgcattgatatgccagtatgcgaacgatggagactcggtgtttgatcctgtcgaagcagcccggaaggttggatcactcgtcgaagtcgtaagcggtaccagaacatgggctccagttgacgctccgccatcctacgaaatcagcttcacccattacacggcgcagcagtatttgacggaaagtggaagcctgccagcttcggagcttcctgttactctacggccgcagcgattgcgccatctacaccgagccatgttagccatttggtatttcaccggatgtgaccagtcgcaatcaattctttcccggttgcaagccaccaatggcagtgatctaggtaccaatgagatctatttcgaaatggcatatggtttatggaatgcactgcatcttaaagatttcgaaatgcccagcgatgctcaagaagctgccgaagcggaggagatgctgcaaaatttgagcaactatatctccagtcccgcctgcttacggtggattgaaacagcaatccttatcaactacgagggtagatatcctcatctgctatggaacgcagtagcaggttgggaagccgcgcgatatactcaatcccatccctttgagccatttgcagcttactcgagagcccgcactcacttctgtcagaactatgcatacatacttgctgagactggtctctgtggttcagatgcgccacttgagctgatcatggcatacaggcgtgagtcgcaagatgacgagcttgggcggaaaataatgaaattgggtagatattggcatgatgccattctggccgaaactgaaaccttggaaaataattctgaaagcgtggaaattggcgtaaagacttttgaagaagtcgagctggtttatgatggtttcgatccacctccgcactggttgcagacctcgaaaggatcacatgatgaataa

SEQ ID NO: 1298 - protein, 854 aa, Muscodor strobelii
  misc_feature: SGI Peptide ID NO. 560031
  misc_feature (1)..(768): NCBI GI: 119474047 Blast Desc: NFIA_003580 [Neosartorya fischeri NRRL 181] gi|119407052|gb|EAW17002.1| NFIA_003580 [Neosartorya fischeri NRRL 181]
  misc_feature (35)..(522): NCBI GI: 115402309 Blast Desc: [Aspergillus terreus NIH2624] gi|114189077|gb|EAU30777.1| [Aspergillus terreus NIH2624]
  misc_feature (13)..(648): NCBI GI: 67902626 Blast Desc: AN8300.2 [Aspergillus nidulans FGSC A4] gi|40747709|gb|EAA66865.1| AN8300.2 [Aspergillus nidulans FGSC A4] gi|259484224|tpe|CBF80262.1| TPA: conserved [Aspergillus FGSC
  misc_feature (68)..(526): NCBI GI: 46127693 Blast Desc: FG08224.1 [Gibberella zeae PH-1]
  misc_feature (16)..(603): NCBI GI: 171679183 Blast Desc: protein product [Podospora anserina] gi|170937663|emb|CAP62321.1| protein product [Podospora anserina]
  misc_feature (220)..(539): NCBI GI: 255953371 Blast Desc: Pc21g03870 [Penicillium chrysogenum Wisconsin 54-1255] gi|211589149|emb|CAP95284.1| Pc21g03870 [Penicillium chrysogenum Wisconsin 54-1255]
  misc_feature (46)..(502): NCBI GI: 261205434 Blast Desc: WD domain-containing protein [Ajellomyces dermatitidis SLH14081] gi|239592513|gb|EEQ75094.1| WD domain-containing protein [Ajellomyces dermatitidis SLH14081]
  misc_feature (46)..(502): NCBI GI: 239611334 Blast Desc: WD domain-containing protein [Ajellomyces dermatitidis ER-3]
  misc_feature (220)..(501): NCBI GI: 115386066 Blast Desc: [Aspergillus terreus NIH2624] gi|114190572|gb|EAU32272.1| [Aspergillus terreus NIH2624]
  misc_feature (219)..(532): NCBI GI: 256724233 Blast Desc: NECHADRAFT_87507 [Nectria haematococca mpVI 77-13-4]
  misc_feature: Useful for introducing or modulating the production of volatile compounds
MASAIAGDSPSWQTAVEAFLSRLKPRERGAFKAPATAEDCIALLVKTQRRKTKLDRILTLLRPAIDPLERLQGAIDVVVQVNAGIASPVWGPLRAAISFAADYFRTIESIAMIVHKIISSLQRFSKYDQLFAHNELVQTAIGALYCDYLDFCVRVTSFHSTSSFKTLFSTCEKDFREVSDSIQFHSQNVDMAAHAAHIEESQQDAERARLERQSHSRGNIQRWLAPANVEDDLQKHLDELMKGSCDWLLNSVEFEMFTSDKSNEPCVLGIEGLPGSGKSTIAADVVRGLQRRGCSVVFFFFKSNHEEKETLTAFLRTILSQMLRLDPDLYVPVETLYNESGRAIADSLTDLQQAVISCLARFSAGSLFIIMDALDESAQQNETLRFLSRASSVSADVRIMLTSRPPLGLSDVPHLHVSTGMANVFDIEEYIRQRVKRNRNLHSTALGTRVVSSVSQAANGLWLYARLMMDDIDRSLSEHQISRQLTMLPKGFTELYTRMLKAKEASFTPIELKLAQQLHLWLQVSDYMPRFLNGVGEMLDYHVLALICQYANDGDSVFDPVEAARKVGSLVEVVSGTRTWAPVDAPPSYEISFTHYTAQQYLTESGSLPASELPVTLRPQRLRHLHRAMLAIWYFTGCDQSQSILSRLQATNGSDLGTNEIYFEMAYGLWNALHLKDFEMPSDAQEAAEAEEMLQNLSNYISSPACLRWIETAILINYEGRYPHLLWNAVAGWEAARYTQSHPFEPFAAYSRARTHFCQNYAYILAETGLCGSDAPLELIMAYRRESQDDELGRKIMKLGRYWHDAILAETETLENNSESVEIGVKTFEEVELVYDGFDPPPHWLQTSKGSHDE

SEQ ID NO: 1299 - DNA, 3167 bp, Muscodor strobelii
  misc_feature: SGI EST ID NO. CUFF.3594.0
  misc_feature: Variant of the nucleotide sequence at SEQ ID NO 1297
gggccaatgaactcttgcgttatgccatgcgacctgacgaaagtatgtctactgattgaaggcggctcggacggcaacgatcgatgctttcgtttctgtactcgtgatcctcatcatcttctacccatgtctatctcggccagacataggttatcaacgttgagatacagacttcttgcatacaggaccattcgagtgtcgacagcaggggtttgagggaacccattattgaggcagtgcaacaggcgatgatattctccccgctcatttacacccaactcataacaactacattctttcaataagtcatttcttggtacgggaagacgatgtacttctttacatactctatcatcgctcataaaactacatctatggcgcaaaatggcatctgcgatcgcgggcgactcgccgtcgtggcaaactgccgttgaagcgttcttgtcgcgccttaaaccccgcgaacgaggggcgttcaaagcccccgcaactgctgaagattgcattgccttgcttgttaagactcaacgtcgcaagacgaagctggaccgcattctgacccttttgcgccccgctattgatcctttagaacggcttcaaggtgcaattgatgttgtagttcaggtcaatgccgggattgcttctccggtatggggtccacttagagctgccatcagtttcgccgccgattactttcgaacgatagagagtattgcaatgatagttcacaaaatcatcagttcgctgcagagattttccaagtatgaccagctttttgcacacaatgaacttgttcagaccgctattggtgcgctttactgcgactatctcgacttctgtgtacgagtcacttcgtttcactcaacctcctcattcaaaacactgttttcgacatgtgagaaagactttcgcgaggtctcagacagtatacagtttcacagtcagaatgtcgacatggctgcacatgcagcccatatcgaggagagtcaacaagatgctgagcgtgcaaggctagaaagacagtcacatagcagagggaacatacagcgatggctagccccagctaacgttgaggatgatctgcagaagcatcttgacgagttgatgaaaggctcttgcgattggctcctcaattctgtggagttcgaaatgttcacctctgataagtctaatgaaccatgcgtgcttggtattgagggcttacctggaagtgggaagtctacaatcgcagcagatgtcgttcgtggtctacagcgacggggttgtagtgttgtgttcttctttttcaagtctaatcatgaggagaaagaaacactgacggccttcttgaggacgattctatcccagatgcttcgtttagatccggacctctatgtcccagtcgaaacgctctataacgagagcgggcgcgctattgctgactctttgaccgacttacagcaagcagtcatttcgtgtcttgctcggttctcagctgggtcactgttcataataatggacgcactagatgaaagtgcacagcaaaacgagactctgcgcttcttatcaagagccagcagtgtctctgcggatgtgcgaataatgttgacctcacgaccaccgttagggctttcagatgttccacaccttcatgtgagcactggcatggccaacgtttttgatatcgaggagtatattagacagcgtgtcaagcgaaatcggaacttacacagcactgcactcgggactagagtcgtatcatctgtctcacaagctgcgaatggactttggctctacgcgcgtctgatgatggatgatattgatcgatcactgtcggaacatcagatatcgaggcaactcacgatgcttccaaagggtttcaccgaactatatactcgtatgttgaaggcaaaggaagcttcatttactccaattgagctcaagttggcacaacagctccatctgtggcttcaagtgagcgactacatgccgcgcttcctaaatggagttggtgagatgctcgactatcacgttctcgcattgatatgccagtatgcgaacgatggagactcggtgtttgatcctgtcgaagcagcccggaaggttggatcactcgtcgaagtcgtaagcggtaccagaacatgggctccagttgacgctccgccatcctacgaaatcagcttcacccattacacggcgcagcagtatttgacggaaagtggaagcctgccagcttcggagcttcctgttactctacggccgcagcgattgcgccatctacaccgagccatgttagccatttggtatttcaccggatgtgaccagtcgcaatcaattctttcccggttgcaagccaccaatggcagtgatctaggtaccaatgagatctatttcgaaatggcatatggtttatggaatgcactgcatcttaaagatttcgaaatgcccagcgatgctcaagaagctgccgaagcggaggagatgctgcaaaatttgagcaactatatctccagtcccgcctgcttacggtggattgaaacagcaatccttatcaactacgagggtagatatcctcatctgctatggaacgcagtagcaggttgggaagccgcgcgatatactcaatcccatccctttgagccatttgcagcttactcgagagcccgcactcacttctgtcagaactatgcatacatacttgctgagactggtctctgtggttcagatgcgccacttgagctgatcatggcatacaggcgtgagtcgcaagatgacgagcttgggcggaaaataatgaaattgggtagatattggcatgatgccattctggccgaaactgaaaccttggaaaataattctgaaagcgtggaaattggcgtaaagacttttgaagaagtcgagctggtttatgatggtttcgatccacctccgcactggttgcagacctcgaaaggatcacatgatgaataagtctacgagcgttggtcagtacatatacttagccggctacatagagaaatgatatcgataaattcattacgatcgggttttctcagatcgcaatagctagatggtaacttcaaagaacatgatggttatcatggtaatgaggcgttgatcttcatggtgaattcgggcgcacgattctgccaatcaagataagtttgtggaggtcgtttggctttggg

SEQ ID NO: 1300 - DNA, 621 bp, Muscodor strobelii
  misc_feature: SGI cDNA ID NO. 560032
  misc_feature: Elevated expression when VOC is produced
  misc_feature: Encodes the peptide sequence at SEQ ID NO 1301
atgccagagaaactcacagagtccgaagtaacatcgcaaaccgatccctccgtcgcgaaacaatatgacacagagacgcctatgcaccagcaattcagcgatttctatgacctacaaaaagatctaaaaatcggcctcctaaccacgcttcgtcaaaacatcgggcccgtatcgcgcagcatggcagtagcgaaacgcgtcggacccgatttcctattcctcgcaaactaccactctaaaaaattcagcgacatatcgtcggacaagaccgtgcagatcacattccagaacacgggcggtaatcaagactgggcgtccgtaacgggcgacgcggtcgtggcgcggaacgacgacccgcgtatcaaggagctgtggaataaagggattaaggcgtggtttggagacttgggtgatgggacgcatgatggggggcctgaggatccgagaatggcacttattgaggttaagagtaggtatattacttattggaagagtactaaggggtccctgggattcttgaaggagactactgttgcgagtttgacgggtgaggttgcgcagacgggtgttatgagggagatggggagtgaagatattgagaaggctaggagcttggggtag

SEQ ID NO: 1301 - protein, 206 aa, Muscodor strobelii
  misc_feature: SGI Peptide ID NO. 560032
  misc_feature (1)..(205): NCBI GI: 169617902 Blast Desc: SNOG_12133 [Phaeosphaeria nodorum SN15] gi|111059425|gb|EAT80545.1| SNOG_12133 [Phaeosphaeria nodorum SN15]
  misc_feature (1)..(205): NCBI GI: 189200729 Blast Desc: blue light-inducible protein Bli-3 [Pyrenophora tritici-repentis Pt-1C-BFP] gi|187983800|gb|EDU49288.1| blue light-inducible protein Bli-3 [Pyrenophora tritici-repentis
  misc_feature (15)..(204): NCBI GI: 164424402 Blast Desc: protein bli-3 [Neurospora crassa OR74A] gi|157070497|gb|EAA32885.2| protein bli-3 [Neurospora crassa OR74A]
  misc_feature (15)..(204): NCBI GI: 2498183 Blast Desc: BLI3_NEUCR RecName: Full=Protein bli-3 gi|602075|emb|CAA57098.1| bli-3 [Neurospora crassa] gi|1092170|prf||2023159A bli-3 gene
  misc_feature (1)..(204): NCBI GI: 116195566 Blast Desc: CHGG_04381 [Chaetomium globosum CBS 148.51] gi|88180294|gb|EAQ87762.1| CHGG_04381 [Chaetomium globosum CBS 148.51]
  misc_feature (11)..(205): NCBI GI: 238579796 Blast Desc: MPER_11752 [Moniliophthora perniciosa FA553] gi|215451126|gb|EEB90090.1| MPER_11752 [Moniliophthora perniciosa FA553]
  misc_feature (15)..(199): NCBI GI: 39969775 Blast Desc: MGG_10497 [Magnaporthe grisea 70-15] gi|145012075|gb|EDJ96731.1| MGG_10497 [Magnaporthe grisea 70-15]
  misc_feature (15)..(203): NCBI GI: 121701181 Blast Desc: blue light-inducible protein Bli-3 [Aspergillus clavatus NRRL 1] gi|119396998|gb|EAW07429.1| blue light-inducible protein Bli-3 [Aspergillus clavatus NRRL 1]
  misc_feature (11)..(204): NCBI GI: 189211251 Blast Desc: bli-3 protein [Pyrenophora tritici-repentis Pt-1C-BFP] gi|187978049|gb|EDU44675.1| bli-3 protein [Pyrenophora tritici-repentis Pt-1C-BFP]
  misc_feature (4)..(203): NCBI GI: 212533641 Blast Desc: blue light-inducible protein Bli-3 [Penicillium marneffei ATCC 18224] gi|210072341|gb|EEA26430.1| blue light-inducible protein Bli-3 [Penicillium marneffei ATCC 18224]
  misc_feature: Useful for introducing or modulating the production of volatile compounds
MPEKLTESEVTSQTDPSVAKQYDTETPMHQQFSDFYDLQKDLKIGLLTTLRQNIGPVSRSMAVAKRVGPDFLFLANYHSKKFSDISSDKTVQITFQNTGGNQDWASVTGDAVVARNDDPRIKELWNKGIKAWFGDLGDGTHDGGPEDPRMALIEVKSRYITYWKSTKGSLGFLKETTVASLTGEVAQTGVMREMGSEDIEKARSLG

SEQ ID NO: 1302 - DNA, 982 bp, Muscodor strobelii
  misc_feature: SGI EST ID NO. CUFF.3599.0
  misc_feature: Variant of the nucleotide sequence at SEQ ID NO 1300
atgcaacacatcgcgggattatgatttgctcccattcgtagtaattatagtaataagaatgattctcataaactccatacgttgcaattccgcaagaatcttccgtccatcaatcaccacatcaaccagtcgcgcacaaaccttcagcacaacaccatccatcaaaatgccagagaaactcacagagtccgaagtaacatcgcaaaccgatccctccgtcgcgaaacaatatgacacagagacgcctatgcaccagcaattcagcgatttctatgacctacaaaaagatctaaaaatcggcctcctaaccacgcttcgtcaaaacatcgggcccgtatcgcgcagcatggcagtagcgaaacgcgtcggacccgatttcctattcctcgcaaactaccactctaaaaaattcagcgacatatcgtcggacaagaccgtgcagatcacattccagaacacgggcggtaatcaagactgggcgtccgtaacgggcgacgcggtcgtggcgcggaacgacgacccgcgtatcaaggagctgtggaataaagggattaaggcgtggtttggagacttgggtgatgggacgcatgatggggggcctgaggatccgagaatggcacttattgaggttaagagtaggtatattacttattggaagagtactaaggggtccctgggattcttgaaggagactactgttgcgagtttgacgggtgaggttgcgcagacgggtgttatgagggagatggggagtgaagatattgagaaggctaggagcttggggtagattgtggggaactacttgtgatgcaggttggggaggggttgtttgtgagagtctgttagttatgctgtgcgatgtattcgcgtatgggacttcaacttacctattaaaggaagtctctgtatcaagaaatgggtgaaggttcttcacgcgtatcaattggtcaagtttaaatcagctgagttaggtaaatataca

SEQ ID NO: 1303 - DNA, 1230 bp, Muscodor strobelii
  misc_feature: SGI cDNA ID NO. 560033
  misc_feature: Elevated expression when VOC is produced
  misc_feature: Encodes the peptide sequence at SEQ ID NO 1304
atggctaccgagacagccaccaagctgaaatgccagggctgcgacaacgaggccggcgccctacaatgccctaagtgccttgatctgggcgtcaaggatagcttcttctgctcgcaagactgctttaagaaaaactggaatgagcacaaagccctgcacaagctgctcgcgggcaagtcagcgaacggtattctcgatcgcatccgaactcctaaagttgtctctaaacccgatccagccacaggtcacttcaacccattcccgtccttcggctacaccggctctctccgtcccgtctatcccctctctcccatgcgcaccgtgcccgcagacatcgtcaagcccgactgggcagaatccggcactccccaaggggagaggaagctgatgatggacccgcgaacgcgcaacaaagtcgacatcctcgacgccgagggccagcagaagatgcgcgacgtctgcaagataggacgcgaggtcctagacatcatcgctgccgaggtcaagcccggtgtcacaacggactatctagacgagatatgtcacaaggctacgatagaaagaaaggcctacccgtctcccctaaactacaaccacttccccaagtcattctgctcctccgtcaacgaagtcatttgccacggcatccccgaccagagaaagctcgaagacggcgacattgtcaacctcgacgtctcagtgtacaaggacggacaccacgctgatctcaacgagacctactacgtcggagacaaggcaaaggcagacccggactcggtcagagtggtagagactgcgcgcgaatgcttagaagaagcagccaagatcattaagcccggcacattgatccgtgacttcggaaacgccatcgagaagcatgcgaagtccaggaattgcggtgttgtcagaacctactgcggccacggagtcaacacccacttccacagcccgcccaacgttccgcactacgccaagaacaaggctgtgggagagtgcaaaccaggaatgaccttcaccatcgagcccatgattaccttgggcagatataaagatgtcacgtggccagacaactggaccagcacgaccgtcgacggcaaacgcactgcgcagttcgagcacacattcctcgtcacagagacaggcgttgaggtattgacagcacgcttagagacctcaccgggtggtcccgtacccatgccgacagccgaaaacggcacaaatggcaagtaa

SEQ ID NO: 1304 - protein, 409 aa, Muscodor strobelii
  misc_feature: SGI Peptide ID NO. 560033
  misc_feature (148)..(387): Pfam Id: PF00557 Pfam Desc: metallopeptidase family M24
  misc_feature (1)..(406): NCBI GI: 261355368 Blast Desc: methionine aminopeptidase [Verticillium albo-atrum VaMs.102]
  misc_feature (7)..(408): NCBI GI: 238500213 Blast Desc: methionine aminopeptidase, type I, [Aspergillus flavus NRRL3357] gi|220693094|gb|EED49440.1| methionine aminopeptidase, type I, [Aspergillus flavus NRRL3357]
  misc_feature (7)..(408): NCBI GI: 169779551 Blast Desc: [Aspergillus oryzae RIB40] gi|83772979|dbj|BAE63107.1| protein product [Aspergillus oryzae]
  misc_feature (3)..(405): NCBI GI: 256730861 Blast Desc: [Nectria haematococca mpVI 77-13-4]
  misc_feature (1)..(405): NCBI GI: 46109030 Blast Desc: FG01397.1 [Gibberella zeae PH-1]
  misc_feature (1)..(405): NCBI GI: 119468326 Blast Desc: methionine aminopeptidase [Neosartorya fischeri NRRL 181] gi|119406004|gb|EAW15955.1| methionine aminopeptidase [Neosartorya fischeri NRRL 181]
  misc_feature (1)..(409): NCBI GI: 154312571 Blast Desc: BC1G_05888 [Botryotinia fuckeliana B05.10] gi|150849989|gb|EDN25182.1| BC1G_05888 [Botryotinia fuckeliana B05.10]
  misc_feature (1)..(402): NCBI GI: 85092187 Blast Desc: methionine aminopeptidase 1 [Neurospora crassa OR74A] gi|28920673|gb|EAA30034.1| methionine aminopeptidase 1 [Neurospora crassa OR74A]
  misc_feature (1)..(400): NCBI GI: 116203807 Blast Desc: conserved [Chaetomium globosum CBS 148.51] gi|88175915|gb|EAQ83383.1| conserved [Chaetomium globosum CBS 148.51]
  misc_feature (2)..(409): NCBI GI: 156035833 Blast Desc: SS1G_13121 [Sclerotinia sclerotiorum 1980] gi|154698525|gb|EDN98263.1| SS1G_13121 [Sclerotinia sclerotiorum 1980]
  misc_feature (1)..(397): SWISSPROT Homolog: EC 3.4.11.18 Methionyl aminopeptidase
  misc_feature: Useful for introducing or modulating the production of volatile compounds
MATETATKLKCQGCDNEAGALQCPKCLDLGVKDSFFCSQDCFKKNWNEHKALHKLLAGKSANGILDRIRTPKVVSKPDPATGHFNPFPSFGYTGSLRPVYPLSPMRTVPADIVKPDWAESGTPQGERKLMMDPRTRNKVDILDAEGQQKMRDVCKIGREVLDIIAAEVKPGVTTDYLDEICHKATIERKAYPSPLNYNHFPKSFCSSVNEVICHGIPDQRKLEDGDIVNLDVSVYKDGHHADLNETYYVGDKAKADPDSVRVVETARECLEEAAKIIKPGTLIRDFGNAIEKHAKSRNCGVVRTYCGHGVNTHFHSPPNVPHYAKNKAVGECKPGMTFTIEPMITLGRYKDVTWPDNWTSTTVDGKRTAQFEHTFLVTETGVEVLTARLETSPGGPVPMPTAENGTNGK

SEQ ID NO: 1305 - DNA, 1755 bp, Muscodor strobelii
  misc_feature: SGI EST ID NO. CUFF.3792.1
  misc_feature: Variant of the nucleotide sequence at SEQ ID NO 1303
cgctgccggtaacgtggggcagaaactgtgttgcatcccactttctgcacttgcgttctagagcttgaggtacctaaatcgctagcctaggatagaaaaaagttggtgatgattctgccttgaaaattgcctatccataggtaccttcgcgccttccttagaccaacaacacacacgcattgcgcctacgccgactataaaaggacgatagtctttagatacatcctaatacccacgcgtagacttgtcgcctccagagaacatcgctagccccgtcacccctccatccatcatggctaccgagacagccaccaagctgaaatgccagggctgcgacaacgaggccggcgccctacaatgccctaagtgccttgatctgggcgtcaaggatagcttcttctgctcgcaagactgctttaagaaaaactggaatgagcacaaagccctgcacaagctgctcgcgggcaagtcagcgaacggtattctcgatcgcatccgaactcctaaagttgtctctaaacccgatccagccacaggtcacttcaacccattcccgtccttcggctacaccggctctctccgtcccgtctatcccctctctcccatgcgcaccgtgcccgcagacatcgtcaagcccgactgggcagaatccggcactccccaaggggagaggaagctgatgatggacccgcgaacgcgcaacaaagtcgacatcctcgacgccgagggccagcagaagatgcgcgacgtctgcaagataggacgcgaggtcctagacatcatcgctgccgaggtcaagcccggtgtcacaacggactatctagacgagatatgtcacaaggctacgatagaaagaaaggcctacccgtctcccctaaactacaaccacttccccaagtcattctgctcctccgtcaacgaagtcatttgccacggcatccccgaccagagaaagctcgaagacggcgacattgtcaacctcgacgtctcagtgtacaaggacggacaccacgctgatctcaacgagacctactacgtcggagacaaggcaaaggcagacccggactcggtcagagtggtagagactgcgcgcgaatgcttagaagaagcagccaagatcattaagcccggcacattgatccgtgacttcggaaacgccatcgagaagcatgcgaagtccaggaattgcggtgttgtcagaacctactgcggccacggagtcaacacccacttccacagcccgcccaacgttccgcactacgccaagaacaaggctgtgggagagtgcaaaccaggaatgaccttcaccatcgagcccatgattaccttgggcagatataaagatgtcacgtggccagacaactggaccagcacgaccgtcgacggcaaacgcactgcgcagttcgagcacacattcctcgtcacagagacaggcgttgaggtattgacagcacgcttagagacctcaccgggtggtcccgtacccatgccgacagccgaaaacggcacaaatggcaagtaacaaaagattgattgcatataatgatattgtacgagtgacgagacattggttatggcctcctacatcttgtctgaaattcaagcgaggagttacatgcagataggagaccgtacagggcatttgcatacaaatgaggatattgttagtgtcacgattataccaatgagatgacaacagatagcatagttctcaagtccatggcgactgcaaagacaaaacaaaacaaaaaaacc

SEQ ID NO: 1306 - DNA, 2466 bp, Muscodor strobelii
  misc_feature: SGI cDNA ID NO. 560034
  misc_feature: Encodes the peptide sequence at SEQ ID NO 1307
atgtctcaaccaaggcagaaatgcctcgtggtcggagctggccctgttggtagtctggcggctttgtatgctgcaaagcgaggttatgaggttgaaatttacgagttgagaagtgaccttcgtgatccatcaacaacgccattgaactttacgaagtctatcaacttggcgctatctgagagaggcatcaatgctatgcgccatgcagaccaggacaaattgcttgagagtgttcttgcaggaactatcccaatgcgtgggagaatgattcatgggaaaaatctagatggaacactctatgaagctgcccaggattacgatattcatggccgatcgctctacgctatagataggtccgggctcaacaagctgttgttagatgtcttggcagacatgcccaacgtcaagttctttttcaatcataaacttaccggagccgatttcaagcggaatacagcttggtttgaggtggtcaactccgctgtaggctcgagacgagcggctgagatccaggttgactttgatttcatgatcggtgcagatggcgcgcattcagctgtacggtaccatctcatgaagttcactaggatgaattacatccaggagtacatcgacacactctggtgcgagtttcaaatcaaaggccaggacgtctcctcacccaaggacctgcaatggagatatcgtatctctccgaatcatcttcatatttggccaggaaaagagttcatgttcatcgccattgctagtgaggacggatctttcacatgcacgctctttatgcctagttctgaatatttacccttggaagaggacccatccgcaataccagcgttcttcgacttgcatttccctggtgtcacttctttgatcgaaccgagcgagctcatctcttcattccaatcaaatccacatttaccgttgatcagtatcaaatgcgctccttaccatttctcaagctccgtagtcattctcggcgatgcggcacatgccatggttccgttctatgggcaaggcatgaatgctggcctcgaagatgtccgcatcctattttcgaccatcgacaagcatgcgatcgctgagaccaataaccccgccaatcctggcattgttgacgtagcgcagcagcgtgggaaagctctggctgagtactctgcactccgtgcagacgacgctcatgcaattaatgatctcgctctgcaaaattatgttgagatgcgagcgtcagtcttgtcgcggctctaccgagcacgcaaattcttggaagagtttttatccgttcacgtgccgagtttaggatgggccacgcaatactccagagtcagtttcgggaacgagaggtactcagaagtaattgccaaaagcaagaagcagggcaagatactcacgagcggcctgctgacattgcttttcagccctcttgttattggcaatctgtccgctctaaagatgtcttctctgttcaacccttacctagcgcaacaccagaacccctcaggtcctggtgacgcacgcccaacggcacagcagatcattgcagacaacaatctcaacggagcctggtctgataaaattgtactaatcactggaactacatcgggaattggtatcgagacggcgcgagctatgtactcaacaggcgcgcaagtctttgtcatggttcgcgacacgaaaaagatgcaaccaatcgtcgctgagatcctgagctcgacgagcggaaatgggaagatcgaggttatcgaaatgaatttagagtccttaagctccgtcaaaaccgcagctgagcatttcctcagcaaatcaccgaagcttaacgtccttatcaacaacgctggtatcatggcatgtcctccatccctgacggtcgatggttacgagcgacagttcgccgccaattatctatcacacttcaagctcaccactctgcttcttccactgttactttctagtagttccagcgccttcaattctagggtcgtttgggtatcttcatccgcgcatcgaccggatcacataaagattaacttcgacgagctcggaacattgaaagactacgagccttggactatgtacggcaagtcaaagctggcgcagatatgggcatcgaattacatggatcgcgcttatggatcacaaggcgtgcactctctgtcgttgaatccgggaggaatctggactaatttgtcacggtatgttggtcaggaacaaattgataaatggagacaggacgaagaaatgggcaaaggcatgaagtctgctgcgcaaggcgcggcgacgacggtatgggctgctgttgcacccgtttgggaggagaagggtgggaagtatcttgctgattgtaagattgcggagctctcggacaaaccgccttcggctgtcgatgatgctcgcgggaagaatgtttatgatcctgttggagaggagaaattgtgggagttgagttggaagatggtgtcatccagttag

SEQ ID NO: 1307 - protein, 821 aa, Muscodor strobelii
  misc_feature: SGI Peptide ID NO. 560034
  misc_feature (524)..(671): Pfam Id: PF00106 Pfam Desc: short chain dehydrogenase
  misc_feature (5)..(389): Pfam Id: PF01494 Pfam Desc: FAD binding domain
  misc_feature (524)..(655): Pfam Id: PF00106 Pfam Desc: short chain dehydrogenase
  misc_feature (7)..(35): Pfam Id: PF01266 Pfam Desc: FAD dependent oxidoreductase
  misc_feature (7)..(37): Pfam Id: PF01134 Pfam Desc: Glucose inhibited division protein A
  misc_feature (3)..(474): NCBI GI: 171679090 Blast Desc: protein product [Podospora anserina] gi|170937616|emb|CAP62275.1| protein product [Podospora anserina]
  misc_feature (3)..(466): NCBI GI: 116203805 Blast Desc: CHGG_09786 [Chaetomium globosum CBS 148.51] gi|121777538|sp|Q2GQG8.1|KMO_CHAGB RecName: Full=Kynurenine 3-monooxygenase; AltName: Full=Kynurenine 3-hydroxylase; AltName:
  misc_feature (5)..(467): NCBI GI: 154312569 Blast Desc: BC1G_05887 [Botryotinia fuckeliana B05.10] gi|150849988|gb|EDN25181.1| BC1G_05887 [Botryotinia fuckeliana B05.10]
  misc_feature (1)..(473): NCBI GI: 46109026 Blast Desc: FG01395.1 [Gibberella zeae PH-1]
  misc_feature (1)..(479): NCBI GI: 164424654 Blast Desc: NCU06924 [Neurospora crassa OR74A] gi|223635249|sp|Q7S3C9.2|KMO_NEUCR RecName: Full=Kynurenine 3-monooxygenase; AltName: Full=Kynurenine 3-hydroxylase; AltName:
  misc_feature (5)..(462): NCBI GI: 156035831 Blast Desc: SS1G_13120 [Sclerotinia sclerotiorum 1980] gi|154698524|gb|EDN98262.1| SS1G_13120 [Sclerotinia sclerotiorum 1980]
  misc_feature (1)..(475): NCBI GI: 145610919 Blast Desc: MGG_00805 [Magnaporthe grisea 70-15] gi|145018257|gb|EDK02536.1| MGG_00805 [Magnaporthe grisea 70-15]
  misc_feature (6)..(490): NCBI GI: 121699035 Blast Desc: kynurenine 3-monooxygenase, [Aspergillus clavatus NRRL 1] gi|223635224|sp|A1CT23.1|KMO_ASPCL RecName: Full=Kynurenine 3-monooxygenase; AltName: Full=Kynurenine 3-hydroxylase; AltName:
  misc_feature (5)..(483): NCBI GI: 115390745 Blast Desc: conserved [Aspergillus terreus NIH2624] gi|121739693|sp|Q0CRI5.1|KMO_ASPTN RecName: Full=Kynurenine 3-monooxygenase; AltName: Full=Kynurenine 3-hydroxylase; AltName:
  misc_feature (2)..(465): NCBI GI: 258577225 Blast Desc: conserved [Uncinocarpus reesii 1704] gi|237903060|gb|EEP77461.1| conserved [Uncinocarpus reesii 1704]
  misc_feature (3)..(466): SWISSPROT Homolog: EC 1.14.13.9 Kynurenine 3-monooxygenase
MSQPRQKCLVVGAGPVGSLAALYAAKRGYEVEIYELRSDLRDPSTTPLNFTKSINLALSERGINAMRHADQDKLLESVLAGTIPMRGRMIHGKNLDGTLYEAAQDYDIHGRSLYAIDRSGLNKLLLDVLADMPNVKFFFNHKLTGADFKRNTAWFEVVNSAVGSRRAAEIQVDFDFMIGADGAHSAVRYHLMKFTRMNYIQEYIDTLWCEFQIKGQDVSSPKDLQWRYRISPNHLHIWPGKEFMFIAIASEDGSFTCTLFMPSSEYLPLEEDPSAIPAFFDLHFPGVTSLIEPSELISSFQSNPHLPLISIKCAPYHFSSSVVILGDAAHAMVPFYGQGMNAGLEDVRILFSTIDKHAIAETNNPANPGIVDVAQQRGKALAEYSALRADDAHAINDLALQNYVEMRASVLSRLYRARKFLEEFLSVHVPSLGWATQYSRVSFGNERYSEVIAKSKKQGKILTSGLLTLLFSPLVIGNLSALKMSSLFNPYLAQHQNPSGPGDARPTAQQIIADNNLNGAWSDKIVLITGTTSGIGIETARAMYSTGAQVFVMVRDTKKMQPIVAEILSSTSGNGKIEVIEMNLESLSSVKTAAEHFLSKSPKLNVLINNAGIMACPPSLTVDGYERQFAANYLSHFKLTTLLLPLLLSSSSSAFNSRVVWVSSSAHRPDHIKINFDELGTLKDYEPWTMYGKSKLAQIWASNYMDRAYGSQGVHSLSLNPGGIWTNLSRYVGQEQIDKWRQDEEMGKGMKSAAQGAATTVWAAVAPVWEEKGGKYLADCKIAELSDKPPSAVDDARGKNVYDPVGEEKLWELSWKMVSSS

SEQ ID NO: 1308 - DNA, 3165 bp, Muscodor strobelii
  misc_feature: SGI EST ID NO. CUFF.3708.1
  misc_feature: Variant of the nucleotide sequence at SEQ ID NO 1306
caaagttctatttccctcttcaacaaaactacttcgaaaactgtacattgtctcagccagagtattcttgagttatttgattttcaacttgcgccatattgcatatcaaacttagatagctcaatcaatgtctcaaccaaggcagaaatgcctcgtggtcggagctggccctgttggtagtctggcggctttgtatgctgcaaagcgaggttatgaggttgaaatttacgagttgagaagtgaccttcgtgatccatcaacaacgccattgaactttacgaagtctatcaacttggcgctatctgagagaggcatcaatgctatgcgccatgcagaccaggacaaattgcttgagagtgttcttgcaggaactatcccaatgcgtgggagaatgattcatgggaaaaatctagatggaacactctatgaagctgcccaggattacgatattcatggccgatcgctctacgctatagataggtccgggctcaacaagctgttgttagatgtcttggcagacatgcccaacgtcaagttctttttcaatcataaacttaccggagccgatttcaagcggaatacagcttggtttgaggtggtcaactccgctgtaggctcgagacgagcggctgagatccaggttgactttgatttcatgatcggtgcagatggcgcgcattcagctgtacggtaccatctcatgaagttcactaggatgaattacatccaggagtacatcgacacactctggtgcgagtttcaaatcaaaggccaggacgtctcctcacccaaggacctgcaatggagatatcgtatctctccgaatcatcttcatatttggccaggaaaagagttcatgttcatcgccattgctagtgaggacggatctttcacatgcacgctctttatgcctagttctgaatatttacccttggaagaggacccatccgcaataccagcgttcttcgacttgcatttccctggtgtcacttctttgatcgaaccgagcgagctcatctcttcattccaatcaaatccacatttaccgttgatcagtatcaaatgcgctccttaccatttctcaagctccgtagtcattctcggcgatgcggcacatgccatggttccgttctatgggcaaggcatgaatgctggcctcgaagatgtccgcatcctattttcgaccatcgacaagcatgcgatcgctgagaccaataaccccgccaatcctggcattgttgacgtagcgcagcagcgtgggaaagctctggctgagtactctgcactccgtgcagacgacgctcatgcaattaatgatctcgctctgcaaaattatgttgagatgcgagcgtcagtcttgtcgcggctctaccgagcacgcaaattcttggaagagtttttatccgttcacgtgccgagtttaggatgggccacgcaatactccagagtcagtttcgggaacgagaggtactcagaagtaattgccaaaagcaagaagcagggcaagatactcacgagcggcctgctgacattgcttttcagccctcttgttattgggtgcgttgcccttgccttcaggcataggcgatggcttggggcgcataatcctttggcgaatcttcgagggctggccagacaaatcttgaagaagtaagactcgattttggagctaactggcgagcaacgactttgcatcattttggagcgtggtgttggtttgcggcccctgggagcaccaggaacgattgtccgctcatgtccgcttgtggcgctgttgcatattctggatccttaatataagtagtcaactctactccctccctcgaagtagatatctgttttcatcatcattcatttcctgagcttaacatcccgtttctggcaatagcaatctgtccgctctaaagatgtcttctctgttcaacccttacctagcgcaacaccagaacccctcaggtcctggtgacgcacgcccaacggcacagcagatcattgcagacaacaatctcaacggagcctggtctgataaaattgtactaatcactggaactacatcgggaattggtatcgagacggcgcgagctatgtactcaacaggcgcgcaagtctttgtcatggttcgcgacacgaaaaagatgcaaccaatcgtcgctgagatcctgagctcgacgagcggaaatgggaagatcgaggttatcgaaatgaatttagagtccttaagctccgtcaaaaccgcagctgagcatttcctcagcaaatcaccgaagcttaacgtccttatcaacaacgctggtatcatggcatgtcctccatccctgacggtcgatggttacgagcgacagttcgccgccaattatctatcacacttcaagctcaccactctgcttcttccactgttactttctagtagttccagcgccttcaattctagggtcgtttgggtatcttcatccgcgcatcgaccggatcacataaagattaacttcgacgagctcggaacattgaaagactacgagccttggactatgtacggcaagtcaaagctggcgcagatatgggcatcgaattacatggatcgcgcttatggatcacaaggcgtgcactctctgtcgttgaatccgggaggaatctggactaatttgtcacggtatgttggtcaggaacaaattgataaatggagacaggacgaagaaatgggcaaaggcatgaagtctgctgcgcaaggcgcggcgacgacggtatgggctgctgttgcacccgtttgggaggagaagggtgggaagtatcttgctgattgtaagattgcggagctctcggacaaaccgccttcggctgtcgatgatgctcgcgggaagaatgtttatgatcctgttggagaggagaaattgtgggagttgagttggaagatggtgtcatccagttagaggctggggcggcacaacgactggcaatgctccaaaactcataacctctcgagaatgagccctaacgcttaggggagcaaccttagatagctcgtaacctaggaaacccgagtcagatgttagtctcttcaaacccatcttcgcgttcttgaaacgcctaaatgatgcgtttcaatagtgggaaatttgcaaaaaggcgtagatagatttacggagcgaacgcataatacctaactggtaa

SEQ ID NO: 1309 - DNA, 423 bp, Muscodor strobelii
  misc_feature: SGI cDNA ID NO. 560035
  misc_feature: Encodes the peptide sequence at SEQ ID NO 1310
atgtcgaccgaaaaactcattcgtatcacaactttaatacccaggaagaagggcatgccagaaaaggagttctaccgccactggacccaagttcatgcccctctggttcacgacttcatgaagagacatggtgttattgaatacagacagtttcacaccccgccagagacgaaagcgctcggggaacaaatggtgaaggcgacaggtcggccaatgatctcatttgatggcagcaccgacgtctatgttaaagacttcaagacgttcgaggaggcattcaaagacccggaatacgctgagaagatccgacccgatgagttggcattcatcgatgttgagaatattcaaatgactattgggtatgattatgtgattttggaaaatggggaaattgttacggagcatgcgcggaagattgagtag

SEQ ID NO: 1310 - protein, 140 aa, Muscodor strobelii
  misc_feature: SGI Peptide ID NO. 560035
  misc_feature (2)..(137): NCBI GI: 212542755 Blast Desc: conserved [Penicillium marneffei ATCC 18224] gi|210066439|gb|EEA20532.1| conserved [Penicillium marneffei ATCC 18224]
  misc_feature (1)..(139): NCBI GI: 261361301 Blast Desc: conserved [Verticillium albo-atrum VaMs.102]
  misc_feature (4)..(139): NCBI GI: 46127683 Blast Desc: FG08219.1 [Gibberella zeae PH-1]
  misc_feature (2)..(132): NCBI GI: 242821235 Blast Desc: conserved [Talaromyces stipitatus ATCC 10500] gi|218712560|gb|EED11985.1| conserved [Talaromyces stipitatus ATCC 10500]
  misc_feature (4)..(132): NCBI GI: 46110887 Blast Desc: FG02325.1 [Gibberella zeae PH-1]
  misc_feature (2)..(132): NCBI GI: 238842572 Blast Desc: conserved [Microsporum canis CBS 113480]
  misc_feature (2)..(134): NCBI GI: 67515739 Blast Desc: AN0151.2 [Aspergillus nidulans FGSC A4] gi|40746868|gb|EAA66024.1| AN0151.2 [Aspergillus nidulans FGSC A4]
  misc_feature (4)..(132): NCBI GI: 212538917 Blast Desc: conserved [Penicillium marneffei ATCC 18224] gi|210069356|gb|EEA23447.1| conserved [Penicillium marneffei ATCC 18224]
  misc_feature (5)..(132): NCBI GI: 212529426 Blast Desc: PMAA_031690 [Penicillium marneffei ATCC 18224] gi|210074268|gb|EEA28355.1| PMAA_031690 [Penicillium marneffei ATCC 18224]
  misc_feature (4)..(130): NCBI GI: 189193447 Blast Desc: conserved [Pyrenophora tritici-repentis Pt-1C-BFP] gi|187978626|gb|EDU45252.1| conserved [Pyrenophora tritici-repentis Pt-1C-BFP]
MSTEKLIRITTLIPRKKGMPEKEFYRHWTQVHAPLVHDFMKRHGVIEYRQFHTPPETKALGEQMVKATGRPMISFDGSTDVYVKDFKTFEEAFKDPEYAEKIRPDELAFIDVENIQMTIGYDYVILENGEIVTEHARKIE

SEQ ID NO: 1311 - DNA, 328 bp, Muscodor strobelii
  misc_feature: SGI EST ID NO. CUFF.3621.0
  misc_feature: Variant of the nucleotide sequence at SEQ ID NO 1309
cgaccaggaacaattgcatgaaaaattcaccgcattagccaagatgtcgaccgaaaaactcattcgtatcacaactttaatacccaggaagaagggcatgccagaaaaggagttctaccgccactggacccaagttcatgcccctctggttcacgacttcatgaagagacatggtgttattgaatacagacagtttcacaccccgccagagacgaaagcgctcggggaacaaatggtgaaggcgacaggtcggccaagtataataccccatgattctccatctcataaatagaatcatcacactaatcacttcttatagtgatctcat

SEQ ID NO: 1312 - DNA, 1161 bp, Muscodor strobelii
  misc_feature: SGI cDNA ID NO. 560036
  misc_feature: Encodes the peptide sequence at SEQ ID NO 1313
atgcttttcttactttctgctctgtggtttgcgtcaactgttctcggacaggacgcctgtccggccctccctagtaccatcaattatgctgcaaaccctaaacttcccgatccattcttgcccctaagtggcgagcgagtgacaacagcggacaaatgggcatgtcgcaaacaagagatgaagaagttgatggagcgctattcacttggggagatgccacccaaacctgagtcggtcactgcctctctttccggcagtactctcacgataaacaacagtcagggcggcaagtcgatgtccttcaccgtcactatcaagcttcccacagcgggcacggcaccctatcctgcaataattgcttatggggctgcaagtttacctatccccaatactgttgccactattacgtaccaaaacttcgatatgggcgcggacaacgggcgtgggcaaggcaaattctacaacttatatggcagcagtcatagtgctggagcattcattgcggcagcttggggcgtagaccgcatcatcgatgcattggaacttgtgccggcgaccaagatcgaccccaagcgcgtgggtgtgacgggctgctcccgcaatggcaaaggtgccatgattgctggtgcatgggtagaccggattgctcttgcccttccgcaagaaggcgggcagtcgagcgctggatgctggcgcattgccgacgagatcaagaagaatggcacgaccgttgagaatgcagcccagatcgtgaatggggacacctggttttcgaccgagtttgccaagcatgttaatgagattccaagcatgccgtgggatgttcatttccagcataccttctttgcttcacctccaagaggtctcctggttattgagaatacagcaatcgactatcttgggcctacgagcaactaccattgtgggcttgctgggcgtatggtacatgaggcttttggcatcgcggatcattttgggcttacccaggtttcccacagcgatcactgcgggtttccaagtgcttcgcaagctcctctcacggctttcatcaataggttcttgcttggacagaacgtcagtactgacatctggtccactgatgggaaatgggtgaaagacgagagtaggtgggtgaattggaatgtgccgaagttgacgtag

SEQ ID NO: 1313 - protein, 386 aa, Muscodor strobelii
  misc_feature: SGI Peptide ID NO. 560036
  misc_feature (11)..(386): NCBI GI: 31747154 Blast Desc: Cip2 [Hypocrea jecorina]
  misc_feature (1)..(386): NCBI GI: 169612369 Blast Desc: SNOG_09306 [Phaeosphaeria nodorum SN15] gi|111062378|gb|EAT83498.1| SNOG_09306 [Phaeosphaeria nodorum SN15]
  misc_feature (20)..(386): NCBI GI: 169856114 Blast Desc: CC1G_05856 [Coprinopsis cinerea okayama7#130] gi|116504272|gb|EAU87167.1| CC1G_05856 [Coprinopsis cinerea okayama7#130]
  misc_feature (17)..(386): NCBI GI: 156036158 Blast Desc: SS1G_12765 [Sclerotinia sclerotiorum 1980] gi|154698173|gb|EDN97911.1| SS1G_12765 [Sclerotinia sclerotiorum 1980]
  misc_feature (31)..(386): NCBI GI: 169856116 Blast Desc: CC1G_05857 [Coprinopsis cinerea okayama7#130] gi|116504273|gb|EAU87168.1| CC1G_05857 [Coprinopsis cinerea okayama7#130]
  misc_feature (17)..(386): NCBI GI: 189190264 Blast Desc: Cip2 [Pyrenophora tritici-repentis Pt-1C-BFP] gi|187973077|gb|EDU40576.1| Cip2 [Pyrenophora tritici-repentis Pt-1C-BFP]
  misc_feature (20)..(385): NCBI GI: 171676366 Blast Desc: protein product [Podospora anserina] gi|170936249|emb|CAP60908.1| protein product [Podospora anserina]
  misc_feature (12)..(355): NCBI GI: 116203879 Blast Desc: CHGG_09823 [Chaetomium globosum CBS 148.51] gi|88175951|gb|EAQ83419.1| CHGG_09823 [Chaetomium globosum CBS 148.51]
  misc_feature (21)..(385): NCBI GI: 192360396 Blast Desc: Cellulose or protein binding domain [Cellvibrio japonicus Ueda107] gi|190686561|gb|ACE84239.1| Cellulose or protein binding domain [Cellvibrio japonicus Ueda107]
  misc_feature (33)..(385): NCBI GI: 169850617 Blast Desc: CC1G_09360 [Coprinopsis cinerea okayama7#130] gi|116506883|gb|EAU89778.1| CC1G_09360 [Coprinopsis cinerea okayama7#130]
MLFLLSALWFASTVLGQDACPALPSTINYAANPKLPDPFLPLSGERVTTADKWACRKQEMKKLMERYSLGEMPPKPESVTASLSGSTLTINNSQGGKSMSFTVTIKLPTAGTAPYPAIIAYGAASLPIPNTVATITYQNFDMGADNGRGQGKFYNLYGSSHSAGAFIAAAWGVDRIIDALELVPATKIDPKRVGVTGCSRNGKGAMIAGAWVDRIALALPQEGGQSSAGCWRIADEIKKNGTTVENAAQIVNGDTWFSTEFAKHVNEIPSMPWDVHFQHTFFASPPRGLLVIENTAIDYLGPTSNYHCGLAGRMVHEAFGIADHFGLTQVSHSDHCGFPSASQAPLTAFINRFLLGQNVSTDIWSTDGKWVKDESRWVNWNVPKLT

SEQ ID NO: 1314 - DNA, 383 bp, Muscodor strobelii
  misc_feature: SGI EST ID NO. CUFF.3623.0
  misc_feature: Variant of the nucleotide sequence at SEQ ID NO 1312
taggagcgcatatgttgagtaatggtggtaaacattagcctaaagctgatcgatgtaatagcactaacttacaagcgctcgactcaacagtcactctcgtcccgtgccaagacggccgccggagtcccttttgttcttcgggatcacaatgacacctacctctaaatcctgttcaatgctccgttctcaggaacgggcggggaagagcgagagtggcaaacaaaatggcgagggaacgatataaatgtttgcggccgcttatcctgccctcagatttgaaacatcttagctacagtcctcaataagatcgttgttaaaatcatgcttttcttactttctgctctgtggtttgcgtcaactgttctcggacaggacgcctgtcc

SEQ ID NO: 1315 - DNA, 1446 bp, Muscodor strobelii
  misc_feature: SGI cDNA ID NO. 560037
  misc_feature: Encodes the peptide sequence at SEQ ID NO 1316
atgagctctgttcgcgctcctgcgatggatttgccgagcgcctcactctgggtaaggataggccatgagagcggcttggccgccgtcatcaattcttgccgcgatacgaagacgctgtgcctccagcggttcgttcgattttttgcctacggggcttccttcctcgtcctcgttgactttctaagaagccttggcatatctgatgagaaagtcggcattttcatgacctcgaccctcgttggtgatgccgtcatttctttttttctgaccaccttcgccgaccgggttgggcgccgtcgagtactcttcgttggcgccggtctcatggctgccagcgggctcgccttctctttcagcagaaaccactgggttctcctggctgctagcatctttggtgtgattagtccgagcggcaacgaaattggcccgtttaaggctgttgaggaatccattctggctcaacttaccgatgaggcgcaccgcagcgatatcttcgcttggtataccctaattggcagtgctggggcagctgtaggggccttgtcggggggctggacagtgcaattgttcaagggtctggatgcgtccgggtctaactataccgcctatcgtgtgatttttatagtctatgcactgcttggtatcatcaagttcgtgcttaccctctacctcactcagactgttgaatctcaaagcttggcatccgactatcaggctctcgaatttgaacttgacgaagaagagcttctttcggacgaatctgacgacgaccatcctcgtccccacaaccttcaacctgaacatctaccaacatcgtcagcgaagccggtattgtctcagcgcatattctcattcgtcacgcagatatcacccgcatcatattctatagtatgccgtctcttgcttttgttctttctggactcgttcgcttccggattggcctctccgtcatggctcacgtactttttcacgagcattcactcgcttgagccgggtcttttaggaaccttattcttagttacaggcatactcgcaacgttctccaatcttgctgcgttgccactatctcgccgtatcggacccatcaagaccatggtattcacccatctcccatccgcagtctttttaggcctcgtaccgttgcctccacctggtcgtgtcgggacattacttgccgcgtcttttcttgcgttgcgagcttgcacgcagagtatggatcaagcgccaaggcaggccttcttagctgcggcagtattacctagtgacagaacagccgttttgggagttgtcaatatctcaaagactatagcacaagcaagtggtatagggacatccggcttgttggctggaaagggcctgtgggttgtgttgatctcaggggctggagtcttgaaggcaagctatgacctattgctgctctggatgttcgtagcaacgaggaaatga

SEQ ID NO: 1316 - protein, 481 aa, Muscodor strobelii
  misc_feature: SGI Peptide ID NO. 560037
  misc_feature (39)..(442): Pfam Id: PF07690 Pfam Desc: Major Facilitator Superfamily
  misc_feature (9)..(476): NCBI GI: 261351960 Blast Desc: major facilitator superfamily MFS1 [Verticillium albo-atrum VaMs.102]
  misc_feature (19)..(476): NCBI GI: 156056649 Blast Desc: SS1G_04055 [Sclerotinia sclerotiorum 1980] gi|154701841|gb|EDO01580.1| SS1G_04055 [Sclerotinia sclerotiorum 1980]
  misc_feature (19)..(476): NCBI GI: 256724240 Blast Desc: NECHADRAFT_53606 [Nectria haematococca mpVI 77-13-4]
  misc_feature (19)..(476): NCBI GI: 70986452 Blast Desc: MFS transporter [Aspergillus fumigatus Af293] gi|66846349|gb|EAL86682.1| MFS transporter, [Aspergillus fumigatus Af293]
  misc_feature (19)..(476): NCBI GI: 159128109 Blast Desc: MFS transporter, [Aspergillus fumigatus A1163]
  misc_feature (19)..(476): NCBI GI: 46114976 Blast Desc: FG03330.1 [Gibberella zeae PH-1]
  misc_feature (22)..(476): NCBI GI: 255938552 Blast Desc: Pc14g00520 [Penicillium chrysogenum Wisconsin 54-1255] gi|211584667|emb|CAP74193.1| Pc14g00520 [Penicillium chrysogenum Wisconsin 54-1255]
  misc_feature (23)..(481): NCBI GI: 119474573 Blast Desc: MFS transporter, [Neosartorya fischeri NRRL 181] gi|119407315|gb|EAW17265.1| MFS transporter, [Neosartorya fischeri NRRL 181]
  misc_feature (19)..(480): NCBI GI: 169778566 Blast Desc: [Aspergillus oryzae RIB40] gi|238499047|ref|XP_002380758.1| MFS transporter, [Aspergillus flavus NRRL3357] gi|83772486|dbj|BAE62615.1| protein product MFS
  misc_feature (23)..(481): NCBI GI: 145611178 Blast Desc: MGG_00606 [Magnaporthe grisea 70-15] gi|145018487|gb|EDK02766.1| MGG_00606 [Magnaporthe grisea 70-15]
MSSVRAPAMDLPSASLWVRIGHESGLAAVINSCRDTKTLCLQRFVRFFAYGASFLVLVDFLRSLGISDEKVGIFMTSTLVGDAVISFFLTTFADRVGRRRVLFVGAGLMAASGLAFSFSRNHWVLLAASIFGVISPSGNEIGPFKAVEESILAQLTDEAHRSDIFAWYTLIGSAGAAVGALSGGWTVQLFKGLDASGSNYTAYRVIFIVYALLGIIKFVLTLYLTQTVESQSLASDYQALEFELDEEELLSDESDDDHPRPHNLQPEHLPTSSAKPVLSQRIFSFVTQISPASYSIVCRLLLLFFLDSFASGLASPSWLTYFFTSIHSLEPGLLGTLFLVTGILATFSNLAALPLSRRIGPIKTMVFTHLPSAVFLGLVPLPPPGRVGTLLAASFLALRACTQSMDQAPRQAFLAAAVLPSDRTAVLGVVNISKTIAQASGIGTSGLLAGKGLWVVLISGAGVLKASYDLLLLWMFVATRK

SEQ ID NO: 1317 - DNA, 2380 bp, Muscodor strobelii
  misc_feature: SGI EST ID NO. CUFF.3627.0
  misc_feature: Variant of the nucleotide sequence at SEQ ID NO 1315
cggaactttgcgtaaagatgattgtttcatccatggtgaacttctgcctcgtgctcagaagtgttccacagctgtttatgacgggattcggcttggctggtatcactcccctgtcggtactcagccctacggaatgcgccgtggattcaattacaggaggactgaacaagtcgaactggcctcgaaccaaggtgtttctagaagactgtccaaaaagcttacaaaccctcttagttttgccgtcatgtaattccagtggcttgctcctagcacttgctggcaacggcagccttcaggttgacgctgccagcacttgaaatctacgtcattaagttgagcgattttatgcccgtaaacgccgaactctgccccacgcagaattattgaagcctaaggcaagaaataggtccacaggtatgcgtcacccggttcatcagagaataaagagatggtcgaaatcactctgtcaagatgagctctgttcgcgctcctgcgatggatttgccgagcgcctcactctgggtaaggataggccatgagagcggcttggccgccgtcatcaattcttgccgcgatacgaagacgctgtgcctccagcggttcgttcgattttttgcctacggggcttccttcctcgtcctcgttgactttctaagaagccttggcatatctgatgagaaagtcggcattttcatgacctcgaccctcgttggtgatgccgtcatttctttttttctgaccaccttcgccgaccgggttgggcgccgtcgagtactcttcgttggcgccggtctcatggctgccagcgggctcgccttctctttcagcagaaaccactgggttctcctggctgctagcatctttggtgtgattagtccgagcggcaacgaaattggcccgtttaaggctgttgaggaatccattctggctcaacttaccgatgaggcgcaccgcagcgatatcttcgcttggtataccctaattggcagtgctggggcagctgtaggggccttgtcggggggctggacagtgcaattgttcaagggtctggatgcgtccgggtctaactataccgcctatcgtgtgatttttatagtctatgcactgcttggtatcatcaagttcgtgcttaccctctacctcactcagactgttgaatctcaaagcttggcatccgactatcaggctctcgaatttgaacttgacgaagaagagcttctttcggacgaatctgacgacgaccatcctcgtccccacaaccttcaacctgaacatctaccaacatcgtcagcgaagccggtattgtctcagcgcatattctcattcgtcacgcagatatcacccgcatcatattctatagtatgccgtctcttgcttttgttctttctggactcgttcgcttccggattggcctctccgtcatggctcacgtactttttcacgagcattcactcgcttgagccgggtcttttaggaaccttattcttagttacaggcatactcgcaacgttctccaatcttgctgcgttgccactatctcgccgtatcggacccatcaagaccatggtattcacccatctcccatccgcagtctttttaggcctcgtaccgttgcctccacctggtcgtgtcgggacattacttgccgcgtcttttcttgcgttgcgagcttgcacgcagagtatggatcaagcgccaaggcaggccttcttagctgcggcagtattacctagtgacagaacagccgttttgggagttgtcaatatctcaaagactatagcacaagcaagtggtatagggacatccggcttgttggctggaaagggcctgtgggttgtgttgatctcaggggctggagtcttgaaggcaagctatgacctattgctgctctggatgttcgtagcaacgaggaaatgagggaaaactcttacgtctgctttacaacatatcctacgcactcgtgctcttacactaggcaagcagaacacatcaagactactgacagatcatccaggctctactcctacgaatgaggatgaatggtaatcgccccgactttgatagtttctgtctccacctgatttgagagtcttcttgtagtccttgattgtagtaacctgaaaggacatggcactacacctctatacacgtctttgattcataggcaacagcttaaaagagcaaataacagagtgacatgcatcctgctgaaggatcattagcacatgcacaaacaatcaagtcttgttggttaaatcgtctgcgtgtcagactttactagaaaatcagcactaagtaatcgtttataatttgcaatgatactcacttacgctctacatgacctgcctgttggaggaaggtaggagttattcggctcgaa

SEQ ID NO: 1318 - DNA, 414 bp, Muscodor strobelii
  misc_feature: SGI cDNA ID NO. 560038
  misc_feature: Encodes the peptide sequence at SEQ ID NO 1319
atgttcttcagcaaagggctccttgctgctgtgacagcggcagtattcttctctcaaggcacactagcagctctagataaagcgaatgaataccaaagtgatgattgttctggcgacctcaatttcggccatcacggcctcttctctggcagtttcattactatggacgatactacacattcggtctatctcgctactgtgggcggcgatgggcttttctcttacaaatggcatggattcacggacaaaactggagatggcggttcgtgcacgggagacagacttggtgtacttggaggagagtgtcagaatctggacacaactttcgattctaggatcaagtgcctcaagctctgcgagacagataatcagactaacgagccttatttcgacggtgcttgcaacggtgtgtag

SEQ ID NO: 1319 - protein, 137 aa, Muscodor strobelii
  misc_feature: SGI Peptide ID NO. 560038
  misc_feature (1)..(116): NCBI GI: 46138155 Blast Desc: FG10592.1 [Gibberella zeae PH-1]
  misc_feature (21)..(117): NCBI GI: 85085501 Blast Desc: NCU04447 [Neurospora crassa OR74A] gi|28918616|gb|EAA28288.1| [Neurospora crassa OR74A] gi|40882174|emb|CAF06000.1| conserved [Neurospora crassa]
  misc_feature (1)..(116): NCBI GI: 256727931 Blast Desc: small secreted protein [Nectria haematococca mpVI 77-13-4]
  misc_feature (7)..(117): NCBI GI: 121703263 Blast Desc: conserved [Aspergillus clavatus NRRL 1] gi|119398039|gb|EAW08470.1| conserved [Aspergillus clavatus NRRL 1]
  misc_feature (1)..(117): NCBI GI: 85102169 Blast Desc: NCU04126 [Neurospora crassa OR74A] gi|16944424|emb|CAC28780.2| [Neurospora crassa] gi|28922825|gb|EAA32046.1| [Neurospora crassa OR74A]
  misc_feature (2)..(118): NCBI GI: 256721060 Blast Desc: NECHADRAFT_88706 [Nectria haematococca mpVI 77-13-4]
MFFSKGLLAAVTAAVFFSQGTLAALDKANEYQSDDCSGDLNFGHHGLFSGSFITMDDTTHSVYLATVGGDGLFSYKWHGFTDKTGDGGSCTGDRLGVLGGECQNLDTTFDSRIKCLKLCETDNQTNEPYFDGACNGV

SEQ ID NO: 1320 - DNA, 627 bp, Muscodor strobelii
  misc_feature: SGI cDNA ID NO. 560039
  misc_feature: Elevated expression when VOC is produced
  misc_feature: Encodes the peptide sequence at SEQ ID NO 1321
atggaggtgattggaacaactgctgctgtggcagaactcctgggggcgaccataaaggtcaccaaggcagcgaaaagcctggcgcaatctttgattcaggcaccagaagaactcacagagttggtcgccaaactacaccgccttagcgctcgtgtacaactgcttcaagatctcataaaagatctgaataaacctgggtctagctcagtctttcccccaaattacgagagctttattgcatcgagtattgagcgcaactacgaggctttgctcggcgtggggagccttttgcggccgccaatatcgtcggaacgagatattcataaaagactcacatgggcagtgttggacaagagacgagtcgctcgactactgaacgacattcgagaagccgagacggagttgggcatgatgatcaacatcttagggacgcgcctgagctctatgaatcaaaactcgctcgtcaccctcctcaatgctcgcaataccttacaattgaacttgaaagagtcatttgaagatatcaaagctgtaatacgtcaagaaatcgcatcatcagaggtaagtgtgctcagccgcctcaatgctgccgggtccaatgctatgcaggcacactgtttcttgtga

SEQ ID NO: 1321 - protein, 208 aa, Muscodor strobelii
  misc_feature: SGI Peptide ID NO. 560039
  misc_feature: Useful for introducing or modulating the production of volatile compounds
MEVIGTTAAVAELLGATIKVTKAAKSLAQSLIQAPEELTELVAKLHRLSARVQLLQDLIKDLNKPGSSSVFPPNYESFIASSIERNYEALLGVGSLLRPPISSERDIHKRLTWAVLDKRRVARLLNDIREAETELGMMINILGTRLSSMNQNSLVTLLNARNTLQLNLKESFEDIKAVIRQEIASSEVSVLSRLNAAGSNAMQAHCFL

SEQ ID NO: 1322 - DNA, 1202 bp, Muscodor strobelii
  misc_feature: SGI EST ID NO. CUFF.3640.0
  misc_feature: Variant of the nucleotide sequence at SEQ ID NO 1320
aaacaacttcaaacggtttggtgacgattccatcagtggccatagaagcttgagaatccgagattttatcttgacggtatcatcccgagatggaggtgattggaacaactgctgctgtggcagaactcctgggggcgaccataaaggtcaccaaggcagcgaaaagcctggcgcaatctttgattcaggcaccagaagaactcacagagttggtcgccaaactacaccgccttagcgctcgtgtacaactgcttcaagatctcataaaagatctgaataaacctgggtctagctcagtctttcccccaaattacgagagctttattgcatcgagtattgagcgcaactacgaggctttgctcggcgtggggagccttttgcggccgccaatatcgtcggaacgagatattcataaaagactcacatgggcagtgttggacaagagacgagtcgctcgactactgaacgacattcgagaagccgagacggagttgggcatgatgatcaacatcttagggacgcgcctgagctctatgaatcaaaactcgctcgtcaccctcctcaatgctcgcaataccttacaattgaacttgaaagagtcatttgaagatatcaaagctgtaatacgtcaagaaatcgcatcatcagaggtaagtgtgctcagccgcctcaatgctgccgggtccaatgctatgcaggcacactgtttcttgtgacctaatgatgtaattgggattagagcatatgacaactttcctaattacgaaacgcaacttacactatgacaactgcacggagtactgtcgacatgttcttgcttaacgagctatcgtgaaaatattaaacagcataccaatattcttcgtcaattctccagaagcagacttgtcgcaaaacatccgaaagggctggatgtagatcataccgtagtaatccatatgatatttcgactgagcagtgcagtttatcgccaaatatgacaaagcgattctagccatacgggagatctacatagcgtttgccacaggcaagttgtagacagcccatctacacaccgttgcaagcaccgtcgaaataaggctcgttagtctgattatctgtctcgcagagcttgaggcacttgatcctagaatcgaaagttgtgtccagattctgacactctcctccaagtacaccaagtctgtctcccgtgcacgaaccgc

SEQ ID NO: 1323 - DNA, 1479 bp, Muscodor strobelii
  misc_feature: SGI cDNA ID NO. 560040
  misc_feature: Encodes the peptide sequence at SEQ ID NO 1324
atggaggcaaaatgcagtccattccaagacatgatgccgatagagatgattcaagtcatttccgactacatacagaacgacaaagacgtcggcgcatttcttgcatcatgtcggaccatctacgctgcgtgccactcgcgattcttcagtaacaacttcaatcaaatgattgagcggcacattcgacgagctacacaccgtggacttccagaccctgagaaatgcgttctgagaaacctctttatccggtcggtcgagtcggacagcgtgtgtatgttagtccaaatttccaagagaaatgtactggatcttttccagcactcgatgtctttttctcccctttacccggcaatgaatggtttggatgctcagcagttaaaggacgtaaatcctctccatctggctatcatgagtgatgcaccagctatgattgtctacctgatgaaacaaggtgtcggtatgagcgagcagatggaaaaacacgtcgacttactttcgctctgcttggtattgtcaaaagcaaatcccacacagcgcgaacttaacgatgccatcagaaccgcagtaacataccgtctcctaagatgccttaacaatttactagtccgaggtgcagacccgaattcttacaaccagtttggccttactgcaacacactgtcttttcatggcacgcgctcagctctcaccaggagactcggctctcactaaggcattagccatccgttctctttcacttaaagaccaacgtaccaatcgcgaaaaaatgttaaaccatctcaccacatacgaagctgacttgacactgcgtacacgcaccgggcggtttcatatgtgcaatgaaaggtgctggaagtccattgactgttttcaagggggagagtctgttggccaccttgctgcgtcaagcggttgctggctttccttctgcaacacgccaaacatcgaccttggactaagcacattcagcgaaacagggcagacgccactatttaaagcgctttgccgtgccagactggccgtagtcgagaagatgctggatctatcgttcaaccaggacttcgacatgaatcctattgtcgaaaacatcgataattccaccgcactgcatattgcatgtcgtttcgccttcgtccctgtcgtctcacgtctcctccgttgtggggcgtccgtgaatgacacagacaagcagggacgaacacctttgcacgaagccctccgacagactacgctcggaacagacgaaaacgtaatagcaacactaaaactgttgggtgagttttacgcagatccggatatcgttacggctacgcgaatgccaacaccccgcagcatggcgaagggccacccaatcccaagagtccgggagatgttcaagctcgaggtaaaagaaaagccacctcgattacccaagaggtggttgaagcaaagatctagtgtcagcgccgtggaaagaacgaggtgggacgctcaggcgtaa

SEQ ID NO: 1324 - protein, 492 aa, Muscodor strobelii
  misc_feature: SGI Peptide ID NO. 560040
  misc_feature (364)..(396): Pfam Id: PF00023 Pfam Desc: Ankyrin repeat
  misc_feature (17)..(408): NCBI GI: 47218162 Blast Desc: protein product [Tetraodon nigroviridis]
  misc_feature (68)..(484): NCBI GI: 115965847 Blast Desc: : similar to ankyrin 2,3/unc44 [Strongylocentrotus purpuratus]
  misc_feature (131)..(484): NCBI GI: 115765080 Blast Desc: : similar to ankyrin 2,3/unc44, partial [Strongylocentrotus purpuratus]
  misc_feature (68)..(484): NCBI GI: 115959391 Blast Desc: : similar to ankyrin 2,3/unc44 [Strongylocentrotus purpuratus]
  misc_feature (131)..(484): NCBI GI: 115665348 Blast Desc: : similar to ankyrin 2,3/unc44 [Strongylocentrotus purpuratus]
  misc_feature (121)..(408): NCBI GI: 73952654 Blast Desc: : similar to ankyrin 3 isoform 1 isoform 10 [Canis familiaris]
  misc_feature (121)..(408): NCBI GI: 281351480 Blast Desc: PANDA_003089 [Ailuropoda melanoleuca]
  misc_feature (56)..(419): NCBI GI: 115964109 Blast Desc: : similar to ankyrin 2,3/unc44 [Strongylocentrotus purpuratus]
  misc_feature (121)..(408): NCBI GI: 73952674 Blast Desc: : similar to ankyrin 3, epithelial isoform e isoform 19 [Canis familiaris]
  misc_feature (121)..(408): NCBI GI: 73952662 Blast Desc: : similar to ankyrin 3, epithelial isoform d isoform 14 [Canis familiaris]
MEAKCSPFQDMMPIEMIQVISDYIQNDKDVGAFLASCRTIYAACHSRFFSNNFNQMIERHIRRATHRGLPDPEKCVLRNLFIRSVESDSVCMLVQISKRNVLDLFQHSMSFSPLYPAMNGLDAQQLKDVNPLHLAIMSDAPAMIVYLMKQGVGMSEQMEKHVDLLSLCLVLSKANPTQRELNDAIRTAVTYRLLRCLNNLLVRGADPNSYNQFGLTATHCLFMARAQLSPGDSALTKALAIRSLSLKDQRTNREKMLNHLTTYEADLTLRTRTGRFHMCNERCWKSIDCFQGGESVGHLAASSGCWLSFCNTPNIDLGLSTFSETGQTPLFKALCRARLAVVEKMLDLSFNQDFDMNPIVENIDNSTALHIACRFAFVPVVSRLLRCGASVNDTDKQGRTPLHEALRQTTLGTDENVIATLKLLGEFYADPDIVTATRMPTPRSMAKGHPIPRVREMFKLEVKEKPPRLPKRWLKQRSSVSAVERTRWDAQA

SEQ ID NO: 1325 - DNA, 564 bp, Muscodor strobelii
  misc_feature: SGI EST ID NO. CUFF.3645.0
  misc_feature: Variant of the nucleotide sequence at SEQ ID NO 1323
gtcaaaagcaaatcccacacagcgcgaacttaacgatgccatcagaaccgcagtaacataccgtctcctaagatgccttaacaatttactagtccgaggtgcagacccgaattcttacaaccagtttggccttactgcaacacactgtcttttcatggcacgcgctcagctctcaccaggagactcggctctcactaaggcattagccatccgttctctttcacttaaagaccaacgtaccaatcgcgaaaaaatgttaaaccatctcaccacatacgaagctgacttgacactgcgtacacgcaccgggcggtttcatatgtgcaatgaaaggtgctggaagtccattgactgttttcaagggggagagtctgttggccaccttgctgcgtcaagcggttgctggctttccttctgcaacacgccaaacatcgaccttggactaagcacattcagcgaaacagggcagacgccactatttaaagcgctttgccgtgccagactggccgtagtcgagaagatgctggatctatcgttcaaccaggacttcgacatgaatcctat

SEQ ID NO: 1326 - DNA, 1041 bp, Muscodor strobelii
  misc_feature: SGI cDNA ID NO. 560041
  misc_feature: Encodes the peptide sequence at SEQ ID NO 1327
atggtaggctcacgagatcttgaacctcgaaccgggtcctacgggcaagtcttcttccataatcaattcagagcaacaccgaaatggccatcgccaactacagacttgtcaagaaagacggcgatcatcacaggcgccaacgtcggtttgggctatgaggctgccagccagctattggacctcaagctctctcatctagttatcggtgcacgatcgcttcagcgcggtgaagatgctgcaacgattttgcggagacaacatcctcaagctcgcatcgatgtctgggaggtggacatggcgtcttatgcttcggttcaagcgttcgcacagcgggctgactcacagttggcgcgtgtcgatatggtgctgctcaatgccggcctgacacgcgacaagttctcaacagttcctagcacagggcatcaagagactatccaggtgaactatctgtcaactgtcttgctcgctctgctgctcctccccatactcaagcggaagggcccactgaacggcgaaccagcgcatctttcaattgtcaacgccgcattatcactgcgagcaagccttcccaaccccaaagccgatcctctgcttccatcgtttgacgatccgttgacatttgatgctctagagcattactgtctaagcaagttgcttgcgcatatgttcttgtggaaattggtggagtatgtatctgcggaagacgtgatcgtgaatctgtccgatcctgcatggtgccgggggtcaaatctacaccgcgatacggaaggtgcattgaagaaagttggcatgaagatcttcggcttgctgggacgaacgcctcgtctcggcgcctcatgtttcgttgacgcattggtgaacaaaggtaaagagtctcatggcacttttctaatgagctgggagatacatccgtttgcttcgatgctgtatactcccgaaggtcgatccatcaccgagagactgtggaatgaaacattagacgaactcgactttacagacgtaagatccatcttggatataatgaaagagcgcaaggagtga

SEQ ID NO: 1327 - protein, 346 aa, Muscodor strobelii
  misc_feature: SGI Peptide ID NO. 560041
  misc_feature (39)..(190): Pfam Id: PF00106 Pfam Desc: short chain dehydrogenase
  misc_feature (39)..(161): Pfam Id: PF00106 Pfam Desc: short chain dehydrogenase
  misc_feature (2)..(341): NCBI GI: 145233707 Blast Desc: An02g10970 [Aspergillus niger] gi|134057159|emb|CAK48762.1| protein product [Aspergillus niger]
  misc_feature (1)..(344): NCBI GI: 238505799 Blast Desc: short-chain dehydrogenase/reductase family protein, [Aspergillus flavus NRRL3357] gi|220690218|gb|EED46568.1| short-chain dehydrogenase/reductase family protein, [Aspergillus
  misc_feature (1)..(344): NCBI GI: 256730051 Blast Desc: NECHADRAFT_82657 [Nectria haematococca mpVI 77-13-4]
  misc_feature (1)..(304): NCBI GI: 169780140 Blast Desc: [Aspergillus oryzae RIB40] gi|83773274|dbj|BAE63401.1| protein product [Aspergillus oryzae]
  misc_feature (2)..(341): NCBI GI: 212529584 Blast Desc: short-chain dehydrogenase/reductase family protein, [Penicillium marneffei ATCC 18224] gi|210074347|gb|EEA28434.1| short-chain dehydrogenase/reductase family protein, [Penicillium
  misc_feature (1)..(343): NCBI GI: 256720619 Blast Desc: NECHADRAFT_50449 [Nectria haematococca mpVI 77-13-4]
  misc_feature (16)..(329): NCBI GI: 39974993 Blast Desc: MGG_00357 [Magnaporthe grisea 70-15] gi|145018753|gb|EDK03032.1| MGG_00357 [Magnaporthe grisea 70-15]
  misc_feature (4)..(341): NCBI GI: 46139917 Blast Desc: FG11473.1 [Gibberella zeae PH-1]
  misc_feature (5)..(345): NCBI GI: 256735657 Blast Desc: NECHADRAFT_90563 [Nectria haematococca mpVI 77-13-4]
  misc_feature (23)..(329): NCBI GI: 46103007 Blast Desc: FG00073.1 [Gibberella zeae PH-1]
MVGSRDLEPRTGSYGQVFFHNQFRATPKWPSPTTDLSRKTAIITGANVGLGYEAASQLLDLKLSHLVIGARSLQRGEDAATILRRQHPQARIDVWEVDMASYASVQAFAQRADSQLARVDMVLLNAGLTRDKFSTVPSTGHQETIQVNYLSTVLLALLLLPILKRKGPLNGEPAHLSIVNAALSLRASLPNPKADPLLPSFDDPLTFDALEHYCLSKLLAHMFLWKLVEYVSAEDVIVNLSDPAWCRGSNLHRDTEGALKKVGMKIFGLLGRTPRLGASCFVDALVNKGKESHGTFLMSWEIHPFASMLYTPEGRSITERLWNETLDELDFTDVRSILDIMKERKE

SEQ ID NO: 1328 - DNA, 618 bp, Muscodor strobelii
  misc_feature: SGI EST ID NO. CUFF.3657.0
  misc_feature: Variant of the nucleotide sequence at SEQ ID NO 1326
ggaagggcccactgaacggcgaaccagcgcatctttcaattgtcaacgccgcattatcactgcgagcaagccttcccaaccccaaagccgatcctctgcttccatcgtttgacgatccgttgacatttgatgctctagagcattactgtctaagcaagttgcttgcgcatatgttcttgtggaaattggtggagtatgtatctgcggaagacgtgatcgtgaatctgtccgatcctgcatggtgccgggggtcaaatctacaccgcgatacggaaggtgcattgaagaaagttggcatgaagatcttcggcttgctgggacgaacgcctcgtctcggcgcctcatgtttcgttgacgcattggtgaacaaaggtaaagagtctcatggcacttttctaatgagctgggagatacatccgtttgcttcgatgctgtatactcccgaaggtcgatccatcaccgagagactgtggaatgaaacattagacgaactcgactttacagacgtaagatccatcttggatataatgaaagagcgcaaggagtgagcattgatgctctgagagcttcgccttatgttcagctataatgtgtatagaagtgagcgtatggagagcg

SEQ ID NO: 1329 - DNA, 1227 bp, Muscodor strobelii
  misc_feature: SGI cDNA ID NO. 560042
  misc_feature: Encodes the peptide sequence at SEQ ID NO 1330
atgctttcctgcctagccccagttctattcgctttgatgaccctggtggcaagtatagcagagaaacctcaaatgggatggaacacctacaatgcatacaagagtcttatcaacgagtcggcgctggaagcggctatcgatgggattgtccgaactggcatgagagacgttggctaccagtatattactatggatgacggctggagtgcttatgagagagatgccagtggcaaccttcaagtcgatctggcacggtttcccaaaggcattaaatctcttgccgactacgcacacaaacgtgggaccaagctgggcatctacagcgacgccgggatatatggctgcggctttcggcctggaagctacggctacgagcagcgggacgccgcactctgggcttcttggggcattgattacctcaaatatgataattgcggaggctttttgggtatgaccgaggcagttcaggagcgatttcttgcgatgagcgtagcattgaaggacagcggccgcgaaattttcttctcgttgtgcgaatgggggttccagttcccttggtggtgggcagacgagatcggccagagttaccgaatggctggcgatatacatggttcattcgctagtgacaactctggtgtttgcaagacagcatattgtttgaacacaggatatgcaggcactagcgtcttaaccaccatccgcaagatgcgcgagatatcacggtttcagaagccgggatcttgggccgacatggatctgcttgagattggcaataacttcatgtctacaaccgaagaacaaacacacatggccttctgggcagccctcaagtctccattaattgcgagcaccaatcttgacacaattaacaaaacctcgttagacatcctgatgaacaaggagattatcgccattaatcaagatgatcttggtgtcgccgtcaactatgtgcctgagttgtcggttgagaatagcattcagatatggtgtggtcccttatcatcggcttcttcgcaatttgtcattctggtattcaacgagaaggataccacgcaggatatctctttcatgttgagcgatatgcctggtttctctgcctctgtcgctgaggaatatgttatccgagacgtttggagaaaaaattatgttaccagtatcaggaataaggtcacgctcctaagcgtcagcgctcatgaaaccaaggtgctagtgttcaagagaatttaa

SEQ ID NO: 1330 - protein, 408 aa, Muscodor strobelii
  misc_feature: SGI Peptide ID NO. 560042
  misc_feature (3)..(348): Pfam Id: PF02065 Pfam Desc: Melibiase
  misc_feature (38)..(108): Pfam Id: PF02065 Pfam Desc: Melibiase
  misc_feature (1)..(405): NCBI GI: 256721591 Blast Desc: NECHADRAFT_78539 [Nectria haematococca mpVI 77-13-4]
  misc_feature (19)..(361): NCBI GI: 159124808 Blast Desc: alpha-galactosidase [Aspergillus fumigatus A1163]
  misc_feature (19)..(361): NCBI GI: 70990042 Blast Desc: alpha-galactosidase [Aspergillus fumigatus Af293] gi|66847502|gb|EAL87832.1| alpha-galactosidase [Aspergillus fumigatus Af293]
  misc_feature (17)..(361): NCBI GI: 119497533 Blast Desc: alpha-galactosidase/alpha-n-acetylgalactosaminidase [Neosartorya fischeri NRRL 181] gi|119413687|gb|EAW23628.1| alpha-galactosidase/alpha-n-acetylgalactosaminidase [Neosartorya
  misc_feature (1)..(405): NCBI GI: 261360985 Blast Desc: alpha-galactosidase [Verticillium albo-atrum VaMs.102]
  misc_feature (18)..(361): NCBI GI: 145228527 Blast Desc: An01g01320 [Aspergillus niger] gi|134054663|emb|CAK43504.1| protein product [Aspergillus niger]
  misc_feature (10)..(405): NCBI GI: 52699549 Blast Desc: glycosyl hydrolase family-like protein [Salvia miltiorrhiza]
  misc_feature (13)..(405): NCBI GI: 29335747 Blast Desc: alpha-galactosidase [Helianthus annuus]
  misc_feature (10)..(380): NCBI GI: 225448651 Blast Desc: [Vitis vinifera] gi|270236110|emb|CBI25379.1| protein product [Vitis vinifera]
  misc_feature (2)..(407): NCBI GI: 18415796 Blast Desc: AtAGAL2 (Arabidopsis thaliana ALPHA-GALACTOSIDASE 2); alpha-galactosidase/ catalytic/ hydrolase, hydrolyzing O-glycosyl compounds gi|19699069|gb|AAL90902.1| AT5g08370/F8L15_100 protein
  misc_feature (15)..(405): SWISSPROT Homolog: EC 3.2.1.22 Alpha-galactosidase
MLSCLAPVLFALMTLVASIAEKPQMGWNTYNAYKSLINESALEAAIDGIVRTGMRDVGYQYITMDDGWSAYERDASGNLQVDLARFPKGIKSLADYAHKRGTKLGIYSDAGIYGCGFRPGSYGYEQRDAALWASWGIDYLKYDNCGGFLGMTEAVQERFLAMSVALKDSGREIFFSLCEWGFQFPWWWADEIGQSYRMAGDIHGSFASDNSGVCKTAYCLNTGYAGTSVLTTIRKMREISRFQKPGSWADMDLLEIGNNFMSTTEEQTHMAFWAALKSPLIASTNLDTINKTSLDILMNKEIIAINQDDLGVAVNYVPELSVENSIQIWCGPLSSASSQFVILVFNEKDTTQDISFMLSDMPGFSASVAEEYVIRDVWRKNYVTSIRNKVTLLSVSAHETKVLVFKRI

SEQ ID NO: 1331 - DNA, 636 bp, Muscodor strobelii
  misc_feature: SGI cDNA ID NO. 560043
  misc_feature: Encodes the peptide sequence at SEQ ID NO 1332
atgagacaccaattcctccttgccgcagtggctactctccttgggatcgttctgtctcgcgagccacttgattcagtatcagttcctgttgataactatgtgcttccagtgtccagagagacaaagactctactggatttcttccagtcgcgagaggagctatctaatctaacggccataatctcacaagctgccggattcactgatgcattcaataccccggctacctggaactggacattcttcgcgccttcgaacacagcgttcgagcaactgggagagtacttcaccacatatgcagctacggctaagggcaaatggtggctgggcaatttgttggtgcaccattacatacccagctcgtcaatacgcgctgcttctttcaactcaactttacaacgattccaaactgggtcctatctttacgtctctgcccagaccgttggagaccagattattctgaataaagctgcgtctattacggaaaaggatatcactgaggtccccggtggtgttgttcatatcatagaccgggtgcttaacccgtcagcgcagatcttcgaggcagatattggcaaagttcctcaaagcttcattgctgggagctgctcgaatcgtgctctgccatactgctaa

SEQ ID NO: 1332 - protein, 211 aa, Muscodor strobelii
  misc_feature: SGI Peptide ID NO. 560043
  misc_feature (53)..(182): Pfam Id: PF02469 Pfam Desc: Fasciclin domain
  misc_feature (9)..(211): NCBI GI: 256721563 Blast Desc: NECHADRAFT_78540 [Nectria haematococca mpVI 77-13-4]
  misc_feature (5)..(211): NCBI GI: 261360986 Blast Desc: conserved [Verticillium albo-atrum VaMs.102]
  misc_feature (19)..(166): NCBI GI: 119497531 Blast Desc: NFIA_023380 [Neosartorya fischeri NRRL 181] gi|119413686|gb|EAW23627.1| conserved [Neosartorya fischeri NRRL 181]
  misc_feature (6)..(165): NCBI GI: 145228525 Blast Desc: An01g01310 [Aspergillus niger] gi|134054662|emb|CAK43503.1| [Aspergillus niger]
  misc_feature (33)..(136): NCBI GI: 70990044 Blast Desc: AFUA_1G01210 [Aspergillus fumigatus Af293] gi|66847503|gb|EAL87833.1| AFUA_1G01210 [Aspergillus fumigatus Af293] gi|159124807|gb|EDP49925.1| AFUB_079590 [Aspergillus
  misc_feature (43)..(188): NCBI GI: 44662805 Blast Desc: periostin isoform 2 [Danio rerio] gi|42627706|dbj|BAD11143.1| periostin [Danio rerio] gi|190337894|gb|AAI62274.1| Periostin, osteoblast specific factor
  misc_feature (43)..(188): NCBI GI: 118150590 Blast Desc: periostin isoform 1 [Danio rerio] gi|117558473|gb|AAI25908.1| Periostin, osteoblast specific factor [Danio rerio]
  misc_feature (1)..(182): NCBI GI: 257453815 Blast Desc: beta-Ig-H3/fasciclin [Enhydrobacter aerosaccus SK60] gi|257448742|gb|EEV23707.1| beta-Ig-H3/fasciclin [Enhydrobacter aerosaccus SK60]
  misc_feature (41)..(186): NCBI GI: 91095131 Blast Desc: : similar to midline fasciclin [Tribolium castaneum] gi|270015611|gb|EFA12059.1| TcasGA2_TC012903 [Tribolium castaneum]
  misc_feature (43)..(185): NCBI GI: 81300415 Blast Desc: Beta-Ig-H3/fasciclin [Synechococcus elongatus PCC 7942] gi|81169296|gb|ABB57636.1| Beta-Ig-H3/fasciclin [Synechococcus elongatus PCC 7942]
MRHQFLLAAVATLLGIVLSREPLDSVSVPVDNYVLPVSRETKTLLDFFQSREELSNLTAIISQAAGFTDAFNTPATWNWTFFAPSNTAFEQLGEYFTTYAATAKGKWWLGNLLVHHYIPSSSIRAASFNSTLQRFQTGSYLYVSAQTVGDQIILNKAASITEKDITEVPGGVVHIIDRVLNPSAQIFEADIGKVPQSFIAGSCSNRALPYC

SEQ ID NO: 1333 - DNA, 301 bp, Muscodor strobelii
  misc_feature: SGI EST ID NO. CUFF.3666.0
  misc_feature: Variant of the nucleotide sequence at SEQ ID NO 1331
ctcaactttacaacgattccaaactgggtcctatctttacgtctctgcccagaccgttggagaccagattattctgaataaagctgcgtctattacggaaaaggatatcactgaggtccccggtggtgttgttcatatcatagaccgggtgcttaacccgtcagcgcagatcttcgaggcagatattggcaaagttcctcaaagcttcattgctgggagctgctcgaatcgtgctctgccatactgctaaattgtttggaacatttcgggcctcttaagtagcctcaatagagaataatcg

SEQ ID NO: 1334 - DNA, 1194 bp, Muscodor strobelii
  misc_feature: SGI cDNA ID NO. 560044
  misc_feature: Encodes the peptide sequence at SEQ ID NO 1335
atgcgcttcttgacagttgtcacgtcatatctttccgctgttctacctgtggcggtttctttagtaactgacacccctagcatcaatgctgcgatcccttacgttccgcctacgatcgcgtcgaaaaagcgaccatcagatttcgtgcatccagggctatggcattctcacgaggatcttgagttgatccgcaaaagtgtattgaaacagcagaacccttggtattcagcgtacgaattatttgccaacgatacgtactcaatagccgcgtatcagatgcaaggcccgaagcctgtcatcagccgcggttccatctctaactacacgtccttctctgctgattcccggtacatcacgaagaatgatgcgcattacagaaccgccacaggtatacttgatagttggggttcgaacctcgtcgatatcattggcacagaccgctcactgctgattgggattgagggcgacatgtttgtgaacgcggccgagatcatgcgctgggaagctggctggatcgaggccggggctaaatggcagggcggtacgggtttcagtatccagctctattggctcttcgcgcgacaaagtcttgtcatcggacaggccaattatggtattgcgtccatcaaagccctgatgaattttgccgtttatctagaagacgtgtctatgtacaacttcgctgtttggtcttggttaaatgacccatgcgcgggcattgagtcgacaatcgaaccgcacacaggtcagagctccgagtctggccgtgaccaaagccatgtaatgtcaggcttaggatggctggcgctcggagctcgtacagccaagaatcagggtgtcgacatctatcgctatgccggcgacctactctacaaaggcggagaatatgtggccaaatacagcttagggaatgacgtgccatatgatcctgagtttcgccgctgtgaggcggtcctcgtcaacggaccatggccggtcatcgccgagtataacagattcattgttaatacgaccacgctcccgatcaagaagagtccaaatgtgtgggacctgctctactatactgccaaatcgcatgggcttccggcaccttggacatcgaaggcaaagacgatgaacgataagtatggcggcgaggcaatatactcagggaacgaactggtcggatggggtgatctgctgtgggcggcttag

SEQ ID NO: 1335 - protein, 397 aa, Muscodor strobelii
  misc_feature: SGI Peptide ID NO. 560044
  misc_feature (6)..(396): NCBI GI: 256721586 Blast Desc: NECHADRAFT_78532 [Nectria haematococca mpVI 77-13-4]
  misc_feature (13)..(396): NCBI GI: 119497529 Blast Desc: NFIA_023370 [Neosartorya fischeri NRRL 181] gi|119413685|gb|EAW23626.1| conserved [Neosartorya fischeri NRRL 181]
  misc_feature (13)..(396): NCBI GI: 70990046 Blast Desc: conserved [Aspergillus fumigatus Af293] gi|66847504|gb|EAL87834.1| conserved [Aspergillus fumigatus Af293] gi|159124806|gb|EDP49924.1| conserved [Aspergillus A1163]
  misc_feature (2)..(396): NCBI GI: 238500732 Blast Desc: conserved [Aspergillus flavus NRRL3357] gi|220691837|gb|EED48184.1| conserved [Aspergillus flavus NRRL3357]
  misc_feature (48)..(396): NCBI GI: 256728650 Blast Desc: NECHADRAFT_51123 [Nectria haematococca mpVI 77-13-4]
  misc_feature (4)..(396): NCBI GI: 145228535 Blast Desc: An01g01360 [Aspergillus niger] gi|134054667|emb|CAK43508.1| protein product [Aspergillus niger]
  misc_feature (48)..(396): NCBI GI: 261360983 Blast Desc: conserved [Verticillium albo-atrum VaMs.102]
  misc_feature (26)..(387): NCBI GI: 67526057 Blast Desc: AN3486.2 [Aspergillus nidulans FGSC A4] gi|40739857|gb|EAA59047.1| AN3486.2 [Aspergillus nidulans FGSC A4] gi|259482002|tpe|CBF76056.1| TPA: conserved [Aspergillus FGSC
  misc_feature (24)..(395): NCBI GI: 260170881 Blast Desc: glycoside hydrolase family protein [Bacteroides sp. D2]
  misc_feature (46)..(395): NCBI GI: 260651585 Blast Desc: secreted protein [Streptomyces scabiei 87.22]
MRFLTVVTSYLSAVLPVAVSLVTDTPSINAAIPYVPPTIASKKRPSDFVHPGLWHSHEDLELIRKSVLKQQNPWYSAYELFANDTYSIAAYQMQGPKPVISRGSISNYTSFSADSRYITKNDAHYRTATGILDSWGSNLVDIIGTDRSLLIGIEGDMFVNAAEIMRWEAGWIEAGAKWQGGTGFSIQLYWLFARQSLVIGQANYGIASIKALMNFAVYLEDVSMYNFAVWSWLNDPCAGIESTIEPHTGQSSESGRDQSHVMSGLGWLALGARTAKNQGVDIYRYAGDLLYKGGEYVAKYSLGNDVPYDPEFRRCEAVLVNGPWPVIAEYNRFIVNTTTLPIKKSPNVWDLLYYTAKSHGLPAPWTSKAKTMNDKYGGEAIYSGNELVGWGDLLWAA

SEQ ID NO: 1336 - DNA, 2274 bp, Muscodor strobelii
  misc_feature: SGI cDNA ID NO. 560045
  misc_feature: Encodes the peptide sequence at SEQ ID NO 1337
atggcgccgccgacgagtgactccgaaggcaatccgtatgaggatgagcataatgatgcctcgggctttacagcagccaaacacgaggacggtccaccttgttcgcactgcgcccgacagcagttggagtgcgtttacgatgaaaaaaggacgaggcctggtatgcgcgctggtgcgattgagcacttgacacaacgggttgcgactcttgaaaatatgtttctcggtcagggaatactatggcaagacctgtggtcacatatgtcacaaagttacacgcgaagcgaagaacccgcccttccaggcgccaacggaagcttacgatcgcgcactggtcgactacgagaatcaatcttggcaatacaacgcaatggcagctccagcgagcagcatgatactgaagagcagcagcgttcggctaagcggcggaaagtagacgaagctcatggggcgagcacttccgccgggctcctcttcggcgatgacggagatgtgagcctgccagatgatttgatcgactcagtaaccgaaatatacttcgctcgcgttcacccgtggattccaatgcttcacgaatctcgcttcaaagagtcgatggtggtagctcacgagcgcactcgactgaagatgatattttatgccatcacttccgtttgtgcgcgcctctccggcgacccaaggttatctgatgcacagacgcggtctgccttgagtatcaagtgtcgaagaacggtcatactagctgctatggagtcattttccattgagaacctccaggcccttgtcatctgtgccttcgatattatcggaaatggccagggaccatctgcatggtccattgtgggaagtatggctcgaactgtagagtatttacaactcagtgttgagcgcgatgatgatcaacggttaccaaacaatttccaagtcctcatcaagcgtgccgcctttctacctccgagccgggactgggccgaggtggaaggtaggcgacgtgtattttggaatatctttctcatggaccgtttctgcagtatggcgacaggatggaacgtatctttgaagagcgaagaaataaagcgaagacttccttgcgaaggcaaactgtggaagagggctgagcctctagcagtaccaacaccttatctcggggtcgccgaccgatctttagagacagaggagacgcttctgagttctgcgtccggagaaaaggcaatggagtctttagggggattcgcctattgtattgaggctacagagagcctcagtctcgtgagctctttcttccttcaacaggtggttgacttcgccagcgtgcaagagactcagcgctggatgctgcgtttcaagaagcttgaccttcgccttgtgcagtggaaattatttctacccgagagatggaaggtagcatgtgctctcaacgaggacggtataatggaccctaacttgactctcgcacatatcactcacaatacggctgttgtattgctccaccaatgcatcgcttatcctccaacgagttggcaggcaacgcctctaaagctgccatcagtgtctagcgctgagacgtgtattgcagcagctagagaagttgctattatagcacataattttcttgaaggaagcgactttcttgcgaatccgcagttctccttctgcctcttcatctgtggcagactctttctcgcccatgcaaattattataaaatcgagatccctatgagcttccgttctttaatagagagcttacaagagatatcgagtagatggaacggacattccgccgtgtcggaacaggatcctgcgcaaaatttggcgtcaaaattcgcccaaagattgctccaagccggacagcaagggggcaacgctttggacatccgccagtcagctttccctggtaacgcgccacaagacacgagaccggccacccctacttcgcgttctaggccacaacctcaaccattcccgagccaatctatacatgagccgatgactttctactacgatcagcaggcatctccggatggtatttcactagcataccctccgctacccacggctttccagatgcccagtaacattatatcggatccgatgcaggagtttgatttcaatgcctggcagcatgttcctaatgatatgatgactgcggttcagccaggacttgaccaggtcgacgcattacagtccttcttggaccactcgttcctatccagtgaaagaatcagcgtatactctgatttgcaatctgctaacgtacctaacgggagaaattga

SEQ ID NO: 1337 - protein, 757 aa, Muscodor strobelii
  misc_feature: SGI Peptide ID NO. 560045
  misc_feature (254)..(366): Pfam Id: PF04082 Pfam Desc: Fungal specific transcription factor domain
  misc_feature (33)..(751): NCBI GI: 261360988 Blast Desc: conserved [Verticillium albo-atrum VaMs.102]
  misc_feature (33)..(688): NCBI GI: 238500720 Blast Desc: C6 transcription factor, [Aspergillus flavus NRRL3357] gi|220691831|gb|EED48178.1| C6 transcription factor, [Aspergillus flavus NRRL3357]
  misc_feature (33)..(679): NCBI GI: 169782269 Blast Desc: [Aspergillus oryzae RIB40] gi|83774340|dbj|BAE64464.1| protein product [Aspergillus oryzae]
  misc_feature (26)..(716): NCBI GI: 145228529 Blast Desc: An01g01330 [Aspergillus niger] gi|134054664|emb|CAK43505.1| protein product [Aspergillus niger]
  misc_feature (33)..(630): NCBI GI: 256721562 Blast Desc: NECHADRAFT_11702 [Nectria haematococca mpVI 77-13-4]
  misc_feature (26)..(688): NCBI GI: 70990050 Blast Desc: C6 transcription factor [Aspergillus fumigatus Af293] gi|66847506|gb|EAL87836.1| C6 transcription factor, [Aspergillus fumigatus Af293] gi|159124804|gb|EDP49922.1| C6 transcription
  misc_feature (26)..(688): NCBI GI: 119497525 Blast Desc: fungal specific transcription factor, [Neosartorya fischeri NRRL 181] gi|119413683|gb|EAW23624.1| fungal specific transcription factor, [Neosartorya fischeri NRRL 181]
  misc_feature (30)..(755): NCBI GI: 256723371 Blast Desc: NECHADRAFT_51776 [Nectria haematococca mpVI 77-13-4]
  misc_feature (30)..(612): NCBI GI: 46129286 Blast Desc: FG08828.1 [Gibberella zeae PH-1]
  misc_feature (29)..(752): NCBI GI: 169778437 Blast Desc: [Aspergillus oryzae RIB40] gi|83772421|dbj|BAE62551.1| protein product [Aspergillus oryzae]
MAPPTSDSEGNPYEDEHNDASGFTAAKHEDGPPCSHCARQQLECVYDEKRTRPGMRAGAIEHLTQRVATLENMFLGQGILWQDLWSHMSQSYTRSEEPALPGANGSLRSRTGRLRESILAIQRNGSSSEQHDTEEQQRSAKRRKVDEAHGASTSAGLLFGDDGDVSLPDDLIDSVTEIYFARVHPWIPMLHESRFKESMVVAHERTRLKMIFYAITSVCARLSGDPRLSDAQTRSALSIKCRRTVILAAMESFSIENLQALVICAFDIIGNGQGPSAWSIVGSMARTVEYLQLSVERDDDQRLPNNFQVLIKRAAFLPPSRDWAEVEGRRRVFWNIFLMDRFCSMATGWNVSLKSEEIKRRLPCEGKLWKRAEPLAVPTPYLGVADRSLETEETLLSSASGEKAMESLGGFAYCIEATESLSLVSSFFLQQVVDFASVQETQRWMLRFKKLDLRLVQWKLFLPERWKVACALNEDGIMDPNLTLAHITHNTAVVLLHQCIAYPPTSWQATPLKLPSVSSAETCIAAAREVAIIAHNFLEGSDFLANPQFSFCLFICGRLFLAHANYYKIEIPMSFRSLIESLQEISSRWNGHSAVSEQDPAQNLASKFAQRLLQAGQQGGNALDIRQSAFPGNAPQDTRPATPTSRSRPQPQPFPSQSIHEPMTFYYDQQASPDGISLAYPPLPTAFQMPSNIISDPMQEFDFNAWQHVPNDMMTAVQPGLDQVDALQSFLDHSFLSSERISVYSDLQSANVPNGRN

SEQ ID NO: 1338 - DNA, 2963 bp, Muscodor strobelii
  misc_feature: SGI EST ID NO. CUFF.3679.0
  misc_feature: Variant of the nucleotide sequence at SEQ ID NO 1336
ggacactgcatgccaagacagcgaagtgatcttgtacaaggaagcacatcagcgggctacagggtccacttagtggctgtcaagagccacgcgaaatgctcaggagcattctccctcccctgacgtcccctgaagacctcaaaatggacataaggtatcgcgtacctaaagagcctaccgcgtggggatcttacctggtacgcattgcacaacgttatgtgaaattcctctggtgagatggtgcattcacactctgccctgcggcgtagtacaatttaccactctcgaaattcggtttcttcccactagagttgctcggggtgaagtgagcgctctaaatggcgccgccgacgagtgactccgaaggcaatccgtatgaggatgagcataatgatgcctcgggctttacagcagccaaacacgaggacggtccagtatgtatagtagatatcaatggactgcacgcgaacaggtgtcgttggctgacgtccctctcacaaaggcatgtcaaaattgcagacgtaaaaaatcaaggtgctcacgaacacagccttgttcgcactgcgcccgacagcgtgcgttgctggaacaacctgatcgtctacttatctgaccattgccgtagagttggagtgcgtttacgatgaaaaaaggacgaggcctggtatgcgcgctggtgcgattgagcacttgacacaacgggttgcgactcttgaaaatatgtttctcggtcagggaatactatggcaagacctgtggtcacatatgtcacaaagttacacgcgaagcgaagaacccgcccttccaggcgccaacggaagcttacgatcgcgcactggtcgactacgagaatcaatcttggcaatacaacgcaatggcagctccagcgagcagcatgatactgaagagcagcagcgttcggctaagcggcggaaagtagacgaagctcatggggcgagcacttccgccgggctcctcttcggcgatgacggagatgtgagcctgccagatgatttgatcgactcagtaaccgaaatatacttcgctcgcgttcacccgtggattccaatgcttcacgaatctcgcttcaaagagtcgatggtggtagctcacgagcgcactcgactgaagatgatattttatgccatcacttccgtttgtgcgcgcctctccggcgacccaaggttatctgatgcacagacgcggtctgccttgagtatcaagtgtcgaagaacggtcatactagctgctatggagtcattttccattgagaacctccaggcccttgtcatctgtgccttcgatattatcggaaatggccagggaccatctgcatggtccattgtgggaagtatggctcgaactgtagagtatttacaactcagtgttgagcgcgatgatgatcaacggttaccaaacaatttccaagtcctcatcaagcgtgccgcctttctacctccgagccgggactgggccgaggtggaaggtaggcgacgtgtattttggaatatctttctcatggaccgtttctgcagtatggcgacaggatggaacgtatctttgaagagcgaagaaataaagcgaagacttccttgcgaaggcaaactgtggaagagggctgagcctctagcagtaccaacaccttatctcggggtcgccgaccgatctttagagacagaggagacgcttctgagttctgcgtccggagaaaaggcaatggagtctttagggggattcgcctattgtattgaggctacagagagcctcagtctcgtgagctctttcttccttcaacaggtggttgacttcgccagcgtgcaagagactcagcgctggatgctgcgtttcaagaagcttgaccttcgccttgtgcagtggaaattatttctacccgagagatggaaggtagcatgtgctctcaacgaggacggtataatggaccctaacttgactctcgcacatatcactcacaatacggctgttgtattgctccaccaatgcatcgcttatcctccaacgagttggcaggcaacgcctctaaagctgccatcagtgtctagcgctgagacgtgtattgcagcagctagagaagttgctattatagcacataattttcttgaaggaagcgactttcttgcgaatccgcagttctccttctgcctcttcatctgtggcagactctttctcgcccatgcaaattattataaaatcgagatccctatgagcttccgttctttaatagagagcttacaagagatatcgagtagatggaacggacattccgccgtgtcggaacaggatcctgcgcaaaatttggcgtcaaaattcgcccaaagattgctccaagccggacagcaagggggcaacgctttggacatccgccagtcagctttccctggtaacgcgccacaagacacgagaccggccacccctacttcgcgttctaggccacaacctcaaccattcccgagccaatctatacatgagccgatgactttctactacgatcagcaggcatctccggatggtatttcactagcataccctccgctacccacggctttccagatgcccagtaacattatatcggatccgatgcaggagtttgatttcaatgcctggcagcatgttcctaatgatatgatgactgcggttcagccaggacttgaccaggtcgacgcattacagtccttcttggaccactcgttcctatccagtgaaagaatcagcgtatactctgatttgcaatctgctaacgtacctaacgggagaaattgagttaacacgcattgtccgcattagtttggtatatgtacagatatctaaccgattaaactaaagcttgatgtttcatgtcgtggacatgcatcaaaacctggcatgtcgaagtcgatggcggacctgcgcaattcttacatatgtaaaaatgataatatgtgtgtctaaataaaggagcacaatta

SEQ ID NO: 1339 - DNA, 1569 bp, Muscodor strobelii
  misc_feature: SGI cDNA ID NO. 560046
  misc_feature: Encodes the peptide sequence at SEQ ID NO 1340
atggaaaaacagcacatggtccagccgacagacaacgtcaagatatcgcattatgaaacattcgaggctcaggggaacaaggtggcaagtgactccggaagagacgttgagttgaacgccattgcgcatgagcctgccatacagattgatgcggcaacaaacaagaagcttttctggacaatcaatagacgcatcctcgggtgtatgctggtaacttactttctacaatcgcttgacaaggggagcctcgctttcgcgtctgttcaaggtctcattcaagacgcgcacctcgtagggtctcagtatagctggcttgggtcagttttgtatctcggagtgttagtcggagaatttcctacgaacttgctactccagaagtttcccattgccaaatacttatctataaatgtttttctctggggtgcagttgtggctacctcagccgctgctaacaattttgctggactggttgtcgtccgactgctgttgggtatcttcgagtcttcagtgcagcctgcgtttgtgctcatgacaagcatgtggtataccagggaagaacagtccattctgatctcactttggtattgtatgcttggtgtgcagcaggctctaggtggcatcctgggttggggggtgtcgcactacaaagatggtatcatcaagtcctggcagctcctttttctcgttcttggtcttgcaactgttgtgtgggccgtcttcatggcctggtggcttccagattcacctatgaaggcgaagtgtaagtcattttatatcttacgtccatatatcagcttcactgtcgagcaaagacggctgatgatcgagcgtgtccgtgccaatgagacaggcattcaaaacaaaatattcaaacgctatcagatgcttgaggctttcagagatccccttatttggtgctacgcctcatcctcacttacgtccaatttgatcattggtggactaggcgtatttcaaaacctcattgtcagctcgtttggtttcgactacttgcagactcagctgctcaacattgctcaaggtacaatcgtcgttggacttgttattggcgccgccactttctctacctactctaaacaaactgtgttgacgatgcatctttggtctattcctccaataatcggaacagcagtaatattctctatccctccaacgagctccaacaaggtcggcctcttgtttgccttctatgcgacacagttctttttctgccaagtcaacctcgttttatcgcttatttctcgtaatgtcgggggacagacgaagaagacatatgtgatggcaatccactttgtctcttgggcaattgggaacttcattgcgccccagatattccagatttcggacggaccacgttaccttcacggatttactgtgcacttcgtcctatatggcgtttacaacgtgattcttgccgtcatgcgcgtgctgcttgttcgccgaaataatcaaaagattgcagcatcggcagggcagggttctatagatcactcccgcgctttcgacgacctcactgatagagagaatcccaactttaggtattgctactaa

SEQ ID NO: 1340 - protein, 522 aa, Muscodor strobelii
  misc_feature: SGI Peptide ID NO. 560046
  misc_feature (69)..(448): Pfam Id: PF07690 Pfam Desc: Major Facilitator Superfamily
  misc_feature (1)..(520): NCBI GI: 256721587 Blast Desc: NECHADRAFT_78533 [Nectria haematococca mpVI 77-13-4]
  misc_feature (35)..(519): NCBI GI: 159124802 Blast Desc: MFS transporter, [Aspergillus fumigatus A1163]
  misc_feature (35)..(519): NCBI GI: 146322333 Blast Desc: MFS transporter [Aspergillus fumigatus Af293] gi|129556965|gb|EAL87838.2| MFS transporter, [Aspergillus fumigatus Af293]
  misc_feature (35)..(519): NCBI GI: 119497521 Blast Desc: allantoate permease [Neosartorya fischeri NRRL 181] gi|119413681|gb|EAW23622.1| allantoate permease [Neosartorya fischeri NRRL 181]
  misc_feature (69)..(519): NCBI GI: 238500724 Blast Desc: MFS transporter, [Aspergillus flavus NRRL3357] gi|220691833|gb|EED48180.1| MFS transporter, [Aspergillus flavus NRRL3357]
  misc_feature (42)..(522): NCBI GI: 145228533 Blast Desc: An01g01350 [Aspergillus niger] gi|134054666|emb|CAK43507.1| protein product [Aspergillus niger]
  misc_feature (32)..(519): NCBI GI: 169782273 Blast Desc: [Aspergillus oryzae RIB40] gi|83774342|dbj|BAE64466.1| protein product [Aspergillus oryzae]
  misc_feature (14)..(522): NCBI GI: 115401878 Blast Desc: conserved [Aspergillus terreus NIH2624] gi|114190468|gb|EAU32168.1| conserved [Aspergillus terreus NIH2624]
  misc_feature (12)..(522): NCBI GI: 254565801 Blast Desc: Allantoin permease [Pichia pastoris GS115] gi|238029807|emb|CAY67730.1| Allantoin permease [Pichia pastoris GS115]
  misc_feature (15)..(522): NCBI GI: 50421601 Blast Desc: DEHA0E00770g [Debaryomyces hansenii CBS767]
MEKQHMVQPTDNVKISHYETFEAQGNKVASDSGRDVELNAIAHEPAIQIDAATNKKLFWTINRRILGCMLVTYFLQSLDKGSLAFASVQGLIQDAHLVGSQYSWLGSVLYLGVLVGEFPTNLLLQKFPIAKYLSINVFLWGAVVATSAAANNFAGLVVVRLLLGIFESSVQPAFVLMTSMWYTREEQSILISLWYCMLGVQQALGGILGWGVSHYKDGIIKSWQLLFLVLGLATVVWAVFMAWWLPDSPMKAKCKSFYILRPYISFTVEQRRLMIERVRANETGIQNKIFKRYQMLEAFRDPLIWCYASSSLTSNLIIGGLGVFQNLIVSSFGFDYLQTQLLNIAQGTIVVGLVIGAATFSTYSKQTVLTMHLWSIPPIIGTAVIFSIPPTSSNKVGLLFAFYATQFFFCQVNLVLSLISRNVGGQTKKTYVMAIHFVSWAIGNFIAPQIFQISDGPRYLHGFTVHFVLYGVYNVILAVMRVLLVRRNNQKIAASAGQGSIDHSRAFDDLTDRENPNFRYCY

SEQ ID NO: 1341 - DNA, 724 bp, Muscodor strobelii
  misc_feature: SGI EST ID NO. CUFF.3687.0
  misc_feature: Variant of the nucleotide sequence at SEQ ID NO 1339
gcttcactgtcgagcaaagacggctgatgatcgagcgtgtccgtgccaatgagacaggcattcaaaacaaaatattcaaacgctatcagatgcttgaggctttcagagatccccttatttggtgctacgcctcatcctcacttacgtccaatttgatcattggtggactaggcgtatttcaaaacctcattgtcagctcgtttggtttcgactacttgcagactcagctgctcaacattgctcaaggtacaatcgtcgttggacttgttattggcgccgccactttctctacctactctaaacaaactgtgttgacgatgcatctttggtctattcctccaataatcggaacagcagtaatattctctatccctccaacgagctccaacaaggtcggcctcttgtttgccttctatgcgacacagttctttttctgccaagtcaacctcgttttatcgcttatttctcgtaatgtcgggggacagacgaagaagacatatgtgatggcaatccactttgtctcttgggcaattgggaacttcattgcgccccagatattccagatttcggacggaccacgttaccttcacggatttactgtgcacttcgtcctatatggcgtttacaacgtgattcttgccgtcatgcgcgtgctgcttgttcgccgaaataatcaaaagattgcagcatcggcagggcagggttctatagatcactcccgcgc

SEQ ID NO: 1342 - DNA, 1419 bp, Muscodor strobelii
  misc_feature: SGI cDNA ID NO. 560047
  misc_feature: Encodes the peptide sequence at SEQ ID NO 1343
atgtcaaagagacggcgcacgacagagcatatctctgcatcgtcaacaaaagcgatgtctgacttatcagagcgggatcccccaacccctgaactctcaccaacgcttgcgaatggcgccaagctcagtacttgcgtattcaacggcaactgtgccaagacgcttggccgtttgtactcacgtaatgttgaaaaaaaggtatgggcaattgcatcgacagcaattgcacaggcacagccgccaacaaagtttccagagtatacgcaacctggcagcgtggagtatgttaacactgagttggacttctggacgtcaggtttctttcctggatcactctactgtctccttcagcgaaaacggatgtatgcaacagcttcctgcgcatctgaggggggaagagtgcacgatttacaacttgaatttgcgtgcagatggtggacagagaatttacatcaaaatgcatacctaagcactacgcacgacttaggctttatgatagcaccctgggctagaccagcctgggagctgaatcgcgatcacaaatctttaacaacgatgatacaggcggcgaagacattacatgggcggttcaacaagacggtcggcatgataagatcgtgggacacttgtgtaacgaagcgctatcaatttctcaatccagcacgtgagtttttgacaattattgataacatgatgaatctagacctcctcttctacgtttcacgattgacgaacaataaacaaatgttcaatgacgcggctcaacacgcactaacaacaatgcgcactcatattcggtcagattactcgacgattcatcttgtcaccttcgacccggaaacgggcgacgtgagcgagaggctcacgaaccaggggtacaaagacacatcatgctggacccggggccaggcgtgggcgatcgcaggttttgcagagtcataccattggactcatgaggaagaatttcttgtcaccgcacgagcgtgtgcggactacttcctgcgccgtttgcccaccagcggtgttccgccctgggacttcgacgcaggagaagagcatggcgtgcatacacaaccaactgacaccagcgccgcaatgattgctgcttacggcttgctattgattcacaaggcactcattgccatgagacaggagtccacatatttggcgagtgcgttgaagctggttgagagcgtttgtcgagatcacgtgaacggttacggtcctattgatagcaaccaacccaatgtgactgtcggtgataccattctcaatggggcgacgatcaataatcacgagtacgccccgaggcgatgggcgaaccacgggttggtctatgctgattattactttatagtcattggcaatctcctcttagatatgggtgttggacagttaatatgcaaagctgcggtatag

SEQ ID NO: 1343 - protein, 472 aa, Muscodor strobelii
  misc_feature: SGI Peptide ID NO. 560047
  misc_feature (92)..(450): Pfam Id: PF07470 Pfam Desc: Glycosyl Hydrolase Family 88
  misc_feature (237)..(373): Pfam Id: PF07470 Pfam Desc: Glycosyl Hydrolase Family 88
  misc_feature (58)..(463): NCBI GI: 256721588 Blast Desc: NECHADRAFT_37406 [Nectria haematococca mpVI 77-13-4]
  misc_feature (58)..(463): NCBI GI: 261360989 Blast Desc: unsaturated glucuronyl hydrolase [Verticillium albo-atrum VaMs.102]
  misc_feature (48)..(463): NCBI GI: 70990052 Blast Desc: glucuronyl hydrolase [Aspergillus fumigatus Af293] gi|66847507|gb|EAL87837.1| glucuronyl hydrolase, [Aspergillus fumigatus Af293] gi|159124803|gb|EDP49921.1| glucuronyl fumigatus
  misc_feature (48)..(463): NCBI GI: 119497523 Blast Desc: glycosyl hydrolase family 88 protein [Neosartorya fischeri NRRL 181] gi|119413682|gb|EAW23623.1| glycosyl hydrolase family 88 protein [Neosartorya fischeri NRRL 181]
  misc_feature (34)..(463): NCBI GI: 145228531 Blast Desc: An01g01340 [Aspergillus niger] gi|134054665|emb|CAK43506.1| protein product [Aspergillus niger]
  misc_feature (58)..(463): NCBI GI: 238500722 Blast Desc: glucuronyl hydrolase, [Aspergillus flavus NRRL3357] gi|220691832|gb|EED48179.1| glucuronyl hydrolase, [Aspergillus flavus NRRL3357]
  misc_feature (64)..(463): NCBI GI: 169782271 Blast Desc: [Aspergillus oryzae RIB40] gi|83774341|dbj|BAE64465.1| protein product [Aspergillus oryzae]
  misc_feature (57)..(463): NCBI GI: 190344441 Blast Desc: PGUG_00214 [Pichia guilliermondii ATCC 6260]
  misc_feature (57)..(463): NCBI GI: 146421786 Blast Desc: PGUG_00214 [Pichia guilliermondii ATCC 6260]
  misc_feature (57)..(465): NCBI GI: 50421615 Blast Desc: DEHA0E01023g [Debaryomyces hansenii CBS767] gi|49655029|emb|CAG87553.1| DEHA2E00748p [Debaryomyces hansenii]
MSKRRRTTEHISASSTKAMSDLSERDPPTPELSPTLANGAKLSTCVFNGNCAKTLGRLYSRNVEKKVWAIASTAIAQAQPPTKFPEYTQPGSVEYVNTELDFWTSGFFPGSLYCLLQRKRMYATASCASEGGRVHDLQLEFACRWWTENLHQNAYLSTTHDLGFMIAPWARPAWELNRDHKSLTTMIQAAKTLHGRFNKTVGMIRSWDTCVTKRYQFLNPAREFLTIIDNMMNLDLLFYVSRLTNNKQMFNDAAQHALTTMRTHIRSDYSTIHLVTFDPETGDVSERLTNQGYKDTSCWTRGQAWAIAGFAESYHWTHEEEFLVTARACADYFLRRLPTSGVPPWDFDAGEEHGVHTQPTDTSAAMIAAYGLLLIHKALIAMRQESTYLASALKLVESVCRDHVNGYGPIDSNQPNVTVGDTILNGATINNHEYAPRRWANHGLVYADYYFIVIGNLLLDMGVGQLICKAAV

SEQ ID NO: 1344 - DNA, 346 bp, Muscodor strobelii
  misc_feature: SGI EST ID NO. CUFF.3690.0
  misc_feature: Variant of the nucleotide sequence at SEQ ID NO 1342
gacacttgtgtaacgaagcgctatcaatttctcaatccagcacgtgagtttttgacaattattgataacatgatgaatctagacctcctcttctacgtttcacgattgacgaacaataaacaaatgttcaatgacgcggctcaacacgcactaacaacaatgcgcactcatattcggtcagattactcgacgattcatcttgtcaccttcgacccggaaacgggcgacgtgagcgagaggctcacgaaccaggggtacaaagacacatcatgctggacccggggccaggcgtgggcgatcgcaggttttgcagagtcataccattggactcatgaggaagaatttc

SEQ ID NO: 1345 - DNA, 1221 bp, Muscodor strobelii
  misc_feature: SGI cDNA ID NO. 560048
  misc_feature: Encodes the peptide sequence at SEQ ID NO 1346
atgcatcgtcctacaatgggaagaggagcaatcctcctggtcatgctgccctgtacgggagttctaggcgctgctgcaccagcgccgtcctacgaagtcagctcaagagcaacatacacccatccaggtctcctacacactgctgatgacttcacacgcatcacctccaaggtcaatgccaaatccgagccctggtacaccggatgggagaagctcaccgcgcatgcaacaacggactacactccaagtccggtggcaaccctctatcgaggcacaggtacacctgagaactacgccagtctataccgggacgtcgccgtggcctacgcaaacgccatcgcttggaaagtgagcggcacaaccgagtatgccgacgtagcaggcgatatcctagatggctggagttcaactctcactctcatcgatgggaccagcgacaaatttctcgcgtccgggctctatggttaccagttcgccaacgcagcagaaatcttgcgtggctattctggatggagtggtctctccgatacaatcagcatgctcgagaaggtcttttatcccatgaatcacgacttccttgtgaatcacaacggtgctgcaattgaccactactgggcgaattgggatctatgcaatattgccgcgatgcaggcgattggctatctctctgacaattcgactaccgtgagcgaggcaaacgattacttccagaatggtgatggaaatggcgcccttggcaaagctatctggatcacgtatgaagtgggaaatcccactgatgtgttaggtcaaggacaggaagctggaagagatcagggccacgccatgttggatttcgcacttctcggagtcattggtcagcaggcctataaccaaggaaccgacttgttctcgcttcttgacaaccgtattttggcaggggcggaatatgtcgcgttgtacaatcttaacgagacagtcccttatacaacgtatacaaacagcgacgtgacgcaaagcgttattagcgcgaactcccgtgcatcggtccgacctatctgggagctactttacgcacactatggccagctcaaaggtctagatgcgcctcatacgcaggagtatcgagattgggtggttgagcagtctggaggggctgagggtggcggcggtgattatggctctacgagcggtgggtatgatcaacttggctatggtactctcatgttccgtcttgactag

SEQ ID NO: 1346 - protein, 406 aa, Muscodor strobelii
  misc_feature: SGI Peptide ID NO. 560048
  misc_feature (26)..(405): NCBI GI: 70990062 Blast Desc: GPI anchored protein [Aspergillus fumigatus Af293] gi|66847512|gb|EAL87842.1| GPI anchored protein, [Aspergillus fumigatus Af293] gi|159124798|gb|EDP49916.1| GPI anchored A1163]
  misc_feature (33)..(405): NCBI GI: 119497517 Blast Desc: NFIA_023310 [Neosartorya fischeri NRRL 181] gi|119413679|gb|EAW23620.1| conserved [Neosartorya fischeri NRRL 181]
  misc_feature (12)..(406): NCBI GI: 145241914 Blast Desc: An09g02890 [Aspergillus niger] gi|134078145|emb|CAK40226.1| protein product [Aspergillus niger]
  misc_feature (40)..(406): NCBI GI: 67900584 Blast Desc: AN7279.2 [Aspergillus nidulans FGSC A4] gi|40741960|gb|EAA61150.1| AN7279.2 [Aspergillus nidulans FGSC A4] gi|259483373|tpe|CBF78710.1| TPA: GPI anchored protein, FGSC
  misc_feature (39)..(397): NCBI GI: 169775743 Blast Desc: [Aspergillus oryzae RIB40] gi|83771073|dbj|BAE61205.1| protein product [Aspergillus oryzae]
  misc_feature (33)..(406): NCBI GI: 256728362 Blast Desc: NECHADRAFT_97801 [Nectria haematococca mpVI 77-13-4]
  misc_feature (34)..(406): NCBI GI: 222087403 Blast Desc: exopolysaccharide inner membrane protein [Agrobacterium radiobacter K84] gi|221724851|gb|ACM28007.1| exopolysaccharide inner membrane protein [Agrobacterium K84]
  misc_feature (33)..(405): NCBI GI: 271500311 Blast Desc: exopolysaccharide inner membrane protein [Dickeya dadantii Ech586] gi|270343866|gb|ACZ76631.1| exopolysaccharide inner membrane protein [Dickeya dadantii Ech586]
  misc_feature (39)..(405): NCBI GI: 237801657 Blast Desc: exopolysaccharide inner membrane protein [Pseudomonas syringae pv. oryzae str. 1_6]
  misc_feature (21)..(370): NCBI GI: 261360984 Blast Desc: conserved [Verticillium albo-atrum VaMs.102]
MHRPTMGRGAILLVMLPCTGVLGAAAPAPSYEVSSRATYTHPGLLHTADDFTRITSKVNAKSEPWYTGWEKLTAHATTDYTPSPVATLYRGTGTPENYASLYRDVAVAYANAIAWKVSGTTEYADVAGDILDGWSSTLTLIDGTSDKFLASGLYGYQFANAAEILRGYSGWSGLSDTISMLEKVFYPMNHDFLVNHNGAAIDHYWANWDLCNIAAMQAIGYLSDNSTTVSEANDYFQNGDGNGALGKAIWITYEVGNPTDVLGQGQEAGRDQGHAMLDFALLGVIGQQAYNQGTDLFSLLDNRILAGAEYVALYNLNETVPYTTYTNSDVTQSVISANSRASVRPIWELLYAHYGQLKGLDAPHTQEYRDWVVEQSGGAEGGGGDYGSTSGGYDQLGYGTLMFRLD

SEQ ID NO: 1347 - DNA, 2112 bp, Muscodor strobelii
  misc_feature: SGI cDNA ID NO. 560049
  misc_feature: Encodes the peptide sequence at SEQ ID NO 1348
atgtcaggtccgtctgagctatcaccatgggcagctcgatttcctacgcaattggagtcggatgagcgaccagtttgggcactgacattagatgcttggcagcattccggactggcatacgaataccctcgaaagaacccaaaattctataatgacgaatcagtcccgaaacctggcgacaaacccgcaattggcgatgacttcatacgattcttcacaggtgaacatgtgcaagagggtgcacttaacggcgtcacgacggcgctagttacctcactcagtcgctgggcatggcattctcggaaattcggattaatatctggaggacatgtcccagttgtagccaaagacaaccaagagcgaaagcagttacaagcggaggcggaaagagtagtcgatgaaatatttcatagtgagagattgacagtaaacgagagttcctggttcccattcttccaaaaggaccgatggtatgacccggacgaagatgaatgttatccctattttgacgatggacattggagcgtcgacaacccacaactttgggacgttatgaggctctctattgagctagcgaatcggatgttgaatgcgcttattgatgatgggaaagacatacttgagacgatcatgtttgggcgaatcgactattggaggaacttcgaaggccttggtggtccgcctcctggagaagattctcttgttctcttgtcggcgggtatgaaagcaagggcatctctaccacaggccgagactccaagatctatgattcatgaattgatgcatgcgatcatcttccaacgtatggcgaacacgaaggatccttggaacaagttgacgccgggagaccgtacgagaatagacgaactgattgaacccttcattgatttcgaccatctttccgagataggggcggcttccgaggcgagaattttcaatgggagagttccatcgaaccaaaccgggtataatgtgattccgctagcgcactcaggcgagatctggccattcccaacagcgactggatttcttaatcaacaccacgatatcttccgtgacggaagtatcttgaccatcgaacatcttgctgcaatacagactgctagactactcacagaggacttctggactagtggcgtagctccgagtaggaaaagtgacaacaactggcatcgctattccatattctcgtcatctagcaccatctccaaggcggctcggtatgggggacggccgtctgtatggggtgctgtgacagtagacaggagtactgccagaaactggctggctggcgatgaagactctgtcggcgcgtggcatcaaagacgccgatatcttgagctatgtcgaaagggttggtatgttaaagagaaggcattatggataaacactccctggtcatatcccgtttggcatctaagtcaaatcgatatcttccggaaagcactttcaaccaaagacgaagcagtcggcgcccttgctgcccaacaactcgttaccctgttaccctggaaagacgagacgcaatttagaaacggattgcccaccccgactagtttaaggaatcacgattggatcttcttcgtactcggcattcttatgtacgcagtcttgccactacgcacaaagggctccgtcacacgatcagaagatcccggagaaattttcatttctctcatacctagaaaaggcaccgctcctggcggtccgcggagatttgagcgtgcgtcggaagattttaatgctcctcctgattatcgaaaagcaaactccttccacgacccattcaacggcggtcgcgaacgcaagcctccgacgcacgatcattatctcgatctcgcggaccgaattcttacggagatcaagaatacaaggggcctagtatgtcgaccctggtataacgagctcctcctcgtagcgagcgacatacgagcagatcggaaacaactcaaaatgaaatatcctgatggtcaccagacacaatggtcaagtgcgtggacattcgagatcccgcgatatgaggatagggaacatttttggatgcagtggtcggatgtggataatgactgggtgagattcggggatttacctcctggtgctacttttgagtag

SEQ ID NO: 1348 - protein, 703 aa, Muscodor strobelii
  misc_feature: SGI Peptide ID NO. 560049
  misc_feature (53)..(200): NCBI GI: 85089861 Blast Desc: NCU09292 [Neurospora crassa OR74A] gi|28919473|gb|EAA28908.1| NCU09292 [Neurospora crassa OR74A]
MSGPSELSPWAARFPTQLESDERPVWALTLDAWQHSGLAYEYPRKNPKFYNDESVPKPGDKPAIGDDFIRFFTGEHVQEGALNGVTTALVTSLSRWAWHSRKFGLISGGHVPVVAKDNQERKQLQAEAERVVDEIFHSERLTVNESSWFPFFQKDRWYDPDEDECYPYFDDGHWSVDNPQLWDVMRLSIELANRMLNALIDDGKDILETIMFGRIDYWRNFEGLGGPPPGEDSLVLLSAGMKARASLPQAETPRSMIHELMHAIIFQRMANTKDPWNKLTPGDRTRIDELIEPFIDFDHLSEIGAASEARIFNGRVPSNQTGYNVIPLAHSGEIWPFPTATGFLNQHHDIFRDGSILTIEHLAAIQTARLLTEDFWTSGVAPSRKSDNNWHRYSIFSSSSTISKAARYGGRPSVWGAVTVDRSTARNWLAGDEDSVGAWHQRRRYLELCRKGWYVKEKALWINTPWSYPVWHLSQIDIFRKALSTKDEAVGALAAQQLVTLLPWKDETQFRNGLPTPTSLRNHDWIFFVLGILMYAVLPLRTKGSVTRSEDPGEIFISLIPRKGTAPGGPRRFERASEDFNAPPDYRKANSFHDPFNGGRERKPPTHDHYLDLADRILTEIKNTRGLVCRPWYNELLLVASDIRADRKQLKMKYPDGHQTQWSSAWTFEIPRYEDREHFWMQWSDVDNDWVRFGDLPPGATFE

SEQ ID NO: 1349 - DNA, 1602 bp, Muscodor strobelii
  misc_feature: SGI cDNA ID NO. 560050
  misc_feature: Encodes the peptide sequence at SEQ ID NO 1350
atggcgggctttggcgagtacccgccaaatatggcgccgcaggatgcccttgtcgtccgcgaacaggctctgcccgaccatgcagtcgttccctacacgggcgaggacctcgccagacccaagatgggccctgccaatcccttccgagacgagagccgcgccctgaagcgcaagaacgtgttgacgggtactgccgaagagacgttcgtcagcgagcataccttccgcagcaagcaccgtgccatcgagcgcaaaggcggcccagagcgcgaataccagtccggccaggctgccaaggaagaggctgccaagatacgcgcaggcagacagaggaaaggcgatgcgaccatcgcagacggcgacggcgcatatgttggcccttgggccaagtataagaaggacgagtgggaagaggttgatgacgacgtggagctagcaagcgacgaggaggtcgaatacgtttacgaggacgacgacgaagcagccgatgtcgtcgccagtggaaccgtcgtgtctgcaccagcaggcgcattggcgagacggaaagaggtcgaggagctaggagacgagacgactactttccatggcaccgagcagttcgactaccaggggcggacatacatgcacataccacaagacctcgacatcgatctgcgcaaggaggccggcagcatcacaaactacattcccaagaagctggtacacacttggaaacatcatggcgacaaggcagtcactgccctgcgcttcttccccaactctggacatcttctactatcgtctggcgccgacacgacagtcaagatattcgacgtataccacaacaaagaactattacgaagctactccggccacagcaaggccgtgtccgacataagcttcaaccgcgacggcacacaattcatatccggatcctacgaccgacagatgaaactctgggacacggaaacaggtacctgcctcaacaaattcaccaccggcaaaacaccacacgtcctcaaattcaacccctcggtcgagcattcccacgaattcctagctggattatcagataacaagatcgtgcaattcgacacgcgaacacgggagctcgtgcaagaatacgatcaccatctcaatgctataaacaccataaccttcgtcgacgacaaccgacgcttcatgacgacgtcggacgataagtcgattcgcgcctgggattggaacataccggtcccgattaaatacattgcagaaccacacctctaccccatcacacgcgccgctcttcacccctcgcagaaatacctcgcatgtcaatcctccgataatcaagtcctggtctacggcgcaacagacaaattccgacagaacaggaagaagagctttcgaggacacaataacgcaggcacggccgttgatctggcgtttagtcctgatggacagttcctcgcgagtggtgacagtgcaggctttgttgctttctgggactggaagacttgcaagatgtatcataagttgcaagctggcgatcacgccatcacgtgtgtgcagtggcatccccaggagactagtaaggttgttgcggctggaatggacggtgttattcggtattgggattag

SEQ ID NO: 1350 - protein, 533 aa, Muscodor strobelii
  misc_feature: SGI Peptide ID NO. 560050
  misc_feature (276)..(314): Pfam Id: PF00400 Pfam Desc: WD domain, G-beta repeat
  misc_feature (362)..(400): Pfam Id: PF00400 Pfam Desc: WD domain, G-beta repeat
  misc_feature (494)..(533): Pfam Id: PF00400 Pfam Desc: WD domain, G-beta repeat
  misc_feature (231)..(271): Pfam Id: PF00400 Pfam Desc: WD domain, G-beta repeat
  misc_feature (450)..(490): Pfam Id: PF00400 Pfam Desc: WD domain, G-beta repeat
  misc_feature (1)..(533): NCBI GI: 256730859 Blast Desc: NECHADRAFT_74360 [Nectria haematococca mpVI 77-13-4]
  misc_feature (1)..(533): NCBI GI: 46109034 Blast Desc: FG01399.1 [Gibberella zeae PH-1]
  misc_feature (1)..(533): NCBI GI: 261355367 Blast Desc: pre-mRNA-processing factor 17 [Verticillium albo-atrum VaMs.102]
  misc_feature (1)..(533): NCBI GI: 154312575 Blast Desc: BC1G_05890 [Botryotinia fuckeliana B05.10] gi|150849991|gb|EDN25184.1| BC1G_05890 [Botryotinia fuckeliana B05.10]
  misc_feature (1)..(533): NCBI GI: 39946026 Blast Desc: MGG_08133 [Magnaporthe grisea 70-15] gi|145019383|gb|EDK03611.1| MGG_08133 [Magnaporthe grisea 70-15]
  misc_feature (1)..(533): NCBI GI: 164424657 Blast Desc: NCU06921 [Neurospora crassa OR74A] gi|157070607|gb|EAA30032.2| NCU06921 [Neurospora crassa OR74A]
  misc_feature (1)..(485): NCBI GI: 156035837 Blast Desc: SS1G_13123 [Sclerotinia sclerotiorum 1980] gi|154698527|gb|EDN98265.1| SS1G_13123 [Sclerotinia sclerotiorum 1980]
  misc_feature (33)..(533): NCBI GI: 154273270 Blast Desc: conserved [Ajellomyces capsulatus NAm1] gi|150415999|gb|EDN11343.1| conserved [Ajellomyces capsulatus NAm1]
  misc_feature (33)..(533): NCBI GI: 239608508 Blast Desc: mRNA splicing factor [Ajellomyces dermatitidis ER-3]
  misc_feature (33)..(533): NCBI GI: 225555803 Blast Desc: pre-mRNA-splicing factor [Ajellomyces capsulatus G186AR]
  misc_feature (232)..(532): SWISSPROT Homolog: EC 2.7.11.1 Non-specific serine/threonine protein kinase
MAGFGEYPPNMAPQDALVVREQALPDHAVVPYTGEDLARPKMGPANPFRDESRALKRKNVLTGTAEETFVSEHTFRSKHRAIERKGGPEREYQSGQAAKEEAAKIRAGRQRKGDATIADGDGAYVGPWAKYKKDEWEEVDDDVELASDEEVEYVYEDDDEAADVVASGTVVSAPAGALARRKEVEELGDETTTFHGTEQFDYQGRTYMHIPQDLDIDLRKEAGSITNYIPKKLVHTWKHHGDKAVTALRFFPNSGHLLLSSGADTTVKIFDVYHNKELLRSYSGHSKAVSDISFNRDGTQFISGSYDRQMKLWDTETGTCLNKFTTGKTPHVLKFNPSVEHSHEFLAGLSDNKIVQFDTRTRELVQEYDHHLNAINTITFVDDNRRFMTTSDDKSIRAWDWNIPVPIKYIAEPHLYPITRAALHPSQKYLACQSSDNQVLVYGATDKFRQNRKKSFRGHNNAGTAVDLAFSPDGQFLASGDSAGFVAFWDWKTCKMYHKLQAGDHAITCVQWHPQETSKVVAAGMDGVIRYWD

SEQ ID NO: 1351 - DNA, 1842 bp, Muscodor strobelii
  misc_feature: SGI EST ID NO. CUFF.3702.0
  misc_feature: Variant of the nucleotide sequence at SEQ ID NO 1349
aacaaatacatcgccgtctaccactatggcgggctttggcgagtacccgccaaatatggcgccgcaggatgcccttgtcgtccgcgaacaggctctgcccgaccatgcagtcgttccctacacgggcgaggacctcgccagacccaagatgggccctgccaatcccttccgagacgagagccgcgccctgaagcgcaagaacgtgttgacgggtactgccgaagagacgttcgtcagcgagcataccttccgcagcaagcaccgtgccatcgagcgcaaaggcggcccagagcgcgaataccagtccggccaggctgccaaggaagaggctgccaagatacgcgcaggcagacagaggaaaggcgatgcgaccatcgcagacggcgacggcgcatatgttggcccttgggccaagtataagaaggacgagtgggaagaggttgatgacgacgtggagctagcaagcgacgaggaggtcgaatacgtttacgaggacgacgacgaagcagccgatgtcgtcgccagtggaaccgtcgtgtctgcaccagcaggcgcattggcgagacggaaagaggtcgaggagctaggagacgagacgactactttccatggcaccgagcagttcgactaccaggggcggacatacatgcacataccacaagacctcgacatcgatctgcgcaaggaggccggcagcatcacaaactacattcccaagaagctggtacacacttggaaacatcatggcgacaaggcagtcactgccctgcgcttcttccccaactctggacatcttctactatcgtctggcgccgacacgacagtcaagatattcgacgtataccacaacaaagaactattacgaagctactccggccacagcaaggccgtgtccgacataagcttcaaccgcgacggcacacaattcatatccggatcctacgaccgacagatgaaactctgggacacggaaacaggtacctgcctcaacaaattcaccaccggcaaaacaccacacgtcctcaaattcaacccctcggtcgagcattcccacgaattcctagctggattatcagataacaagatcgtgcaattcgacacgcgaacacgggagctcgtgcaagaatacgatcaccatctcaatgctataaacaccataaccttcgtcgacgacaaccgacgcttcatgacgacgtcggacgataagtcgattcgcgcctgggattggaacataccggtcccgattaaatacattgcagaaccacacctctaccccatcacacgcgccgctcttcacccctcgcagaaatacctcgcatgtcaatcctccgataatcaagtcctggtctacggcgcaacagacaaattccgacagaacaggaagaagagctttcgaggacacaataacgcaggcacggccgttgatctggcgtttagtcctgatggacagttcctcgcgagtggtgacagtgcaggctttgttgctttctgggactggaagacttgcaagatgtatcataagttgcaagctggcgatcacgccatcacgtgtgtgcagtggcatccccaggagactagtaaggttgttgcggctggaatggacggtgttattcggtattgggattagaagccttggggtgtttgataaagtggcatggcattgggcgttagggtataccatagggttaaaatgaaatattgttaatgcttcgatgctgctttgtattcatcagcctgagctattccgtactatttcccattagcagcacgtctgcctcctgtcacttgactagagcactcgggagcctaatagaagcaaatagcatagtcattgttcgccca

SEQ ID NO: 1352 - DNA, 417 bp, Muscodor strobelii
  misc_feature: SGI cDNA ID NO. 560051
  misc_feature: Encodes the peptide sequence at SEQ ID NO 1353
atgtcgggcgaggcgtggctgttcctcttcgccgtgctcataaatgccgtcaacctgttcctccaagtcttcttcaccatcatgtacagcgaccttgaatgcgactatatcaaccctatcgacctctgcaaccgcctcaacacttacatcatccccgaggctgccgtacacggattcttgacgttcctgttcctcatcaatggctactgggtggccttgatcctcaacattcccctcctcgcctggaatgccaagaagatcttcgagaacactcatctcctcgatgcgaccgagatcttccggaaattgaacgtccataagaaggaatccttcttcaagcttggcttccacttagtcatgttcttcttctatctgtacagcatgatcgttgctctgatcaaggacgagaaggcttag

SEQ ID NO: 1353 - protein, 138 aa, Muscodor strobelii
  misc_feature: SGI Peptide ID NO. 560051
  misc_feature (4)..(127): Pfam Id: PF03311 Pfam Desc: Cornichon protein
  misc_feature (1)..(138): NCBI GI: 46109032 Blast Desc: FG01398.1 [Gibberella zeae PH-1]
  misc_feature (1)..(137): NCBI GI: 226289666 Blast Desc: ER-derived vesicles protein ERV14 [Paracoccidioides brasiliensis Pb18]
  misc_feature (1)..(137): NCBI GI: 154312573 Blast Desc: conserved [Botryotinia fuckeliana B05.10] gi|150849990|gb|EDN25183.1| conserved [Botryotinia fuckeliana B05.10]
  misc_feature (1)..(137): NCBI GI: 226279788 Blast Desc: ER-derived vesicles protein ERV14 [Paracoccidioides brasiliensis Pb01]
  misc_feature (1)..(137): NCBI GI: 145238686 Blast Desc: An07g09160 [Aspergillus niger] gi|134076485|emb|CAK39681.1| protein product [Aspergillus niger]
  misc_feature (1)..(137): NCBI GI: 225682287 Blast Desc: ER-derived vesicles protein ERV15 [Paracoccidioides brasiliensis Pb03]
  misc_feature (1)..(137): NCBI GI: 240104826 Blast Desc: ER-derived vesicles protein ERV14, [Coccidioides posadasii C735 delta SOWgp]
  misc_feature (1)..(136): NCBI GI: 238839692 Blast Desc: ER-derived vesicles protein ERV14 [Microsporum canis CBS 113480]
  misc_feature (1)..(137): NCBI GI: 115390755 Blast Desc: ER-derived vesicles protein ERV14 [Aspergillus terreus NIH2624] gi|114193806|gb|EAU35506.1| ER-derived vesicles protein ERV14 [Aspergillus terreus NIH2624]
  misc_feature (1)..(137): NCBI GI: 225555802 Blast Desc: ER-derived vesicles protein ERV14 [Ajellomyces capsulatus G186AR]
MSGEAWLFLFAVLINAVNLFLQVFFTIMYSDLECDYINPIDLCNRLNTYIIPEAAVHGFLTFLFLINGYWVALILNIPLLAWNAKKIFENTHLLDATEIFRKLNVHKKESFFKLGFHLVMFFFYLYSMIVALIKDEKA

SEQ ID NO: 1354 - DNA, 1721 bp, Muscodor strobelii
  misc_feature: SGI EST ID NO. CUFF.3706.0
  misc_feature: Variant of the nucleotide sequence at SEQ ID NO 1352
gttgcgttgcccgccgatagcctcgatgaacctcgatagcaaggcaccgattgagtgagccgctttcatcatccatcactcatcacctgcttttgcacacgccatacccaccacgtatcatctgcatgattttgacagataggaagacagtataaacaccacgtagtctttgcaggtagcctaattttgcatgctagtcgtagaatcgttcaggtcttccccccgtctctggtctcactcttcatcctcagagcttcacccctcggaccccgcccccagcctacctagacgaccacagaagcgcgcagaatttagcttttttgacccaggtcaaaatcccaccgtagccctgcacccgacaaatccgtgcgtaaccaccacctgagctgctgctgttgacgccgactatcgcttgttatctactgccgtcccatcatcctgtccaagctgtcgcccaaccaccacaccaaccattaacctgtaaccacctacattttccacgacgactccttgctcgcccatttggtgatacctagcttgtaaatacataccctcgcattctctgtctcgattcctctctttgctcgccggtccaccagatccaaccgccaaaatgtcgggcgaggcgtggctgttcctcttcgccgtgctcataaatgccgtcaacctgttcctccaagtcttcttcaccatcatgtacagcgaccttgaatgcgactatatcaaccctatcgacctctgcaaccgcctcaacacttacatcatccccgaggctgccgtacacggattcttgacgttcctgttcctcatcaatggctactgggtggccttgatcctcaacattcccctcctcgcctggaatgccaagaagatcttcgagaacactcatctcctcgatgcgaccgagatcttccggaaattgaacgtccataagaaggaatccttcttcaagcttggcttccacttagtcatgttcttcttctatctgtacagcatgatcgttgctctgatcaaggacgagaaggcttaggatgctcgacatgccaatagctgaacaaatcccggatagaggaaacggcagcaacgagggtgacgcgacttgcattgcctagcttttggcctatttcgtatgcatcaagatagaacagggcagccacggtggcttttacagcgatcatgttcgagaggttgaaagttacgtgcgacgacgacgatcactacgacatttacggcggacaatagggcgatgtgagaatggcttgtcacgggtgtcctcctgcgaggctaacggcgagagcgaccacttggcttcgactatgaacgaacggtcggcgaagagacgaccacacaatttacaggctgtgagacgagggaagttgacggcatcggtgtgttatatggggaacgatagggcgttcggtaaagacggcgcatctggtgtgtccttgagctcggacgcgccttcaatgcagaatacataatatatacccagagttttgatttgcagcattcgcagcttccatcctgtcgatcttgatacgtgcgtgtatgctgccagtcaagaaaatagtgtatcactcgacatgacaggctcagtctcatgttatcttgggtctgccaaacttgcagttttgtatgtacataacccgcctggaacaatctgaataagcacatcggatcatattcgatggaaaaagaatatcccacatattagcaagttg

SEQ ID NO: 1355 - DNA, 1467 bp, Muscodor strobelii
  misc_feature: SGI cDNA ID NO. 560052
  misc_feature: Elevated expression when VOC is produced
  misc_feature: Encodes the peptide sequence at SEQ ID NO 1356
atgttgtacttccgaactgacatactaacgggcgcgcttgcgttatggatatgcggcgcgatcgcaacagctctatttattattcgtttgggactacggaaatggcggcgtcaaccatttactattggtgatggctggattgctgtagctttgctgttcaacggactgcggatggctggactgtactatacaaatcagaccaacgatgatttgatctatacgatgctgcagacagagagcgctctgatcacaactgaactgaggaacaacttgatcttaacaggcaaattcatggtgccgactcggatcgctgtggtagtcgtactatggagcttgaaactggcgattctggacttcgtgcgagtacttcttcgcaaacttcgacacgagcgcttaattgtgtactccatgtatgctatattggctttgacgtttactgcctcgttcgtggctgtcttcttcgaatgtcgaccattaagcctattctggacactatcacctattgctcagcaatgttacctgagtacactttggataacaatatacgaagctagcaacattgtaacaaatctcatactgctactcattcccttccccttaattctgcgcgcaaaggttcctccttggaaacgggcacgacttcttcttcttttcagcgtaggcatatgcctcgtcgctacaaacatattctgcttaatccaaggtctcacgacattcgatatgcgtacaaatcgggtagtttggaacagcatcgaagtcggcgttgcggccattgtcgctacgttaccttcgatttacgttcttgtgcgcccgacattcaaacgtctggatgaagagacgacaaggcgcaagagctcaccagatatcctcagcccagagtatcggccctcactgcaacgcaagtctaatgcgcgagagtgggatagcatgagatcaaccgatattagtagtgaaccttcagaaaaacgccactcgctgcggccaacagcgacacagaactcggttcgtagtggcatacctcctcctaactctctgccgccgggttttcatatcgatgagaagccgccgtctctacacaccgcatcgattaggaattcgatctggagtacgtctcgagacgggccacgccgagaatctcgtcgtgagtccctcccatcaattttcagcccctctatcttgagctcgagatcctcgtttagggaaacattgcaccacccgtttcggacttcacaacagtcagatcccgagagatttcaagattctctctcggcatggttagtggccgaggaaaacgagacgggagacctatctcctgctttcttcgaggatgcgaacgtggcaggtattttcgtggcgactgagatcaatcaggaggtgatagaccttggccagcgggcacgcatcgtgaccattccacccaggagtccgaggactccaaagcgagaggagatgccagcgttgccataa

SEQ ID NO: 1356 - protein, 488 aa, Muscodor strobelii
  misc_feature: SGI Peptide ID NO. 560052
  misc_feature (7)..(270): NCBI GI: 169622707 Blast Desc: SNOG_14580 [Phaeosphaeria nodorum SN15] gi|111057000|gb|EAT78120.1| SNOG_14580 [Phaeosphaeria nodorum SN15]
  misc_feature (13)..(340): NCBI GI: 238497029 Blast Desc: conserved [Aspergillus flavus NRRL3357] gi|220694630|gb|EED50974.1| conserved [Aspergillus flavus NRRL3357]
  misc_feature (17)..(286): NCBI GI: 46114746 Blast Desc: FG03215.1 [Gibberella zeae PH-1]
  misc_feature (40)..(268): NCBI GI: 256730069 Blast Desc: NECHADRAFT_6955 [Nectria haematococca mpVI 77-13-4]
  misc_feature (19)..(285): NCBI GI: 256728381 Blast Desc: NECHADRAFT_26993 [Nectria haematococca mpVI 77-13-4]
  misc_feature (96)..(344): NCBI GI: 39960810 Blast Desc: MGG_09467 [Magnaporthe grisea 70-15] gi|145010962|gb|EDJ95618.1| MGG_09467 [Magnaporthe grisea 70-15]
  misc_feature (7)..(303): NCBI GI: 259480202 Blast Desc: TPA: conserved [Aspergillus nidulans FGSC A4]
  misc_feature (17)..(337): NCBI GI: 242792387 Blast Desc: conserved [Talaromyces stipitatus ATCC 10500] gi|218718530|gb|EED17950.1| conserved [Talaromyces stipitatus ATCC 10500]
  misc_feature (13)..(335): NCBI GI: 46116240 Blast Desc: FG03962.1 [Gibberella zeae PH-1]
  misc_feature (96)..(309): NCBI GI: 261356767 Blast Desc: conserved [Verticillium albo-atrum VaMs.102]
  misc_feature: Useful for introducing or modulating the production of volatile compounds
MLYFRTDILTGALALWICGAIATALFIIRLGLRKWRRQPFTIGDGWIAVALLFNGLRMAGLYYTNQTNDDLIYTMLQTESALITTELRNNLILTGKFMVPTRIAVVVVLWSLKLAILDFVRVLLRKLRHERLIVYSMYAILALTFTASFVAVFFECRPLSLFWTLSPIAQQCYLSTLWITIYEASNIVTNLILLLIPFPLILRAKVPPWKRARLLLLFSVGICLVATNIFCLIQGLTTFDMRTNRVVWNSIEVGVAAIVATLPSIYVLVRPTFKRLDEETTRRKSSPDILSPEYRPSLQRKSNAREWDSMRSTDISSEPSEKRHSLRPTATQNSVRSGIPPPNSLPPGFHIDEKPPSLHTASIRNSIWSTSRDGPRRESRRESLPSIFSPSILSSRSSFRETLHHPFRTSQQSDPERFQDSLSAWLVAEENETGDLSPAFFEDANVAGIFVATEINQEVIDLGQRARIVTIPPRSPRTPKREEMPALP

SEQ ID NO: 1357 - DNA, 2833 bp, Muscodor strobelii
  misc_feature: SGI EST ID NO. CUFF.3716.1
  misc_feature: Variant of the nucleotide sequence at SEQ ID NO 1355
ttccagccatcagtgcttcaaaacatggcggcttatgcagcgttcaactgatcaagcactccaatcatgccgcggcaaaaatgccaaatttgagcaaggagtgatagacaactaccgataattacaggcgcgtagagtttagaggcacggtgtgagtacgagggttaactttctacacttgtaaacatctttgagatcggacactgctccaaaatcttgcgtgaaggtttccctaccgctctgtggcttcttctctttttatcaacatagggacaaatggcgcaactaatccgtgctggtgcgcaaagttcatctcgttccgggccgctatgtagtccgacggtaataaacgtcaaacataggatccaatgactgttgttgaattcgtaggtaatgcatacaatttgttgtgtgttaacgcaaaacgacgggatttacagagcttagatattgacgaaaggattctcttttcgctcgacgaaaaaccgcccagtctctcgcttgaaatattcactccattcatattagtcgcaacagaatgcaggcaaaatgcgcatcatcaaatccggatagagttcaaacggcgcaatacatttcgcgaagaagcttttgcgaacagacgccctcggggccggctgcaagaaacctacgtctgctgacgcgcatgcacattaattgtgcagagatcactttgcagcatctatccagatactcagcatgataggcgtatccttgaggccgggatcatgcggtcatgtttcctattgttcgttgtcatcaatgcccgtcaatataccacgatctgactcaacgatgcgaaacgggtgataccattgcaactcttcactgtcccttcatttccatttacaacattgcagtgagtccatttaggacggtcgactaaatattgctcgccctgggctcgccgtcccggggtgctttcactttcgaaaatcattcggcgaaggtcaaaaacatcgagataacatgttgtacttccgaactgacatactaacgggcgcgcttgcgttatggatatgcggcgcgatcgcaacagctctatttattattcgtttgggactacggaaatggcggcgtcaaccatttactattggtgatggctggattgctgtagctttgctgttcaacggactgcggatggctggactgtactatacaaatcagaccaacgatgatttgatctatacgatgctgcagacagagagcgctctgatcacaactgaactgaggaacaacttgatcttaacaggcaaattcatggtgccgactcggatcgctgtggtagtcgtactatggagcttgaaactggcgattctggacttcgtgcgagtacttcttcgcaaacttcgacacgagcgcttaattgtgtactccatgtatgctatattggctttgacgtttactgcctcgttcgtggctgtcttcttcgaatgtcgaccattaagcctattctggacactatcacctattgctcagcaatggtacgagtgagctctatttgcgtttggtcttagacgtcgctgacagtaaatagttacctgagtacactttggataacaatatacgaagctagcaacattgtaacaaatctcatactgctactcattcccttccccttaattctgcgcgcaaaggttcctccttggaaacgggcacgacttcttcttcttttcagcgtaggcatatgcctcgtcgctacaaacatattctgcttaatccaaggtctcacgacattcgatatgcgtacaaatcgggtagtttggaacagcatcgaagtcggcgttgcggccattgtcgctacgttaccttcgatttacgttcttgtgcgcccgacattcaaacgtctggatgaagagacgacaaggcgcaagagctcaccagatatcctcagcccagagtatcggccctcactgcaacgcaagtctaatgcgcgagagtgggatagcatgagatcaaccgatattagtagtgaaccttcagaaaaacgccactcgctgcggccaacagcgacacagaactcggttcgtagtggcatacctcctcctaactctctgccgccgggttttcatatcgatgagaagccgccgtctctacacaccgcatcgattaggaattcgatctggagtacgtctcgagacgggccacgccgagaatctcgtcgtgagtccctcccatcaattttcagcccctctatcttgagctcgagatcctcgtttagggaaacattgcaccacccgtttcggacttcacaacagtcagatcccgagagatttcaagattctctctcggcatggttagtggccgaggaaaacgagacgggagacctatctcctgctttcttcgaggatgcgaacgtggcaggtattttcgtggcgactgagatcaatcaggaggtgatagaccttggccagcgggcacgcatcgtgaccattccacccaggagtccgaggactccaaagcgagaggagatgccagcgttgccataagcgtttgagcatcttatatggatttgtttttagcggaccattcaacatagcgtttttgatatagagctatccattagatacctatagattgctctcgagactgagactcacgcttaccgagtttcagtatagaatacgagtaataatagaagcggttgtgctcttaaactcggcacggtataaagaagaaacgcgttgagatgtggcgaagactttccatatagtgcgacaatcctaaggttcataaattactgacgttgaacatagatttagatcttcttcattgtatgattggatggaacggttaagaaagatgctgttctgta

SEQ ID NO: 1358 - DNA, 612 bp, Muscodor strobelii
  misc_feature: SGI cDNA ID NO. 560053
  misc_feature: Encodes the peptide sequence at SEQ ID NO 1359
atggagtttccagatttttctgctgtcatgccttcctcgatttctgctgatcgaacggggcaagtatcgatccgtatcgtcataaaaaagcggaacttgttttatctcgtgctccggcaaattgacatgaacactccggtcaaaaaagttacagatcatttgtctgcagctcgcgacgagactctcgatcgggggagcctattgaagtttgcagatggtatatttcgagagaattacttctcacttgcgaccctatcaaccttccgaaacatcgagcctgtcagtgacgctgtcctcgaagtcggtatcacggcacccgagccttgtttcgaattaaaccgcccagggctggttgatgacactgagcccttcgccactttacagcccaatgtcttgacaggaagcaacgctcgtcaggtcgtggtgattgaaagcaagctgaagaagcgcaatgtactgttatgtgccgctgttgccatcttgatcgccgtcttaagtggtgtatttcttggtgtatttgctggcaaccctggctatggaatcgggttcgggtttggcatcgttggaactgtcgcctttcttgtgcaactctcggtttgggcgacggaatga

SEQ ID NO: 1359 - protein, 203 aa, Muscodor strobelii
  misc_feature: SGI Peptide ID NO. 560053
MEFPDFSAVMPSSISADRTGQVSIRIVIKKRNLFYLVLRQIDMNTPVKKVTDHLSAARDETLDRGSLLKFADGIFRENYFSLATLSTFRNIEPVSDAVLEVGITAPEPCFELNRPGLVDDTEPFATLQPNVLTGSNARQVVVIESKLKKRNVLLCAAVAILIAVLSGVFLGVFAGNPGYGIGFGFGIVGTVAFLVQLSVWATE

SEQ ID NO: 1360 - DNA, 585 bp, Muscodor strobelii
  misc_feature: SGI cDNA ID NO. 560054
  misc_feature: Encodes the peptide sequence at SEQ ID NO 1361
atgccttcctcgatttctgctgatcgaacggggcaagtatcgatccgtatcgtcataaaaaagcggaacttgttttatctcgtgctccggcaaattgacatgaacactccggtcaaaaaagttacagatcatttgtctgcagctcgcgacgagactctcgatcgggggagcctattgaagtttgcagatggtatatttcgagagaattacttctcacttgcgaccctatcaaccttccgaaacatcgagcctgtcagtgacgctgtcctcgaagtcggtatcacggcacccgagccttgtttcgaattaaaccgcccagggctggttgatgacactgagcccttcgccactttacagcccaatgtcttgacaggaagcaacgctcgtcaggtcgtggtgattgaaagcaagctgaagaagcgcaatgtactgttatgtgccgctgttgccatcttgatcgccgtcttaagtggtgtatttcttggtgtatttgctggcaaccctggctatggaatcgggttcgggtttggcatcgttggaactgtcgcctttcttgtgcaactctcggtttgggcgacggaatga

SEQ ID NO: 1361 - protein, 194 aa, Muscodor strobelii
  misc_feature: SGI Peptide ID NO. 560054
MPSSISADRTGQVSIRIVIKKRNLFYLVLRQIDMNTPVKKVTDHLSAARDETLDRGSLLKFADGIFRENYFSLATLSTFRNIEPVSDAVLEVGITAPEPCFELNRPGLVDDTEPFATLQPNVLTGSNARQVVVIESKLKKRNVLLCAAVAILIAVLSGVFLGVFAGNPGYGIGFGFGIVGTVAFLVQLSVWATE

SEQ ID NO: 1362 - DNA, 720 bp, Muscodor strobelii
  misc_feature: SGI cDNA ID NO. 560055
  misc_feature: Encodes the peptide sequence at SEQ ID NO 1363
atgaacacatcgtcgggtctcactggagacatcaatatcatgacagcaaggcagatcgaaagattcaacctctggacatcaaagggctacagtagccataagacctacgatctgaaagcaaaggaacgatatgtcgaattgtgccggacactttttggtgatgggattcaaatcgagaatcctcaataccatcactttgttcttgaatactcagtgaaccccaagtcgcaaagactaggcgaaacaaatttgaaatacgcagagaaacttgaattcgctcagcatcgtgatgcagaaactcagcatcgccatcctacaaatgagttacagccggagattagcaccataggctctgatcacacggaagcatccgatcattatgcagaccgaaagtcaaccaccccaaataatcatccacagtttatgtgctctttgtcggtgccttcggtgtcggcaacgtgtgatcccccgaacacactcagcataggcgacgcggaagaatggtttcgccctagtagctggagtctctcggtccatatacctacggatgattctggatatgtatcacttgaaccgccgaaacaaacatgcaatgagcgtgacgagaatcaacatcacccggctgatacaaagtgtattgatcccaatctcttgttgggggatgcaggaccttcggatcatttcagtggtcattatcctccggacgtcggtgatctctag

SEQ ID NO: 1363 - protein, 239 aa, Muscodor strobelii
  misc_feature: SGI Peptide ID NO. 560055
MNTSSGLTGDINIMTARQIERFNLWTSKGYSSHKTYDLKAKERYVELCRTLFGDGIQIENPQYHHFVLEYSVNPKSQRLGETNLKYAEKLEFAQHRDAETQHRHPTNELQPEISTIGSDHTEASDHYADRKSTTPNNHPQFMCSLSVPSVSATCDPPNTLSIGDAEEWFRPSSWSLSVHIPTDDSGYVSLEPPKQTCNERDENQHHPADTKCIDPNLLLGDAGPSDHFSGHYPPDVGDL

SEQ ID NO: 1364 - DNA, 3405 bp, Muscodor strobelii
  misc_feature: SGI EST ID NO. CUFF.3775.1
  misc_feature: Variant of the nucleotide sequence at SEQ ID NO 1362
gtgaatcatatgccttcgtgcatgttactttccagcaacgacaattaaccctataccgatcaatagtccagttcaaaaaggtccgattcgtcgaagtcttcgtaccagatgcagcgctatataaatgaatcgcagccaacgatctacgagcgtgtacattcaaccacggccaaccccaacagcaaccgtacttctaaagtgaagacctggatggacaatttcgacaggagatttcggccctaagcttatatgattcacatcgcgcgaattacttgtttataagctacccaagtcgctagtgcgatataagcacgaccatctctcatacgactgggaaaatatcatgcaccgcctattcgcataagttcgaccgtaattgttccatccactgccttcgagacgcttccaattacataactcgtgccgctgtccttgatatatgtattcacccaccattcaatcatcgattcgagaatagaccgcgatttgaatagtggatcatgtcagacacgatctggcgttcttttcgacaatttgtcctatggaaaggaaatggatcggacttacgtttacaatgcccgtggtcgaattgcttcgcaccactctttaatacagatgagccttgcccatgtgcgacaacggcattttcgacctttagaaggctgagcgaacacattcgcaattatcattttccaccttgtccgttatgcaaccacgtacactcagacatcaagccatgcaagaaaaagaagaggtcttcaaagagactaaaaagagatagttcgagcgaagatgaggacttatctgagccattcaaagagtttcaactgcagtggcaaacagaaggcgttatgaacacatcgtcgggtctcactggagacatcaatatcatgacagcaaggcagatcgaaagattcaacctctggacatcaaagggctacagtagccataagacctacgatctgaaagcaaaggaacgatatgtcgaattgtgccggacactttttggtgatgggattcaaatcgagaatcctcaataccatcactttgttcttgaatactcagtgaaccccaagtcgcaaagactaggcgaaacaaatttgaaatacgcagagaaacttgaattcgctcagcatcgtgatgcagaaactcagcatcgccatcctacaaatgagttacagccggagattagcaccataggctctgatcacacggaagcatccgatcattatgcagaccgaaagtcaaccaccccaaataatcatccacagtttatgtgctctttgtcggtgccttcggtgtcggcaacgtgtgatcccccgaacacactcagcataggcgacgcggaagaatggtttcgccctagtagctggagtctctcggtccatatacctacggatgattctggatatgtatcacttgaaccgccgaaacaaacatgcaatgagcgtgacgagaatcaacatcacccggctgatacaaagtgtattgatcccaatctcttgttgggggatgcaggaccttcggatcatttcagtggtcattatcctccggacgtcggtgatctctagccataatccacctactcaacacagacactctacatttgcattcgagtgtcacgaacaacgttcatacagagttgaccaccatcacggaaacacttgatcatttcgtattgatattcatcaactgtatcgacgatgatgataattgcaatatttggaacgagaatagactaaaatttggttgtagaaagcaccaagaagtacgaacagataatacttgaagaacgacagcgcattacaactagatacagcattgtggctcactactcaatacgcatcgacgattcctttatatcagaaacagggttggatacatttgaggcgtttcgtcaatcacgcagtttgtgtcattccacgcgaatcgaatatacgatcatgtacgactccaggccgcctgtggcaccatttcacgacatctgagtcctgggtcactcgggcgatggtgcttcgaatacaactgcagtgcaacacaatcaattgcaaagatggcattcgtcgcttacgcactgagggtgaagaaaataagccaatgtttgtaacgagacactccctgcacgactgagatgaccgtgggacctttccgtcagaacacgggataccaacacctgacaaacatcaacattgggaccaatgcctgtgaatcaagcggttactcatagtgagaaatgacaagtggcagaaggcttcaagcctcaatcattggtcggatcctctcaacaagcggagtgtagtacgagtcgtcctcactgtcctgctgagtggacattgttgtctatacacagcattcatagtcatgttgtgctggttttcctcactctccacgcatactaagatatatactcactttctcttctttgatatccgcatcccctagacttattcccttttacaaagcagaaccaaacttggacaacccttccggtccccaagcactagagaagcgtactatcaaccccgcttcatctatatcgcaacacttttcccaagatgtcattcatctggcagcccgctgccatccctgcgacaatctatcaccctgtcaacaccgtcgtcgtggcgcaacccgctgctcctgccgtcatcatgcagcccacgtactcggtcgtccacgctgcacccgcaattgcagtggcccctgtctattcggtttcgatacggcagccatgcgtaccgccgaatctacatatgatcacgagactgtcttgatctctcctacgaacggcaagattggggatgatgctgttggccatgtggctcggggaaaaaggtccagtgaagagcacgaagcatgggcaatattttgacaaagactctcaaactggaggcggagagctgaagggtcgttgccatgctgctccctgggcacgttttgatgacttggcattgagacgcattggtagacatgcgggggtctataatgcttaatatgacgcgaagtaatggttctcggtcacacgatgtcgctttgctgtgcttgtagaccggagccaaggtggatgaagctgccggtagattacgatacattcaggatgaagagaacatcatatgtacttctcaggtcacagtccagtaatccgctgccataatgtcccaatggtcttccggaaggcgtatcaatagttttgtcaatagcttcaagcaattctttggagagacgcacacgagaaccagcgtatactgcagcgatcgtcgtatataacacattcaaatgatggtgactgggataatcgggaagtgacttttgagacaaaactaattcgacgagtacgaaaacacatgatgactgcagagcgttgcttaggcaaggaagggcaacttaactggaaatctgatcaga

SEQ ID NO: 1365 - DNA, 1503 bp, Muscodor strobelii
  misc_feature: SGI cDNA ID NO. 560056
  misc_feature: Encodes the peptide sequence at SEQ ID NO 1366
atggcttctgcgaccgcagattatttgtatttgttactggtcagacttgcaagtcttcggggagctttagtgcttgcttcgacgttcattgcgtggatagtattccgtggggtttttctcgacccacttcgtgctttccctggccctcgtcttgctaggtttactcgtatcccctattggatctcaaaccttagtggcaattcagtacaatggatgcactcgctgcacagaacctacggaccaatcgtgagattcggaccgaacgatcttagttttactggtgcacgagcctggaaggatatatacggtcatcagaagggaaaggaggagaatcctaaagatatgaaattttatataccttctgagaatggctcccctacattagctacattgcctcagccggagcactctatccttcgacgaacgatggcacctgcattttctgacaaagcactcaagcagcaagaagccctattgcagcgttgcgcagatctcatggtgagaaatgtacggcgtttcagcgatgatggtcggcccgtcgatatggtcaagatgtataatttgacaactttcgatattatggccgagcttgtatacagcgagtctctgggccagctcgagacgtccgagtacacaccatgggttgaaatgatcttcaaatgggtgtcatttgttcctcttgttcagctacttgaatattatccgttcctgaagaccttgttcaacttccttgagccgaggtcagtccgagcaacgcgaatttcgcatttcaagtacagcacagatcggatggatgagagactcgccagggggtctgaaaagccagacgtgtggaacttgatcctcgccaaagacgaagacggcgcgcttcttacagtccctgagatgcacgcaaatgctcaaatgttaatgacggcaggcactgagacgacggcgacgctactttctggcctgaccaacctgctcttgaacaattctcattctatgcagagcctgacaaatgaaattcgcagcactttcgattctagtgatatgatagatctcgaatcgcttaccagacttccgtacctgaacgcatgcattcatgaaagtcttcgcttatatcctcctgttcccgggggaatgcctcgtgtcactcctcagagcgggaacacaatcgcaggaagatggatacccccagcaacatctgtttctgtacaccagacagcaacttatcgtgacggcgattatttccgagacccgaatcgattcataccggagcggtggctaggagacgcagcttttgagaacgatcaacgagaagcacttcagccattttccgttggcccaagaaactgtataggcttgggattggcatggcacgagatgcgactacttcttgctaaaattgtgttcaacttcgaccttgaactacgcgacatctccgaagattgggccgatcaaaaagtctactttctgtgggaaaagaagccgctcatgtgcaattcccgctgcgtgctgtga

SEQ ID NO: 1366 - protein, 500 aa, Muscodor strobelii
  misc_feature: SGI Peptide ID NO. 560056
  misc_feature (51)..(495): Pfam Id: PF00067 Pfam Desc: Cytochrome P450
  misc_feature (134)..(471): Pfam Id: PF00067 Pfam Desc: Cytochrome P450
  misc_feature (16)..(493): NCBI GI: 46114698 Blast Desc: FG03191.1 [Gibberella zeae PH-1]
  misc_feature (1)..(499): NCBI GI: 169609919 Blast Desc: SNOG_08051 [Phaeosphaeria nodorum SN15] gi|111063207|gb|EAT84327.1| SNOG_08051 [Phaeosphaeria nodorum SN15]
  misc_feature (34)..(497): NCBI GI: 116208430 Blast Desc: CHGG_03508 [Chaetomium globosum CBS 148.51] gi|88184105|gb|EAQ91573.1| CHGG_03508 [Chaetomium globosum CBS 148.51]
  misc_feature (22)..(495): NCBI GI: 115391773 Blast Desc: [Aspergillus terreus NIH2624] gi|114194315|gb|EAU36015.1| [Aspergillus terreus NIH2624]
  misc_feature (1)..(499): NCBI GI: 189204680 Blast Desc: cytochrome P450 46A1 [Pyrenophora tritici-repentis Pt-1C-BFP] gi|187985774|gb|EDU51262.1| cytochrome P450 46A1 [Pyrenophora tritici-repentis Pt-1C-BFP]
  misc_feature (38)..(493): NCBI GI: 145247518 Blast Desc: An12g09560 [Aspergillus niger] gi|134080747|emb|CAL00861.1| protein product [Aspergillus niger]
  misc_feature (13)..(492): NCBI GI: 224969386 Blast Desc: cytochrome P450 ClCP1 [Glomerella lindemuthiana]
  misc_feature (20)..(495): NCBI GI: 39971031 Blast Desc: MGG_02982 [Magnaporthe grisea 70-15] gi|149210571|ref|XP_001522660.1| MGCH7_ch7g760 [Magnaporthe grisea 70-15] gi|86196715|gb|EAQ71353.1| MGCH7_ch7g760 grisea
  misc_feature (7)..(492): NCBI GI: 242777790 Blast Desc: cytochrome P450 monooxygenase, [Talaromyces stipitatus ATCC 10500] gi|218722724|gb|EED22142.1| cytochrome P450 monooxygenase, [Talaromyces stipitatus ATCC 10500]
  misc_feature (13)..(493): NCBI GI: 170293003 Blast Desc: Fum2 [Fusarium oxysporum]
  misc_feature (139)..(470): SWISSPROT Homolog: EC 1.14.14.1 Unspecific monooxygenase
MASATADYLYLLLVRLASLRGALVLASTFIAWIVFRGVFLDPLRAFPGPRLARFTRIPYWISNLSGNSVQWMHSLHRTYGPIVRFGPNDLSFTGARAWKDIYGHQKGKEENPKDMKFYIPSENGSPTLATLPQPEHSILRRTMAPAFSDKALKQQEALLQRCADLMVRNVRRFSDDGRPVDMVKMYNLTTFDIMAELVYSESLGQLETSEYTPWVEMIFKWVSFVPLVQLLEYYPFLKTLFNFLEPRSVRATRISHFKYSTDRMDERLARGSEKPDVWNLILAKDEDGALLTVPEMHANAQMLMTAGTETTATLLSGLTNLLLNNSHSMQSLTNEIRSTFDSSDMIDLESLTRLPYLNACIHESLRLYPPVPGGMPRVTPQSGNTIAGRWIPPATSVSVHQTATYRDGDYFRDPNRFIPERWLGDAAFENDQREALQPFSVGPRNCIGLGLAWHEMRLLLAKIVFNFDLELRDISEDWADQKVYFLWEKKPLMCNSRCVL

SEQ ID NO: 1367 - DNA, 2745 bp, Muscodor strobelii
  misc_feature: SGI cDNA ID NO. 560057
  misc_feature: Encodes the peptide sequence at SEQ ID NO 1368
atgtattttcatgcgctaatactagtaacctttctactcaattgcgtgatcggattatccctttcggcttcaaacacaagcgcttcttcagtcactgtgaagtggctcgagggcgtaccgacacttaacaatggcgctacttttggattgccgtggccaatgggcaagtttccagccgatgcagtcagcttcgctgcgtccgatgagaacggaaacgacgttgctctccagtcgtggataacagcttattgggctgacaattccattaaatggacggggcatgcagtacctggcagcttcgagattgttcctaggagctacaagatcacagccgccaacagtaatggaaacaagaccacatcgactgcatctagtcgggcggccaggaagagatcaatcctagtagagagctcaagcgatgagattacagtcgataccggcaaagtcaaagcaaaatttccgagatctggtgctgtccttgtcagctccataacgtctcctaacggcaacgttgtgggcaagaatggaagactcattttgcgttcgcaatctggggttgcggacgaagaagacgcgatcggaacgggaattgatacattcatatttgagtcagctatcaatgaaacagctgtggacaatgatagctcagtacgaacattagtcacgatacggggaaaccacaaacttaacgattcagcaagttcttcggcatcgcatgcttcatggctaccattcgttttgagattctatttttatgccaactcggacacaataaaaatgatacataccctgattcttgacggagaagcagaacacgatttcattacaggtgtcggacttcgatttgatgtgcctctcgccgacgaggagctttatgaccgtcatgtgaggatcgcgggcgtgaatggcgggttcctgagcgaagctgtccaaggcataactggtttacgcagagatcccggcgcccaagtccgagaagcacaatacaatggtacaaaaatgccggacgtttcaacgtgggctacaacagtcagcaccagactgcagtggataccgtcttggaatgattatcagctcacgcaattgtctcctgatggcttcactctgagaaagcggactaaagctggtcagggttgggttaagatacctggcgcaacccgagctggcggtctggcgtatcttggaggtgccaccaagggaggtctagctgtgggacttcgacatttctggaaaaagtatcctacgagcctcgatatctcgaaagcagcgtctgatacgggtcaaatcacgttatggctctatagtccatccgccgagccactggatttgcgacagttccacgatggtctaggtgaagatacctacgccaagcagtcagatgcacttgaaattacatatgaagattacgaagatggttatgatacaccccatggtattgcaactaccaatgagatattcatccgggcgtttgataccacgccgccaactgaagatcttgcggcactgacgagcttcatcgagaacccaccaatactagtacccgagcccgcatatatcaaggagacggaagcgctaggcacatactgggatctacccagcaatagcaacgcgacagatgccgcgcaaacaatcgagtctcatctggatttcttaatggaattttaccaagatcaggtcgaacaacgaagatggtatggattttttgatcatggagacatcatgcacacatacgatgcggaccgacacacttggcgatacgacgttggcggatacgcatgggataattcagagctatccccaaacctcttcttttggaatcaattcttacgaacaggccaagcagacatatatcgttttgcagaggcgcacatgcgccatactagcgaagttgacgtttaccatctcggcgagttctatggattcggaacgcgacatggcgtccaacattggggtgacagctcaaaacagattcgagtatccacaccgcttttcaatcaaatcttctactacgtgtcaggcggcgacgagcgagtaggcgagatcatgcatgagctcatggatgcggataaagctttccttaaagtcgacgttcggcgaaaggttcgcaacccaaacatcacatatactccggaacctacagccattgatctagacctcggacttgacttttctggtttggcatcagtttggctcattgaatgggaaaggcgtggtcctcgatggcaagaggcaagatcaaagctcaacgaaagcatgcaaggtatcgcttcgttgaaatacgggttcgtgacaggtcttggttcttataatctctacacaggggcaatctctgcaccaaataccaatcccgataattcagggatcgtagggatagaccatctccaggcaagtttcggtctcccagagatcattgcccaaatcgcacaatacatgggcaatgattatcctaagaattttgagaaagtctggctggagtattgctactactacggtgccagtgctgcagagcaaaccgcacgatatggatcgtcatttggaagtctctcattgcgccaggggcactcgcgtttgacagcatatttggcgaaggtcaccgggaatgacacgctagcggaaagagcttggaatgagttcttgaacatcgacggcctcttgacaactgcgccatggacttcaacgttggtgaatggaagtcaagtgttagcgccagttgacgaggcaccgtggatggccacaaacgagtaa

SEQ ID NO: 1368 - protein, 914 aa, Muscodor strobelii
  misc_feature: SGI Peptide ID NO. 560057
  misc_feature (5)..(913): NCBI GI: 115492821 Blast Desc: conserved [Aspergillus terreus NIH2624] gi|114197898|gb|EAU39598.1| conserved [Aspergillus terreus NIH2624]
  misc_feature (21)..(914): NCBI GI: 256722221 Blast Desc: NECHADRAFT_52435 [Nectria haematococca mpVI 77-13-4]
  misc_feature (6)..(914): NCBI GI: 255940716 Blast Desc: Pc16g08050 [Penicillium chrysogenum Wisconsin 54-1255] gi|211585750|emb|CAP93475.1| Pc16g08050 [Penicillium chrysogenum Wisconsin 54-1255]
  misc_feature (10)..(914): NCBI GI: 46114420 Blast Desc: FG03052.1 [Gibberella zeae PH-1]
  misc_feature (26)..(913): NCBI GI: 169617041 Blast Desc: SNOG_11697 [Phaeosphaeria nodorum SN15] gi|160703322|gb|EAT80741.2| SNOG_11697 [Phaeosphaeria nodorum SN15]
  misc_feature (6)..(914): NCBI GI: 145611904 Blast Desc: MGG_00046 [Magnaporthe grisea 70-15] gi|145019124|gb|EDK03403.1| MGG_00046 [Magnaporthe grisea 70-15]
  misc_feature (29)..(914): NCBI GI: 116192333 Blast Desc: CHGG_05884 [Chaetomium globosum CBS 148.51] gi|88181797|gb|EAQ89265.1| CHGG_05884 [Chaetomium globosum CBS 148.51]
  misc_feature (7)..(860): NCBI GI: 67901924 Blast Desc: AN7949.2 [Aspergillus nidulans FGSC A4] gi|40740413|gb|EAA59603.1| AN7949.2 [Aspergillus nidulans FGSC A4] gi|259480698|tpe|CBF73581.1| TPA: conserved [Aspergillus FGSC
  misc_feature (24)..(914): NCBI GI: 261357849 Blast Desc: yetA [Verticillium albo-atrum VaMs.102]
  misc_feature (43)..(913): NCBI GI: 238487134 Blast Desc: conserved [Aspergillus flavus NRRL3357] gi|220699684|gb|EED56023.1| conserved [Aspergillus flavus NRRL3357]
MYFHALILVTFLLNCVIGLSLSASNTSASSVTVKWLEGVPTLNNGATFGLPWPMGKFPADAVSFAASDENGNDVALQSWITAYWADNSIKWTGHAVPGSFEIVPRSYKITAANSNGNKTTSTASSRAARKRSILVESSSDEITVDTGKVKAKFPRSGAVLVSSITSPNGNVVGKNGRLILRSQSGVADEEDAIGTGIDTFIFESAINETAVDNDSSVRTLVTIRGNHKLNDSASSSASHASWLPFVLRFYFYANSDTIKMIHTLILDGEAEHDFITGVGLRFDVPLADEELYDRHVRIAGVNGGFLSEAVQGITGLRRDPGAQVREAQYNGTKMPDVSTWATTVSTRLQWIPSWNDYQLTQLSPDGFTLRKRTKAGQGWVKIPGATRAGGLAYLGGATKGGLAVGLRHFWKKYPTSLDISKAASDTGQITLWLYSPSAEPLDLRQFHDGLGEDTYAKQSDALEITYEDYEDGYDTPHGIATTNEIFIRAFDTTPPTEDLAALTSFIENPPILVPEPAYIKETEALGTYWDLPSNSNATDAAQTIESHLDFLMEFYQDQVEQRRWYGFFDHGDIMHTYDADRHTWRYDVGGYAWDNSELSPNLFFWNQFLRTGQADIYRFAEAHMRHTSEVDVYHLGEFYGFGTRHGVQHWGDSSKQIRVSTPLFNQIFYYVSGGDERVGEIMHELMDADKAFLKVDVRRKVRNPNITYTPEPTAIDLDLGLDFSGLASVWLIEWERRGPRWQEARSKLNESMQGIASLKYGFVTGLGSYNLYTGAISAPNTNPDNSGIVGIDHLQASFGLPEIIAQIAQYMGNDYPKNFEKVWLEYCYYYGASAAEQTARYGSSFGSLSLRQGHSRLTAYLAKVTGNDTLAERAWNEFLNIDGLLTTAPWTSTLVNGSQVLAPVDEAPWMATNE

SEQ ID NO: 1369 - DNA, 294 bp, Muscodor strobelii
  misc_feature: SGI EST ID NO. CUFF.3733.0
  misc_feature: Variant of the nucleotide sequence at SEQ ID NO 1367
attgccgtggccaatgggcaagtttccagccgatgcagtcagcttcgctgcgtccgatgagaacggaaacgacgttgctctccagtcgtggataacagcttattgggctgacaattccattaaatggacggggcatgcagtacctggcagcttcgagattgttcctaggagctacaagatcacagccgccaacagtaatggaaacaagaccacatcgactgcatctagtcgggcggccaggaagagatcaatcctagtagagagctcaagcgatgagattacagtcgataccgg

SEQ ID NO: 1370 - DNA, 786 bp, Muscodor strobelii
  misc_feature: SGI cDNA ID NO. 560058
  misc_feature: Reduced expression when VOC is produced
  misc_feature: Encodes the peptide sequence at SEQ ID NO 1371
atggccgaacgtggacgaaagcggcgtccaacgccaagcgaatctggcagcaaaaagagaagcaagaactcaaaaaacgaacaagcagaagatacagtcacatcacaaaagccgcgattgacaactccggatcttcaattcgactatgatcgcagccaactccgagatccgcgagagacccctggacgcgtgaagagacctatgctccggggcgattcggaaatcaccgaggatttcaagtcgaacttcttcataccaaaggccgaaaagcctaaaggtcggctaaatgcctacgagaaggacaaacttttcggggagcaggctttgttggatccttcggaaagatttcacgatttgcatgtctgccacaagaagggtcgaaatggatcacccacgtacgacgagggcggttttcagctagactacgaaaaagtagcggattggatgaaacccaagacctatagcaagtcgcggatagtgaaaggcgcggaacgacgattcgcggaacacgaacaagagggcaaggagatcttcgggatcttctttgctgatgcagaggatgtgacttatgatcaaaggctccaatcggagttcttcgtgaaagatcaaatttctaaggacctcggtattccctaccatcagatcggctctcagcatgctcgagaatttcaggagaaaggctacgagaagcacatattctcagaatggtggaagccgcatactaaagaagaatttaaacgcatgatgaagatgatgacggggtcaaggctacgaaaagacttataa

SEQ ID NO: 1371 - protein, 261 aa, Muscodor strobelii
  misc_feature: SGI Peptide ID NO. 560058
  misc_feature (10)..(261): NCBI GI: 256728195 Blast Desc: NECHADRAFT_102163 [Nectria haematococca mpVI 77-13-4]
  misc_feature (29)..(261): NCBI GI: 46114780 Blast Desc: FG03232.1 [Gibberella zeae PH-1]
  misc_feature (136)..(215): NCBI GI: 169605761 Blast Desc: SNOG_05907 [Phaeosphaeria nodorum SN15] gi|160706834|gb|EAT86971.2| SNOG_05907 [Phaeosphaeria nodorum SN15]
  misc_feature: Useful for introducing or modulating the production of volatile compounds
MAERGRKRRPTPSESGSKKRSKNSKNEQAEDTVTSQKPRLTTPDLQFDYDRSQLRDPRETPGRVKRPMLRGDSEITEDFKSNFFIPKAEKPKGRLNAYEKDKLFGEQALLDPSERFHDLHVCHKKGRNGSPTYDEGGFQLDYEKVADWMKPKTYSKSRIVKGAERRFAEHEQEGKEIFGIFFADAEDVTYDQRLQSEFFVKDQISKDLGIPYHQIGSQHAREFQEKGYEKHIFSEWWKPHTKEEFKRMMKMMTGSRLRKDL

SEQ ID NO: 1372 - DNA, 1267 bp, Muscodor strobelii
  misc_feature: SGI EST ID NO. CUFF.3751.0
  misc_feature: Variant of the nucleotide sequence at SEQ ID NO 1370
ggaagggatcctcttttgacgtcatcccagtccctgaagtttggttgacgcgttttcatctcgatgctgatcacgaattaatctgctctcaccttttcctcgactttatttcaaaagttttttgcttcaaaatcattcttcgtcatcatttgcctcttgttaaattgacaccaacaaccctgtcgcaaaagccaaggatctcgtgcagttgactcaatggccgaacgtggacgaaagcggcgtccaacgccaagcgaatctggcagcaaaaagagaagcaagaactcaaaaaacgaacaagcagaagatacagtcacatcacaaaagccgcgattgacaactccggatcttcaattcgactatgatcgcagccaactccgagatccgcgagagacccctggacgcgtgaagagacctatgctccggggcgattcggaaatcaccgaggatttcaagtcgaacttcttcataccaaaggccgaaaagcctaaaggtcggctaaatgcctacgagaaggacaaacttttcggggagcaggctttgttggatccttcggaaagatttcacgatttgcatgtctgccacaagaagggtcgaaatggatcacccacgtacgacgagggcggttttcagctagactacgaaaaagtagcggattggatgaaacccaagacctatagcaagtcgcggatagtgaaaggcgcggaacgacgattcgcggaacacgaacaagagggcaaggagatcttcgggatcttctttgctgatgcagaggatgtgacttatgatcaaaggctccaatcggagttcttcgtgaaagatcaaatttctaaggacctcggtattccctaccatcagatcggctctcagcatgctcgagaatttcaggagaaaggctacgagaagcacatattctcagaatggtggaagccgcatactaaagaagaatttaaacgcatgatgaagatgatgacggggtcaaggctacgaaaagacttataaattaattcaagaagtctatcgatttcatcgccttttcaatcactgacgctggacgcacgagctgaatctatattgtacgatctctttacattgcacatctccaagcaaaacatatactctagctcacaacccgatgtatcagactatatctcagtagtgtgttgcttgtttgtctatattttaatgctcaaaatcgacgtcgactattagtaacgaagaatagaagtgcttgcaattgatcatcctggaatgaaacccgggatcg

SEQ ID NO: 1373 - DNA, 2406 bp, Muscodor strobelii
  misc_feature: SGI cDNA ID NO. 560059
  misc_feature: Reduced expression when VOC is produced
  misc_feature: Encodes the peptide sequence at SEQ ID NO 1374
atgcaaggcgtgttagcacccaggtacacaggtgctggcaatgagagattgcgaacctgcccctttcgtatcgataccccaagtaaggggggtgtctggaacaacatcgaggatgagatcctcaaggcgtccgtttccaagtatggcttgaaccagtgggcgcgcgtctcttcgctgcttccccggaagacccccaagcaatgcaaggcgcgatggaacgagtggctggaccccagcatcaagaagatcgaatggagcaaggatgaagacgagaggctgctgcacctggccaagtccatgcccaaccagtggcggagcatcgcacccatcgtcggccgcactgccaaccaatgtctcgagcgataccagaagctgctcgacgaggccgagcagcgggactctgccggcctgggtctcgccggccccgacggaggcgagacccaagcacccaccgccgacgacgtccgcaggctgcgacccggcgaagtcgaccccgatcccgagaccaagcccgcgaagcccgacaccatcgatctcgacgaggacgagaaggagatgctgagcgaggcccgagcccgcctggccaacacgcagggcaagaaggccaagcgcaaagcccgcgagcgccagcaggaggagtcccgccgcttggctgccctccagaagcgtcgtgagctcaagaccgccggcatcaacatcaaagtcatcaccaggaagcctggtcagatggactacaatgccgacatccccttcgaaaaagcccccgccgctgggttttacgataccttggacgagcaaaagcgcaacgagcaccaacgggccagcttcgatcctcgcaagcaacaacttgcgaacaagagaaaaggcgagcaggatgacgaggcagaacggaagcggaggaagaacgagaaagatggcccatcggctgctacacaagccgccttaaaggccgggcagatgcagaagattcgtgaggcggagcagagcagcaagagaagagccctagcattaccagcgcctcaagtcagcgaaggcgaacttgaggacatcgtcaagatgggtatgatcggcgaacgtgccaacctcctagctcagtccagtgacaacgccgcaacgaggggacttgtcaacacatactcttcgctaaataaccagaccccaatcaggactcccatggctcctgcgcaagaggatcgtgtggctaccgaaatccgtaacattcgggccctcaccgataaccagtcggctttactaggcggggagaatgtggatcttaacgggagttctgatacaacaggtttcgcgcctcgggcagaagctattgcgacacccaacccaatggccacgccattacggactggtgccaatggtgtcggtgcaactcctcaaagagttggtcagacacccttaaggacgccccgcgataactttacgctcaacagaggggataatgaaatggctttggcaggaggggcgacgaacgatatacgactccgggagttatcattaaaacatcagctcaaacaaggactagcatctttaccaaagccaaaggaatccgaatgggagctggaaattcccgaggatcagcaggaatctgcagccacgcaagagctcgaagaggacgccgaagtcagagatcaacgcgaacgcgcgattcgagaagctcaggaagatttagaacgcaggaggcgaacacaagtgatgcaaagagacctgccccgaccggatttcgtggacgtcgacgtcctgacaactgcagcttctgcgatagatgacccagccgaggcgctcatagccaaggaagtggtccgtctagttgccggtgatgctctacgttacccacttccaggttccaaggtcaaaggcactgcgagtgcgcttgagaagctagacgatgcatcgctggccgaagctcgactgaaaatccttatggaggtaaagaccgcaccaaaacccgaagaagttcaagcggtatgggaacgcgaaaatagcaacgctctcctgttgggacttgggtgctacgaggacgacgatgaagagcaacagatggccgctatgcgatctgcatttgatgttgcccaagagtccaccgtagctattgcggagaaatgctccaaagtagagaaaaaattgaaccttcatttgggtggttatgagaaacgagcaaaaacactccgctctaaaatggctgaggcatcggagagtcttgagaaagcgagtttcgctctaggaggtttcaggaccttggccgtttcggaggagattactatcagaagtcgacttaatgctctgagagaagaagtgaattacgtcagtcgccgggagagagaagcgcagcaggcctatcggcaaacgaaagaggagctcgatggcttgattgatggcgtcaatgggtatcattag

SEQ ID NO: 1374 - protein, 801 aa, Muscodor strobelii
  misc_feature: SGI Peptide ID NO. 560059
  misc_feature (30)..(76): Pfam Id: PF00249 Pfam Desc: Myb-like DNA-binding domain
  misc_feature (82)..(126): Pfam Id: PF00249 Pfam Desc: Myb-like DNA-binding domain
  misc_feature (29)..(793): NCBI GI: 116194530 Blast Desc: CHGG_03863 [Chaetomium globosum CBS 148.51] gi|88179776|gb|EAQ87244.1| CHGG_03863 [Chaetomium globosum CBS 148.51]
  misc_feature (29)..(800): NCBI GI: 171683499 Blast Desc: protein product [Podospora anserina] gi|170941709|emb|CAP67363.1| protein product [Podospora anserina]
  misc_feature (29)..(800): NCBI GI: 85108732 Blast Desc: pre-mRNA splicing factor CEF1 [Neurospora crassa OR74A] gi|73917706|sp|Q7SAF6.1|CEF1_NEUCR RecName: Full=Pre-mRNA-splicing factor cef-1 gi|28924244|gb|EAA33398.1|
  misc_feature (29)..(801): NCBI GI: 46136583 Blast Desc: FG09807.1 [Gibberella zeae PH-1]
  misc_feature (29)..(801): NCBI GI: 156049835 Blast Desc: SS1G_08625 [Sclerotinia sclerotiorum 1980] gi|154693023|gb|EDN92761.1| SS1G_08625 [Sclerotinia sclerotiorum 1980]
  misc_feature (29)..(801): NCBI GI: 256726977 Blast Desc: [Nectria haematococca mpVI 77-13-4]
  misc_feature (29)..(801): NCBI GI: 39951567 Blast Desc: MGG_01426 [Magnaporthe grisea 70-15] gi|73917705|sp|Q52G60.1|CEF1_MAGGR RecName: Full=Pre-mRNA-splicing factor CEF1 gi|145020740|gb|EDK04869.1|
  misc_feature (29)..(801): NCBI GI: 261359736 Blast Desc: pre-mRNA-splicing factor cef-1 [Verticillium albo-atrum VaMs.102]
  misc_feature (29)..(801): NCBI GI: 154290654 Blast Desc: BC1G_15647 [Botryotinia fuckeliana B05.10] gi|150847478|gb|EDN22671.1| BC1G_15647 [Botryotinia fuckeliana B05.10]
  misc_feature (29)..(800): NCBI GI: 239606270 Blast Desc: pre-mRNA splicing factor cef-1 [Ajellomyces dermatitidis ER-3]
  misc_feature: Useful for introducing or modulating the production of volatile compounds
MQGVLAPRYTGAGNERLRTCPFRIDTPSKGGVWNNIEDEILKASVSKYGLNQWARVSSLLPRKTPKQCKARWNEWLDPSIKKIEWSKDEDERLLHLAKSMPNQWRSIAPIVGRTANQCLERYQKLLDEAEQRDSAGLGLAGPDGGETQAPTADDVRRLRPGEVDPDPETKPAKPDTIDLDEDEKEMLSEARARLANTQGKKAKRKARERQQEESRRLAALQKRRELKTAGINIKVITRKPGQMDYNADIPFEKAPAAGFYDTLDEQKRNEHQRASFDPRKQQLANKRKGEQDDEAERKRRKNEKDGPSAATQAALKAGQMQKIREAEQSSKRRALALPAPQVSEGELEDIVKMGMIGERANLLAQSSDNAATRGLVNTYSSLNNQTPIRTPMAPAQEDRVATEIRNIRALTDNQSALLGGENVDLNGSSDTTGFAPRAEAIATPNPMATPLRTGANGVGATPQRVGQTPLRTPRDNFTLNRGDNEMALAGGATNDIRLRELSLKHQLKQGLASLPKPKESEWELEIPEDQQESAATQELEEDAEVRDQRERAIREAQEDLERRRRTQVMQRDLPRPDFVDVDVLTTAASAIDDPAEALIAKEVVRLVAGDALRYPLPGSKVKGTASALEKLDDASLAEARLKILMEVKTAPKPEEVQAVWERENSNALLLGLGCYEDDDEEQQMAAMRSAFDVAQESTVAIAEKCSKVEKKLNLHLGGYEKRAKTLRSKMAEASESLEKASFALGGFRTLAVSEEITIRSRLNALREEVNYVSRREREAQQAYRQTKEELDGLIDGVNGYH

SEQ ID NO: 1375 - DNA, 3710 bp, Muscodor strobelii
  misc_feature: SGI EST ID NO. CUFF.3809.0
  misc_feature: Variant of the nucleotide sequence at SEQ ID NO 1373
caagatacagggtgacatttccactaacttacaggctacagcaggcagggacagtgggctgcgactgtacctaatgtagaaattctagaatgctgtccgcgccgcgaccaaaccttcaacatcctaccttaaagctcgactagctgctccccgagatctctcgcctccccacacaacccgcgtatatccgtccaagtatctcgttcgatccgatccaatcgagcagaggtaagcgcagggcttctcgtcgcgatgccggtcgtcaagggggggtgtctggaacaacatcgaggatgagatcctcaaggcgtccgtttccaagtatggcttgaaccagtgggcgcgcgtctcttcgctgcttccccggaagacccccaagcaatgcaaggcgcgatggaacgagtggctggaccccagcatcaagaagatcgaatggagcaaggatgaagacgagaggctgctgcacctggccaagtccatgcccaaccagtggcggagcatcgcacccatcgtcggccgcactgccaaccaatgtctcgagcgataccagaagctgctcgacgaggccgagcagcgggactctgccggcctgggtctcgccggccccgacggaggcgagacccaagcacccaccgccgacgacgtccgcaggctgcgacccggcgaagtcgaccccgatcccgagaccaagcccgcgaagcccgacaccatcgatctcgacgaggacgagaaggagatgctgagcgaggcccgagcccgcctggccaacacgcagggcaagaaggccaagcgcaaagcccgcgagcgccagcaggaggagtcccgccgcttggctgccctccagaagcgtcgtgagctcaagaccgccggcatcaacatcaaagtcatcaccaggaagcctggtcagatggactacaatgccgacatccccttcgaaaaagcccccgccgctgggttttacgataccttggacgagcaaaagcgcaacgagcaccaacgggccagcttcgatcctcgcaagcaacaacttgcgaacaagagaaaaggcgagcaggatgacgaggcagaacggaagcggaggaagaacgagaaagatggcccatcggctgctacacaagccgccttaaaggccgggcagatgcagaagattcgtgaggcggagcagagcagcaagagaagagccctagcattaccagcgcctcaagtcagcgaaggcgaacttgaggacatcgtcaagatgggtatgatcggcgaacgtgccaacctcctagctcagtccagtgacaacgccgcaacgaggggacttgtcaacacatactcttcgctaaataaccagaccccaatcaggactcccatggctcctgcgcaagaggatcgtgtggctaccgaaatccgtaacattcgggccctcaccgataaccagtcggctttactaggcggggagaatgtggatcttaacgggagttctgatacaacaggtttcgcgcctcgggcagaagctattgcgacacccaacccaatggccacgccattacggactggtgccaatggtgtcggtgcaactcctcaaagagttggtcagacacccttaaggacgccccgcgataactttacgctcaacagaggggataatgaaatggctttggcaggaggggcgacgaacgatatacgactccgggagttatcattaaaacatcagctcaaacaaggactagcatctttaccaaagccaaaggaatccgaatgggagctggaaattcccgaggatcagcaggaatctgcagccacgcaagagctcgaagaggacgccgaagtcagagatcaacgcgaacgcgcgattcgagaagctcaggaagatttagaacgcaggaggcgaacacaagtgatgcaaagagacctgccccgaccggatttcgtggacgtcgacgtcctgacaactgcagcttctgcgatagatgacccagccgaggcgctcatagccaaggaagtggtccgtctagttgccggtgatgctctacgttacccacttccaggttccaaggtcaaaggcactgcgagtgcgcttgagaagctagacgatgcatcgctggccgaagctcgactgaaaatccttatggaggtaaagaccgcaccaaaacccgaagaagttcaagcggtatgggaacgcgaaaatagcaacgctctcctgttgggacttgggtgctacgaggacgacgatgaagagcaacagatggccgctatgcgatctgcatttgatgttgcccaagagtccaccgtagctattgcggagaaatgctccaaagtagagaaaaaattgaaccttcatttgggtggttatgagaaacgagcaaaaacactccgctctaaaatggctgaggcatcggagagtcttgagaaagcgagtttcgctctaggaggtttcaggaccttggccgtttcggaggagattactatcagaagtcgacttaatgctctgagagaagaagtgaattacgtcagtcgccgggagagagaagcgcagcaggcctatcggcaaacgaaagaggagctcgatggcttgattgatggcgtcaatgggtatcattagtgtggcttaagggaagtgtatgataactacaaattgtatacttgagaaccgagaagtcatcagtgtccttgggcatgcataacgtcacaagataaatccttatattaattaccacctatattcctccggcggagggttcccattcacatcatcatctggcctcttgagcggcggtaccttcatgaccactgccaacaacaagctgatcgacgcaatacccacacaaaccaagaatgtaaccctgcaggcagcttcatagctgagcataacctcgtctttggtctggccatcgggcagcttcgcgatgacctcgatactgccacgcacccgttcaatcatatcccgcttccattcctccccgtcattaccgtcctcagatagcggagtgatgaactgccgcaaatacatcaacagcgcattttggaatacgagactagagcacgcaacgccaagcacgtttccgagagagcgccaaacgctcagcgtagttgaagcgacggctttttccttgtcttggttggaacaacgttgcagtgcaagctgcgtacccgtaaattgaaacccttggccagcagccgctggagcgaggaagactagatatatccagagcggccagccatgctgcatagctgatagtagggctgcgccgatgagaaagttgctcgtccccaggacgagtggccactttatacgcccggtccaacgaacgaggactccggtcgcggcacctactaccgcggctgtgatggtggggactaagaggtaaagacctgactgcgttgctgttgtgagcagaacgccgcggaagaagattggcctgtgtatgttagtgactctgcgaatgtcgtgtatagtatcgttgggtgggttcgggttgtgttcctctgttctcgaagagcatgtagaagagagtatgagacttgggcttacatgttgaaaagaattgcattaaccaagaaagcggcacagaagtttgcgaatatcatgttcgcccgcggtgatgtatgtaaaaactcaagaggcatgacaggtttctccttgactatactctcgacatatagaaacgtcgggaagcaaacgccgaaaagcgcaagggaggtaatgatgaatggatgagacccta

SEQ ID NO: 1376 - DNA, 1515 bp, Muscodor strobelii
  misc_feature: SGI cDNA ID NO. 560060
  misc_feature: Encodes the peptide sequence at SEQ ID NO 1377
atggcttcgtcgcaccccgtgatcacggcacatttccactcggcaaacagtgcgtcttggcttacgacgacttacatgttgacgacaattgctttctcgtccttcgctggtcgattatccgacgctatcggtcggagaccgatatacgtcgggtccatagctctttttgggattgctacaatttggtgcgcactggctcagtcgatggcaagtttgctgctcgcgcgtgctatctgtggcataggtggcggggggatgatgacaatgggtgtcatttctgtcgttgattctgttgatgatgtacgccgaggtccctggcaaagttggaacaacattgtctacggcatatcagcagcatcaggtgcagcgtttggtggtgtccttgcagacactctcggctggcgttgggagtttggagttcaagctcttcccatcaccctatgtctcggcgtcgcatacttcggaatgcccgctcatttgggcctagcgaaaggcgcagaaaggaaatcactcggtaaagcattaggagaatttgatttcaaagggtcaattttattagttatgtctataacgtttctgattttgggaatgaatctcggtggtaatgttttgccatggtctcatccattcatcattacctcccttgcgcttttcggcgtttgcttcccgacgtttctatatgtcgagagtatagtcaaggagaaacctgtcatgcctcttgagtttttacatacatcaccgcgggcgaacatgatattcgcaaacttctgtgccgctttcttggttaatgcaattcttttcaacatgccaatcttcttccgcggcgttctgctcacaacagcaacgcagtcaggtctttacctcttagtccccaccatcacagccgcggtagtaggtgccgcgaccggagtcctcgttcgttggaccgggcgtataaagtggccactcgtcctggggacgagcaactttctcatcggcgcagccctactatcagctatgcagcatggctggccgctctggatatatctagtcttcctcgctccagcggctgctggccaagggtttcaatttacgggtacgcagcttgcactgcaacgttgttccaaccaagacaaggaaaaagccgtcgcttcaactacgctgagcgtttggcgctctctcggaaacgtgcttggcgttgcgtgctctagtctcgtattccaaaatgcgctgttgatgtatttgcggcagttcatcactccgctatctgaggacggtaatgacggggaggaatggaagcgggatatgattgaacgggtgcgtggcagtatcgaggtcatcgcgaagctgcccgatggccagaccaaagacgaggttatgctcagctatgaagctgcctgcagggttacattcttggtttgtgtgggtattgcgtcgatcagcttgttgttggcagtggtcatgaaggtaccgccgctcaagaggccagatgatgatgtgaatgggaaccctccgccggaggaatataggtggtaa

SEQ ID NO: 1377 - protein, 504 aa, Muscodor strobelii
  misc_feature: SGI Peptide ID NO. 560060
  misc_feature (1)..(393): Pfam Id: PF07690 Pfam Desc: Major Facilitator Superfamily
  misc_feature (6)..(197): Pfam Id: PF07690 Pfam Desc: Major Facilitator Superfamily
  misc_feature (206)..(393): Pfam Id: PF07690 Pfam Desc: Major Facilitator Superfamily
  misc_feature (35)..(85): Pfam Id: PF00083 Pfam Desc: Sugar (and other) transporter
  misc_feature (1)..(486): NCBI GI: 46136585 Blast Desc: FG09808.1 [Gibberella zeae PH-1]
  misc_feature (1)..(410): NCBI GI: 261359737 Blast Desc: vacuolar basic amino acid transporter 1 [Verticillium albo-atrum VaMs.102]
  misc_feature (1)..(477): NCBI GI: 171683495 Blast Desc: protein product [Podospora anserina] gi|170941707|emb|CAP67361.1| protein product [Podospora anserina]
  misc_feature (1)..(461): NCBI GI: 154299810 Blast Desc: BC1G_11531 [Botryotinia fuckeliana B05.10] gi|150857221|gb|EDN32413.1| BC1G_11531 [Botryotinia fuckeliana B05.10]
  misc_feature (1)..(493): NCBI GI: 226284711 Blast Desc: multidrug resistance protein fnx1 [Paracoccidioides brasiliensis Pb01]
  misc_feature (1)..(468): NCBI GI: 258573945 Blast Desc: conserved [Uncinocarpus reesii 1704] gi|237901420|gb|EEP75821.1| conserved [Uncinocarpus reesii 1704]
  misc_feature (1)..(488): NCBI GI: 238841147 Blast Desc: multidrug resistance protein fnx1 [Microsporum canis CBS 113480]
  misc_feature (1)..(486): NCBI GI: 119479113 Blast Desc: MFS transporter, [Neosartorya fischeri NRRL 181] gi|119407739|gb|EAW17688.1| MFS transporter, [Neosartorya fischeri NRRL 181]
  misc_feature (1)..(443): NCBI GI: 119192586 Blast Desc: CIMG_00670 [Coccidioides immitis RS]
  misc_feature (1)..(443): NCBI GI: 240106036 Blast Desc: Major Facilitator Superfamily protein [Coccidioides posadasii C735 delta SOWgp]
MASSHPVITAHFHSANSASWLTTTYMLTTIAFSSFAGRLSDAIGRRPIYVGSIALFGIATIWCALAQSMASLLLARAICGIGGGGMMTMGVISVVDSVDDVRRGPWQSWNNIVYGISAASGAAFGGVLADTLGWRWEFGVQALPITLCLGVAYFGMPAHLGLAKGAERKSLGKALGEFDFKGSILLVMSITFLILGMNLGGNVLPWSHPFIITSLALFGVCFPTFLYVESIVKEKPVMPLEFLHTSPRANMIFANFCAAFLVNAILFNMPIFFRGVLLTTATQSGLYLLVPTITAAVVGAATGVLVRWTGRIKWPLVLGTSNFLIGAALLSAMQHGWPLWIYLVFLAPAAAGQGFQFTGTQLALQRCSNQDKEKAVASTTLSVWRSLGNVLGVACSSLVFQNALLMYLRQFITPLSEDGNDGEEWKRDMIERVRGSIEVIAKLPDGQTKDEVMLSYEAACRVTFLVCVGIASISLLLAVVMKVPPLKRPDDDVNGNPPPEEYRW

SEQ ID NO: 1378 - DNA, 4536 bp, Muscodor strobelii
  misc_feature: SGI EST ID NO. CUFF.3810.2
  misc_feature: Variant of the nucleotide sequence at SEQ ID NO 1376
atgaagtgcgcgttggggattccgatcttaggccatttgacagcacagctgctatcaaagtaaaagctctgaccccagtatcaccaacccccgtatcagaatacacaaactcgacaacgagccttttgtcaccgaatggtgattctaacggaaacgaagcacttcaaaaaccgcgtgaatatctcatagatacagatccggtgcgttttcgtgtaatattcgcaggatatatgttagcaatattcatcgcgaatttcgacggcacgatcatggcttcgtcgcaccccgtgatcacggcacatttccactcggcaaacagtgcgtcttggcttacgacgacttacatgttgacgacaattgctttctcgtccttcgctggtcgattatccgacgctatcggtcggagaccgatatacgtcgggtccatagctctttttgggattgctacaatttggtgcgcactggctcagtcgatggcaagtttgctgctcgcgcgtgctatctgtggcataggtggcggggggatgatgacaatgggtgtcatttctgtcgttgattctgttgatgatgtacgccgaggtccctggcaaagttggaacaacattgtctacggcatatcagcagcatcaggtgcagcgtttggtggtgtccttgcagacactctcggctggcgttgggagtttggagttcaagctcttcccatcaccctatgtctcggcgtcgcatacttcggaatgcccgctcatttgggcctagcgaaaggcgcagaaaggaaatcactcggtaaagcattaggagaatttgatttcaaagggtcaattttattagttatgtctataacgtttctgattttgggaatgaatctcggtggtaatgttttgccatggtctcatccattcatcattacctcccttgcgcttttcggcgtttgcttcccgacgtttctatatgtcgagagtatagtcaaggagaaacctgtcatgcctcttgagtttttacatacatcaccgcgggcgaacatgatattcgcaaacttctgtgccgctttcttggttaatgcaattcttttcaacatgccaatcttcttccgcggcgttctgctcacaacagcaacgcagtcaggtctttacctcttagtccccaccatcacagccgcggtagtaggtgccgcgaccggagtcctcgttcgttggaccgggcgtataaagtggccactcgtcctggggacgagcaactttctcatcggcgcagccctactatcagctatgcagcatggctggccgctctggatatatctagtcttcctcgctccagcggctgctggccaagggtttcaatttacgggtacgcagcttgcactgcaacgttgttccaaccaagacaaggaaaaagccgtcgcttcaactacgctgagcgtttggcgctctctcggaaacgtgcttggcgttgcgtgctctagtctcgtattccaaaatgcgctgttgatgtatttgcggcagttcatcactccgctatctgaggacggtaatgacggggaggaatggaagcgggatatgattgaacgggtgcgtggcagtatcgaggtcatcgcgaagctgcccgatggccagaccaaagacgaggttatgctcagctatgaagctgcctgcagggttacattcttggtttgtgtgggtattgcgtcgatcagcttgttgttggcagtggtcatgaaggtaccgccgctcaagaggccagatgatgatgtgaatgggaaccctccgccggaggaatataggtggtaattaatataaggatttatcttgtgacgttatgcatgcccaaggacactgatgacttctcggttctcaagtatacaatttgtagttatcatacacttcccttaagccacactaatgatacccattgacgccatcaatcaagccatcgagctcctctttcgtttgccgataggcctgctgcgcttctctctcccggcgactgacgtaattcacttcttctctcagagcattaagtcgacttctgatagtaatctcctccgaaacggccaaggtcctgaaacctcctagagcgaaactcgctttctcaagactctccgatgcctcagccattttagagcggagtgtttttgctcgtttctcataaccacccaaatgaaggttcaattttttctctactttggagcatttctccgcaatagctacggtggactcttgggcaacctatcataaagtcagtgtctgcgagaactcgtaacggtttgtgagaataccactcacatcaaatgcagatcgcatagcggccatctgttgctcttcatcgtcgtcctcgtagcacccaagtcccaacaggagagcgttgctattttcgcgttcccataccgcttgaacttcttcgggttttggtgcggtctttacctccataaggattttcagtcgagcttcggccagcgatgcatcgtctagcttctcaagcgcactcgcagtgcctttgaccttggaacctggaagtgggtaacgtagagcatcaccggcaactagacggaccacttccttggctatgagcgcctcggctgggtcatctatcgcagaagctgcagttgtcaggacgtcgacgtccacgaaatccggtcggggcaggtctctttgcatcacttgtgttcgcctcctgcgttctaaatcttcctgagcttctcgaatcgcgcgttcgcgttgatctctgacttcggcgtcctcttcgagctcttgcgtggctgcagattcctgctgatcctcgggaatttccagctcccattcggattcctttggctttggtaaagatgctagtccttgtttgagctgatgttttaatgataactcccggagtcgtatatcgttcgtcgcccctcctgccaaagccatttcattatcccctctgttgagcgtaaagttatcgcggggcgtccttaagggtgtctgaccaactctttgaggagttgcaccgacaccattggcaccagtccgtaatggcgtggccattgggttgggtgtcgcaatagcttctgcccgaggcgcgaaacctgttgtatcagaactcccgttaagatccacattctccccgcctagtaaagccgactggttatcggtgagggcccgaatgttacggatttcggtagccacacgatcctcttgcgcaggagccatgggagtcctgattggggtctggttatttagcgaagagtatgtgttgacaagtcccctcgttgcggcgttgtcactggactgagctaggaggttggcacgttcgccgatcatacccatcttgacgatgtcctcaagttcgccttcgctgacttgaggcgctggtaatgctagggctcttctcttgctgctctgctccgcctcacgaatcttctgcatctgcccggcctttaaggcggcttgtgtagcagccgatgggccatctttctcgttcttcctccgcttccgttctgcctcgtcatcctgctcgccttttctcttgttcgcaagttgttgcttgcgaggatcgaagctggcccgttggtgctcgttgcgcttttgctcgtccaaggtatcgtaaaacccagcggcgggggctttttcgaaggggatgtcggcattgtagtccatctgaccaggcttcctggtgatgactttgatgttgatgccggcggtcttgagctcacgacgcttctggagggcagccaagcggcgggactcctcctgctggcgctcgcgggctttgcgcttggccttcttgccctgcgtgttggccaggcgggctcgggcctcgctcagcatctccttctcgtcctcgtcgagatcgatggtgtcgggcttcgcgggcttggtctcgggatcggggtcgacttcgccgggtcgcagcctgcggacgtcgtcggcggtgggtgcttgggtctcgcctccgtcggggccggcgagacccaggccggcagagtcccgctgctcggcctcgtcgagcagcttctggtatcgctcgagacattggttggcagtgcggccgacgatgggtgcgatgctccgccactggttgggcatggacttggccaggtgcagcagcctctcgtcttcatccttgctccattcgatcttcttgatgctggggtccagccactcgttccatcgcgccttgcattgcttgggggtcttccggggaagcagcgaagagacgcgcgcccactggttcaagccatacttggaaacggacgccttgaggatctcatcctcgatgttgttccagacacccccccttgacgaccggcatcgcgacgagaagccctgcgcttacctctgctcgattggatcggatcgaacgagatacttggacggatatacgcgggttgtgtggggaggcgagagatctcggggagcagctagtcgagctttaaggtaggatgttgaaggtttggtcgcggcgcggacagcattctagaatttctacattaggtacagtcgcagcccactgtccctgcctgctgtagcctgtaagttagtggaaatgtcaccctgtatcttg

SEQ ID NO: 1379 - DNA, 1587 bp, Muscodor strobelii
  misc_feature: SGI cDNA ID NO. 560061
  misc_feature: Encodes the peptide sequence at SEQ ID NO 1380
atgatacaaccgccaatgccgcccgcgctggtggcttttctcaagcctttccatgttgacgttgataaagcccacgctcttgcacatgattttcaccagacttttcggacgctagctgctgaatctgcggagcaatttctgccaactcccatatcagaggcgatcttacgcccaggaggaggagaaaagggccgatatcttgccatagacatcggtggcacaaatctgcgtgtggggttcattgagctcttaggcaatggtggtgaccctatccagaatggacattccgaaaatgagaagttatcgggtcatcgaacttcgtccaaccttcgtcgagtcctagagcagtcctggcctatctcagaagagctgaagaacgagaatcccgattctcttttctcttggatcggaagctgcattgctgaaatcgtcaggaaaggctcaaagacttttgggttggaccggcatagtgagctcttgatgggagtcaccttttcttttcctatcgagcaagacgacttgggacgagcttccatcatgtctatgggtaaaggcttcgcaattacatcgaacatcgatcttgatattcatctcatcaatggttacgagatgtggagatcaccagatttaccccctatcagaatcaacgcaatcttgaacgacgcagttgccacccttgtctcattcatataccaatttcaagaagatgattctcacagagcagctatgggtattatctgcgggactggaaccaatgcgacaattcctcttaggaaaagcctgatcaagccctcaaagctgcctagaaaaattcaaactgtgactaacaccccggttagcgacatcaaaatcacagtcaacacggaatggagcatcaatggcaccgctgaaatcctccgcaattcgggattgatcagcgaatgggatagcaaacttgatgctgccggtgaggtccccggctttcaaccatttgagtacatgacatctggtcggtacctcggcgaactagcacgcatcgtatttgtcgactacctcgtatctcatctcgatatatcagaagaaagcattccgatgggactattgcatcggttcggccttggaacaactttcctcagtcactatcagcctctagatcccccgtcgttgctcaggaagttggaagttcagttccctccaaatacatcccaggcgccagttgagtggaccgagaaacatgctgcagcgctgtatcatatcgcaaagtccatacaagtacgggcttcggccatgatggcagctgcagtaatcggtctgttggcttgcgccgatgatattccgcttgcagaaccgttacaggataaaacaaacaggcaacagacaaatggaaggccgaaaccgatgaatctcatcgtcggatacacgggtggctgtatcgtacactttcagaattatttatctgactgccagtcctttttggacgagattatcactacggaattcggggctcatgcccctgtgagagtgacactgagtccatgtcacgacggtggtctaacaggagcaggtgtcctgtgtggtgccgtccgagcaagatcaagagacgtctga

SEQ ID NO: 1380 - protein, 528 aa, Muscodor strobelii
  misc_feature: SGI Peptide ID NO. 560061
  misc_feature (9)..(233): Pfam Id: PF00349 Pfam Desc: Hexokinase
  misc_feature (240)..(524): Pfam Id: PF03727 Pfam Desc: Hexokinase
  misc_feature (58)..(92): Pfam Id: PF00349 Pfam Desc: Hexokinase
  misc_feature (319)..(343): Pfam Id: PF03727 Pfam Desc: Hexokinase
  misc_feature (13)..(526): NCBI GI: 164424434 Blast Desc: NCU06996 [Neurospora crassa OR74A] gi|157070510|gb|EAA33400.2| conserved [Neurospora crassa OR74A]
  misc_feature (13)..(526): NCBI GI: 171683497 Blast Desc: protein product [Podospora anserina] gi|170941708|emb|CAP67362.1| protein product [Podospora anserina]
  misc_feature (13)..(501): NCBI GI: 46136585 Blast Desc: FG09808.1 [Gibberella zeae PH-1]
  misc_feature (9)..(513): NCBI GI: 39951563 Blast Desc: MGG_01424 [Magnaporthe grisea 70-15] gi|145020742|gb|EDK04871.1| MGG_01424 [Magnaporthe grisea 70-15]
  misc_feature (13)..(499): NCBI GI: 256727553 Blast Desc: [Nectria haematococca mpVI 77-13-4]
  misc_feature (130)..(528): NCBI GI: 116194486 Blast Desc: CHGG_03841 [Chaetomium globosum CBS 148.51] gi|88179754|gb|EAQ87222.1| CHGG_03841 [Chaetomium globosum CBS 148.51]
  misc_feature (10)..(527): NCBI GI: 156049837 Blast Desc: SS1G_08626 [Sclerotinia sclerotiorum 1980] gi|154693024|gb|EDN92762.1| SS1G_08626 [Sclerotinia sclerotiorum 1980]
  misc_feature (13)..(524): NCBI GI: 67523449 Blast Desc: AN2180.2 [Aspergillus nidulans FGSC A4] gi|10636053|emb|CAC10522.1| hexokinase-like protein [Emericella nidulans] gi|40745068|gb|EAA64224.1| AN2180.2 [Aspergillus FGSC ;
  misc_feature (9)..(428): NCBI GI: 261352707 Blast Desc: hexokinase-1 [Verticillium albo-atrum VaMs.102]
  misc_feature (13)..(521): NCBI GI: 115388233 Blast Desc: conserved [Aspergillus terreus NIH2624] gi|114195706|gb|EAU37406.1| conserved [Aspergillus terreus NIH2624]
  misc_feature (27)..(505): SWISSPROT Homolog: EC 2.7.1.1 Hexokinase
MIQPPMPPALVAFLKPFHVDVDKAHALAHDFHQTFRTLAAESAEQFLPTPISEAILRPGGGEKGRYLAIDIGGTNLRVGFIELLGNGGDPIQNGHSENEKLSGHRTSSNLRRVLEQSWPISEELKNENPDSLFSWIGSCIAEIVRKGSKTFGLDRHSELLMGVTFSFPIEQDDLGRASIMSMGKGFAITSNIDLDIHLINGYEMWRSPDLPPIRINAILNDAVATLVSFIYQFQEDDSHRAAMGIICGTGTNATIPLRKSLIKPSKLPRKIQTVTNTPVSDIKITVNTEWSINGTAEILRNSGLISEWDSKLDAAGEVPGFQPFEYMTSGRYLGELARIVFVDYLVSHLDISEESIPMGLLHRFGLGTTFLSHYQPLDPPSLLRKLEVQFPPNTSQAPVEWTEKHAAALYHIAKSIQVRASAMMAAAVIGLLACADDIPLAEPLQDKTNRQQTNGRPKPMNLIVGYTGGCIVHFQNYLSDCQSFLDEIITTEFGAHAPVRVTLSPCHDGGLTGAGVLCGAVRARSRDV

SEQ ID NO: 1381 - DNA, 5740 bp, Muscodor strobelii
  misc_feature: SGI EST ID NO. CUFF.3814.1
  misc_feature: Variant of the nucleotide sequence at SEQ ID NO 1379
ggggttggaggggtcgtctgacaacactgctgggctatctactatctcatttctgagtacctttttgaccgtgacatgatctcggaccgcaaagcagcttgtaacctagacgcgaggactctcaattttacgcacctaataacgagtaattacgaggccgaaattatgagcacagaggaggggaagagaagcgccgaggcgctgatccccaagttcaaattcgagcgcgttctgaaccaaggtatgacatgttatttcccaaacttctatactagcagcaacactctgagcattgggtatcacctgttcttagtcatgcaaaaaaactaatttcctacgcagatgaagctggacgacgcatcaacttgtatggtcacgtggacacacagccagcgctgttgacgatccaacgcgctccatttcctagcgctcccgaatatctttcagcattgcccgccaatttgcgtagcataacaaatctcggcaacaatgatatctactcctggtttctcggctctggcggaccagtcctcgaaaataacagcgacgaattcgctgacttcaagattgacctgatatatccttgcactgacaagcatatcaaaaagcatagcaagcagggttatcgcttcgtgaccgagacgcccgaaatttaccgcgacaaagtgcgacccttcatgcgaatgaatcgggaggagggtcgtctgaattgggtatacaacatcatcgagggaaagaaagaggtcgaagacgtgatatacagaacacctctgggacgagatggcgacgaagggttcttgctgctgcccaatttgcactgggaccggaagaccatcgatgccttacatctcctcggtattgtcgagcgccgagatatctggagtctccgagacctcaagaagaaacacattccctggcttaaacacatgagagcgaagttgaccgacggcacaattaagacgtacccgcaaatcgaggcagatcagctgaagctgttttgccactaccagcctacatattaccacttccacatccacgtcgtgcacgtgcagctcgaggcgaacgccacacagtcgctggggaaagcagtcggtctggacagcatcattgagcagctcgagggaatggcaggaaatgaagagacggggatggatacgatatcgatgagctatacagtaggggaggcgtcagatttatggctggatgtattcgaaccactcaagatgcgcggtatagcttctcaatcgcaatgacgaggtcgttcacgcctggtccgctgggacagtcggtccactgtccaccgtctcgaatacaatacatttggtcattcaagcgaaccgtgcagcttttcttgacgccaagctagaaataactaattagtacacagatgcgatcgaggggaattgtagaagattatggagatgcgctcaggaacgtacactctcagttctttcgacactgcgccgcaacatgctcatgccaaaggccccatcgtccctcgtcgcgcattcgttgagcttctcgaaatcgactgcgtgctcgagagcgcagtcctggacgagctcgcgttgcgggatgttgggatagtcacgggtcagacacatagtgaagcccagccatatcttgggatccgaatagagctgctgggcgcagagttcgatgatgttgcccatacactcggcggggccgtgtttgcattggacgccgtcgttcacggtgggagtgccgatgaaggagagcgtgaagttgaccttgtcgacgacacggatcatggcgggcaggatcatctccttaagacagtctttggcatccgggcatttgctcatgatgtgagcctcgagaggcacgagctggcgggcctcggtggttgttacgacatcgaggtcaacagactcgcttctgccagggacattcggggctgatacgtcgggaccggcggcgaagtcggtgtcggccgaggggaaggaggtcggcaaagaagtcgaataggcggacaacaggccagacgagtaaagggcgtaaaagctggcggcgacgagcaggacgacgaagaatggcctgtggcgacgacgagaccgacttcgtgcgggtctcctgtcttccacggtgggaagggtgatacgagcagccatggcgcggagctgcggatgagctgcggatgagctgtggatgagctgtggatgagttatgcaggcccaagacgacgggtacaatacgatagcgatgctggatgatagggcagtgagtgtgggacagatatgtagacaatgcaagaaagctatcgacaagcaacgtaaagccgacgtaagacagtagtacagtaatgatgttggtgacggtgttgtcgtgagccgatgcgggacgagacgaggccagaggacccaagggggatggatggtgtggagttcaggtggtaccttggagcagctgagctgttgcaggggtttattaggcctccaatactagatgatgtatgtaaccagctacttcctaccttgtactagtggcaggtgcactccgccgaggggcactgccaaagtataataatccgaacaagatgggacgcgatgtcgccaatccagctgccttccagtggtcactcacgctgcgcacgcgacatctgaaaccgctgggcacttgccgtcgtgtggggctgcgcagatagtctcggctgtcacaggttagaatggaacgggcaggatggataccttacgaatactcgaatgtagcaagttttgatagcgacgagacggctacgatagcttcattccaagcagattcttatccaagatctcactcttacccactttacatgaacacaagatccggccatctaaacttgggacgttacggattcgttcaactcacgtaccgaagcctgccaattgttgaaaacgtttgacgcatgccttgctccgattatatgacgaggcctcattaggtacagaccttctacggagattccatctcgttgcttctatttttatgcagttcgcttccaactttcccggcccagccatttgaacctgcatttccgtctgcattccactgcaactgcaacgtttctagactcggcaagtgagatttgctgctgttacgaccgtccgtcacatgaacaatttgagaaacagagaacattgaatcaaccaactgccgaacttacccagacgttgatcgagagctcgaccaatcacaggcatcgaattccgttgcccttccctttcaacctcagtctcttctaacccttacgttcgcttcatggcatcgaggcaatacaagtccaaaacacttttaacatgatacaaccgccaatgccgcccgcgctggtggcttttctcaagcctttccatgttgacgttgataaagcccacgctcttgcacatgattttcaccagacttttcggacgctagctgctgaatctgcggagcaatttctgccaactcccatatcagaggcgatcttacgcccaggaggaggagaaaagggccgatatcttgccatagacatcggtggcacaaatctgcgtgtggggttcattgagctcttaggcaatggtggtgaccctatccagaatggacattccgaaaatgagaagttatcgggtcatcgaacttcgtccaaccttcgtcgagtcctagagcagtcctggcctatctcagaagagctgaagaacgagaatcccgattctcttttctcttggatcggaagctgcattgctgaaatcgtcaggaaaggctcaaagacttttgggttggaccggcatagtgagctcttgatgggagtcaccttttcttttcctatcgagcaagacgacttgggacgagcttccatcatgtctatgggtaaaggcttcgcaattacatcgaacatcgatcttgatattcatctcatcaatggttacgagatgtggagatcaccagatttaccccctatcagaatcaacgcaatcttgaacgacgcagttgccacccttgtctcattcatataccaatttcaagaagatgattctcacagagcagctatgggtattatctgcgggactggaaccaatgcgacaattcctcttaggaaaagcctgatcaagccctcaaagctgcctagaaaaattcaaactgtgactaacaccccggttagcgacatcaaaatcacagtcaacacggaatggagcatcaatggcaccgctgaaatcctccgcaattcgggattgatcagcgaatgggatagcaaacttgatgctgccggtgaggtccccggctttcaaccatttgagtacatgacatctggtcggtacctcggcgaactagcacgcatcgtatttgtcgactacctcgtatctcatctcgatatatcagaagaaagcattccgatgggactattgcatcggttcggccttggaacaactttcctcagtcactatcagcctctagatcccccgtcgttgctcaggaagttggaagttcagttccctccaaatacatcccaggcgccagttgagtggaccgagaaacatgctgcagcgctgtatcatatcgcaaagtccatacaagtacgggcttcggccatgatggcagctgcagtaatcggtctgttggcttgcgccgatgatattccgcttgcagaaccgttacaggataaaacaaacaggcaacagacaaatggaaggccgaaaccgatgaatctcatcgtcggatacacgggtggctgtatcgtacactttcagaattatttatctgactgccagtcctttttggacgagattatcactacggaattcggggctcatgcccctgtgagagtgacactgagtccatgtcacgacggtggtctaacaggagcaggtgtcctgtgtggtgccgtccgagcaagatcaagagacgtctgaggcttgatgcaagatacgacgcggtggactgtaaatggatacccggatgcgatacgattcatagagaaaacctgtagatgggctaggcaactaaacaagcgggatgaccagatacttacacttacaattcctctcgtgatatcaatgcgggcatctgtaagtcgctacttgtgtggctattcactgcggctgtggcgtagatagctgtgtgatacgggtatctagaacccgtagagcccgcgttcctggcattcaatatttggggttgtgagataccttcggctgaagtgtacttctgggtgtggggacatatccgcttccatacattagaaggtacttccatgtccaagcctcccagccttaccacatacattccctgtctagtggaatgcccattctaaattccaaccagccaacatcatgtcaggccgaacaaagaatcttgcacttctcctcgcgccgctttgctaggcattttatgagagcctcccagaaacagcgatgttccaaattccgagtcgcagagatacgagcatcataggctccctacgccttgattaatgataagctgaatgtattgtctggtcatatactcagctctagcaaacattccctcagtcagtggacctactggggtgtgacgcatttggatatttcacaatcttctgatagtcctacatatctcaccgattcaattgagatcttacttatttacgtgtctttcttcttcgtcttcttggctgcatcttgtttcataacgaagaaaggcgatacgatgagtcccaaccgcaaaggccaaggatccgcgtcgaatgatggcgctgacgaagatgagcgacgtccacttcttgaagaga

SEQ ID NO: 1382 - DNA, 705 bp, Muscodor strobelii
  misc_feature: SGI cDNA ID NO. 560062
  misc_feature: Encodes the peptide sequence at SEQ ID NO 1383
atggctgctcgtatcacccttcccaccgtggaagacaggagacccgcacgaagtcggtctcgtcgtcgccacaggccattcttcgtcgtcctgctcgtcgccgccagcttttacgccctttactcgtctggcctgttgtccgcctattcgacttctttgccgacctccttcccctcggccgacaccgacttcgccgccggtcccgacgtatcagccccgaatgtccctggcagaagcgagtctgttgacctcgatgtcgtaacaaccaccgaggcccgccagctcgtgcctctcgaggctcacatcatgagcaaatgcccggatgccaaagactgtcttaaggagatgatcctgcccgccatgatccgtgtcgtcgacaaggtcaacttcacgctctccttcatcggcactcccaccgtgaacgacggcgtccaatgcaaacacggccccgccgagtgtatgggcaacatcatcgaactctgcgcccagcagctctattcggatcccaagatatggctgggcttcactatgtgtctgacccgtgactatcccaacatcccgcaacgcgagctcgtccaggactgcgctctcgagcacgcagtcgatttcgagaagctcaacgaatgcgcgacgagggacgatggggcctttggcatgagcatgttgcggcgcagtgtcgaaagaactgagagtgtacgttcctga

SEQ ID NO: 1383 - protein, 234 aa, Muscodor strobelii
  misc_feature: SGI Peptide ID NO. 560062
  misc_feature (19)..(232): NCBI GI: 256726978 Blast Desc: NECHADRAFT_33321 [Nectria haematococca mpVI 77-13-4]
  misc_feature (81)..(229): NCBI GI: 164424436 Blast Desc: NCU06997 [Neurospora crassa OR74A] gi|157070511|gb|EAA33401.2| [Neurospora crassa OR74A]
  misc_feature (95)..(233): NCBI GI: 46136587 Blast Desc: FG09809.1 [Gibberella zeae PH-1]
  misc_feature (22)..(229): NCBI GI: 156049839 Blast Desc: SS1G_08627 [Sclerotinia sclerotiorum 1980] gi|154693025|gb|EDN92763.1| SS1G_08627 [Sclerotinia sclerotiorum 1980]
  misc_feature (96)..(232): NCBI GI: 169610748 Blast Desc: SNOG_08481 [Phaeosphaeria nodorum SN15] gi|111062529|gb|EAT83649.1| SNOG_08481 [Phaeosphaeria nodorum SN15]
  misc_feature (74)..(232): NCBI GI: 189205793 Blast Desc: conserved [Pyrenophora tritici-repentis Pt-1C-BFP] gi|187975324|gb|EDU41950.1| conserved [Pyrenophora tritici-repentis Pt-1C-BFP]
  misc_feature (75)..(232): NCBI GI: 242818684 Blast Desc: conserved [Talaromyces stipitatus ATCC 10500] gi|218713631|gb|EED13055.1| conserved [Talaromyces stipitatus ATCC 10500]
  misc_feature (75)..(232): NCBI GI: 212530438 Blast Desc: conserved [Penicillium marneffei ATCC 18224] gi|210074774|gb|EEA28861.1| conserved [Penicillium marneffei ATCC 18224]
  misc_feature (76)..(231): NCBI GI: 171683485 Blast Desc: protein product [Podospora anserina] gi|170941702|emb|CAP67356.1| protein product [Podospora anserina]
  misc_feature (46)..(232): NCBI GI: 258573335 Blast Desc: conserved [Uncinocarpus reesii 1704] gi|237901115|gb|EEP75516.1| conserved [Uncinocarpus reesii 1704]
MAARITLPTVEDRRPARSRSRRRHRPFFVVLLVAASFYALYSSGLLSAYSTSLPTSFPSADTDFAAGPDVSAPNVPGRSESVDLDVVTTTEARQLVPLEAHIMSKCPDAKDCLKEMILPAMIRVVDKVNFTLSFIGTPTVNDGVQCKHGPAECMGNIIELCAQQLYSDPKIWLGFTMCLTRDYPNIPQRELVQDCALEHAVDFEKLNECATRDDGAFGMSMLRRSVERTESVRS

SEQ ID NO: 1384 - DNA, 5935 bp, Muscodor strobelii
  misc_feature: SGI EST ID NO. CUFF.3813.0
  misc_feature: Variant of the nucleotide sequence at SEQ ID NO 1382
tctcttcaagaagtggacgtcgctcatcttcgtcagcgccatcattcgacgcggatccttggcctttgcggttgggactcatcgtatcgcctttcttcgttatgaaacaagatgcagccaagaagacgaagaagaaagacacgtaaataagtaagatctcaattgaatcggtgagatatgtaggactatcagaagattgtgaaatatccaaatgcgtcacaccccagtaggtccactgactgagggaatgtttgctagagctgagtatatgaccagacaatacattcagcttatcattaatcaaggcgtagggagcctatgatgctcgtatctctgcgactcggaatttggaacatcgctgtttctgggaggctctcataaaatgcctagcaaagcggcgcgaggagaagtgcaagattctttgttcggcctgacatgatgttggctggttggaatttagaatgggcattccactagacagggaatgtatgtggtaaggctgggaggcttggacatggaagtaccttctaatgtatggaagcggatatgtccccacacccagaagtacacttcagccgaaggtatctcacaaccccaaatattgaatgccaggaacgcgggctctacgggttctagatacccgtatcacacagctatctacgccacagccgcagtgaatagccacacaagtagcgacttacagatgcccgcattgatatcacgagaggaattgtaagtgtaagtatctggtcatcccgcttgtttagttgcctagcccatctacaggttttctctatgaatcgtatcgcatccgggtatccatttacagtccaccgcgtcgtatcttgcatcaagcctcagacgtctcttgatcttgctcggacggcaccacacaggacacctgctcctgttagaccaccgtcgtgacatggactcagtgtcactctcacaggggcatgagccccgaattccgtagtgataatctcgtccaaaaaggactggcagtcagataaataattctgaaagtgtacgatacagccacccgtgtatccgacgatgagattcatcggtttcggccttccatttgtctgttgcctgtttgttttatcctgtaacggttctgcaagcggaatatcatcggcgcaagccaacagaccgattactgcagctgccatcatggccgaagcccgtacttgtatggactttgcgatatgatacagcgctgcagcatgtttctcggtccactcaactggcgcctgggatgtatttggagggaactgaacttccaacttcctgagcaacgacgggggatctagaggctgatagtgactgaggaaagttgttccaaggccgaaccgatgcaatagtcccatcggaatgctttcttctgatatatcgagatgagatacgaggtagtcgacaaatacgatgcgtgctagttcgccgaggtaccgaccagatgtcatgtactcaaatggttgaaagccggggacctcaccggcagcatcaagtttgctatcccattcgctgatcaatcccgaattgcggaggatttcagcggtgccattgatgctccattccgtgttgactgtgattttgatgtcgctaaccggggtgttagtcacagtttgaatttttctaggcagctttgagggcttgatcaggcttttcctaagaggaattgtcgcattggttccagtcccgcagataatacccatagctgctctgtgagaatcatcttcttgaaattggtatatgaatgagacaagggtggcaactgcgtcgttcaagattgcgttgattctgatagggggtaaatctggtgatctccacatctcgtaaccattgatgagatgaatatcaagatcgatgttcgatgtaattgcgaagcctttacccatagacatgatggaagctcgtcccaagtcgtcttgctcgataggaaaagaaaaggtgactcccatcaagagctcactatgccggtccaacccaaaagtctttgagcctttcctgacgatttcagcaatgcagcttccgatccaagagaaaagagaatcgggattctcgttcttcagctcttctgagataggccaggactgctctaggactcgacgaaggttggacgaagttcgatgacccgataacttctcattttcggaatgtccattctggatagggtcaccaccattgcctaagagctcaatgaaccccacacgcagatttgtgccaccgctgccatcagtcagttcaaaatatacacccttgcatgcatcatcaatcatacatgtctatggcaagatatctggaaggcaaaggttagctttctctattccgataatgaagacaacccaggatgataaaagtaacgtaccggcccttttctcctcctcctgggcgtaagatcgcctctgatatgggagttggcagaaattgctccgcagattcagcagctagcgtccgaaaagtctggtgaaaatcatgtgcaagagcgtgggctttatcaacgtcaacatggaaaggcttgagaaaagccaccagcgcgggcggcattggcggttgtatcatgttaaaagtgttttggacttgtattgcctcgatgccatgaagcgaacgtaagggttagaagagactgaggttgaaagggaagggcaacggaattcgatgcctgtgattggtcgagctctcgatcaacgtctgggtaagttcggcagttggttgattcaatgttctctgtttctcaaattgtctttacaaagcttatattatatggtcagtggtatgtgtcttgtacacttcaagattcgaatacgagttcgagtcagggtgttagagagttatcgactatacgtactcatgtgacggacggtcgtaacagcagcaaatctcacttgccgagtctagaaacgttgcagttgcagtggaatgcagacggaaatgcaggttcaaatggctgggccgggaaagttggaagcgaactgcataaaaatagaagcaacgagatggaatctccgtagaaggtctgtacctaatgaggcctcgtcatataatcggagcaaggcatgcgtcactatgcgggtgaggaaggtacagatatggaagggtgggttgcatacaacgttttcaacaattggcaggcttcggtacgtgagttgaacgaatccgtaacgtcccaagtttagatggccggatcttgtgttcatgtaaagtgggtaagagtgagatcttggataagaatctgcttggaatgaagctatcgtagccgtctcgtcgctatcaaaacttgctacattcgagtattcgtaaggtatccatcctgcccgttccattctaacctgtgacagccgagactatctgcgcagccccacacgacggcaagtgcccagcggtttcagatgtcgcgtgcgcagcgtgagtgaccactggaaggcagctggattggcgacatcgcgtcccatcttgttcggattattatactttggcagtgcccctcggcggagtgcacctgccactagtacaaggtaggaagtagctggttacatacatcatctagtattggaggcctaataaacccctgcaacagctcagctgctccaaggtaccacctgaactccacaccatccatcccccttgggtcctctggcctcgtctcgtcccgcatcggctcacgacaacaccgtcaccaacatcattactgtactactgtcttacgtcggctttacgttgcttgtcgatagctttcttgcattgtctacatatctgtcccacactcactgccctatcatccagcatcgctatcgtattgtacccgtcgtcttgggcctgcataactcatccacagctcatccacagctcatccgcagctcatccgcagctccgcgccatggctgctcgtatcacccttcccaccgtggaagacaggagacccgcacgaagtcggtctcgtcgtcgccacaggccattcttcgtcgtcctgctcgtcgccgccagcttttacgccctttactcgtctggcctgttgtccgcctattcgacttctttgccgacctccttcccctcggccgacaccgacttcgccgccggtcccgacgtatcagccccgaatgtccctggcagaagcgagtctgttgacctcgatgtcgtaacaaccaccgaggcccgccagctcgtgcctctcgaggctcacatcatgagcaaatgcccggatgccaaagactgtcttaaggagatgatcctgcccgccatgatccgtgtcgtcgacaaggtcaacttcacgctctccttcatcggcactcccaccgtgaacgacggcgtccaatgcaaacacggccccgccgagtgtatgggcaacatcatcgaactctgcgcccagcagctctattcggatcccaagatatggctgggcttcactatgtgtctgacccgtgactatcccaacatcccgcaacgcgagctcgtccaggactgcgctctcgagcacgcagtcgatttcgagaagctcaacgaatgcgcgacgagggacgatggggcctttggcatgagcatgttgcggcgcagtgtcgaaagaactgagagtcttggcgtcaagaaaagctgcacggttcgcttgaatgaccaaatgtattgtattcgagacggtggacagtggaccgactgtcccagcggaccaggcgtgaacgacctcgtcattgcgattgagaagctataccgcgcatcttgagtggttcgaatacatccagccataaatctgacgcctcccctactgtatagctcatcgatatcgtatccatccccgtctcttcatttcctgccattccctcgagctgctcaatgatgctgtccagaccgactgctttccccagcgactgtgtggcgttcgcctcgagctgcacgtgcacgacgtggatgtggaagtggtaatatgtaggctggtagtggcaaaacagcttcagctgatctgcctcgatttgcgggtacgtcttaattgtgccgtcggtcaacttcgctctcatgtgtttaagccagggaatgtgtttcttcttgaggtctcggagactccagatatctcggcgctcgacaataccgaggagatgtaaggcatcgatggtcttccggtcccagtgcaaattgggcagcagcaagaacccttcgtcgccatctcgtcccagaggtgttctgtatatcacgtcttcgacctctttctttccctcgatgatgttgtatacccaattcagacgaccctcctcccgattcattcgcatgaagggtcgcactttgtcgcggtaaatttcgggcgtctcggtcacgaagcgataaccctgcttgctatgctttttgatatgcttgtcagtgcaaggatatatcaggtcaatcttgaagtcagcgaattcgtcgctgttattttcgaggactggtccgccagagccgagaaaccaggagtagatatcattgttgccgagatttgttatgctacgcaaattggcgggcaatgctgaaagatattcgggagcgctaggaaatggagcgcgttggatcgtcaacagcgctggctgtgtgtccacgtgaccatacaagttgatgcgtcgtccagcttcatctgcgtaggaaattagtttttttgcatgactaagaacaggtgatacccaatgctcagagtgttgctgctagtatagaagtttgggaaataacatgtcataccttggttcagaacgcgctcgaatttgaacttggggatcagcgcctcggcgcttctcttcccctcctctgtgctcataatttcggcctcgtaattactcgttattaggtgcgtaaaattgagagtcctcgcgtctaggttacaagctgctttgcggtccgagatcatgtcacggtcaaaaaggtactcagaaatgagatagtagatagcccagcagtgttgtcagacgacccctccaacccc

SEQ ID NO: 1385 - DNA, 1077 bp, Muscodor strobelii
  misc_feature: SGI cDNA ID NO. 560063
  misc_feature: Encodes the peptide sequence at SEQ ID NO 1386
atgatctcggaccgcaaagcagcttgtaacctagacgcgaggactctcaattttacgcacctaataacgagtaattacgaggccgaaattatgagcacagaggaggggaagagaagcgccgaggcgctgatccccaagttcaaattcgagcgcgttctgaaccaagatgaagctggacgacgcatcaacttgtatggtcacgtggacacacagccagcgctgttgacgatccaacgcgctccatttcctagcgctcccgaatatctttcagcattgcccgccaatttgcgtagcataacaaatctcggcaacaatgatatctactcctggtttctcggctctggcggaccagtcctcgaaaataacagcgacgaattcgctgacttcaagattgacctgatatatccttgcactgacaagcatatcaaaaagcatagcaagcagggttatcgcttcgtgaccgagacgcccgaaatttaccgcgacaaagtgcgacccttcatgcgaatgaatcgggaggagggtcgtctgaattgggtatacaacatcatcgagggaaagaaagaggtcgaagacgtgatatacagaacacctctgggacgagatggcgacgaagggttcttgctgctgcccaatttgcactgggaccggaagaccatcgatgccttacatctcctcggtattgtcgagcgccgagatatctggagtctccgagacctcaagaagaaacacattccctggcttaaacacatgagagcgaagttgaccgacggcacaattaagacgtacccgcaaatcgaggcagatcagctgaagctgttttgccactaccagcctacatattaccacttccacatccacgtcgtgcacgtgcagctcgaggcgaacgccacacagtcgctggggaaagcagtcggtctggacagcatcattgagcagctcgagggaatggcaggaaatgaagagacggggatggatacgatatcgatgagctatacagtaggggaggcgtcagatttatggctggatgtattcgaaccactcaagatgcgcggtatagcttctcaatcgcaatga

SEQ ID NO: 1386 - protein, 358 aa, Muscodor strobelii
  misc_feature: SGI Peptide ID NO. 560063
  misc_feature (31)..(351): Pfam Id: PF05652 Pfam Desc: Scavenger mRNA decapping enzyme (DcpS)
  misc_feature (123)..(315): Pfam Id: PF05652 Pfam Desc: Scavenger mRNA decapping enzyme (DcpS)
  misc_feature (37)..(358): NCBI GI: 46136589 Blast Desc: FG09810.1 [Gibberella zeae PH-1]
  misc_feature (31)..(358): NCBI GI: 171683483 Blast Desc: protein product [Podospora anserina] gi|170941701|emb|CAP67355.1| protein product [Podospora anserina]
  misc_feature (35)..(355): NCBI GI: 116194488 Blast Desc: CHGG_03842 [Chaetomium globosum CBS 148.51] gi|88179755|gb|EAQ87223.1| CHGG_03842 [Chaetomium globosum CBS 148.51]
  misc_feature (38)..(349): NCBI GI: 39951559 Blast Desc: MGG_01422 [Magnaporthe grisea 70-15] gi|145020744|gb|EDK04873.1| MGG_01422 [Magnaporthe grisea 70-15]
  misc_feature (33)..(358): NCBI GI: 256727554 Blast Desc: [Nectria haematococca mpVI 77-13-4]
  misc_feature (37)..(308): NCBI GI: 85108746 Blast Desc: NCU06998 [Neurospora crassa OR74A] gi|28924248|gb|EAA33402.1| NCU06998 [Neurospora crassa OR74A]
  misc_feature (38)..(349): NCBI GI: 189205905 Blast Desc: scavenger mRNA decapping enzyme [Pyrenophora tritici-repentis Pt-1C-BFP] gi|187975380|gb|EDU42006.1| scavenger mRNA decapping enzyme [Pyrenophora tritici-repentis Pt-1C-BFP]
  misc_feature (29)..(349): NCBI GI: 159129094 Blast Desc: mRNA decapping hydrolase, [Aspergillus fumigatus A1163]
  misc_feature (40)..(349): NCBI GI: 169621672 Blast Desc: SNOG_14047 [Phaeosphaeria nodorum SN15] gi|111057552|gb|EAT78672.1| SNOG_14047 [Phaeosphaeria nodorum SN15]
  misc_feature (31)..(349): NCBI GI: 145234302 Blast Desc: An02g13910 [Aspergillus niger] gi|134057467|emb|CAK37975.1| protein product [Aspergillus niger]
MISDRKAACNLDARTLNFTHLITSNYEAEIMSTEEGKRSAEALIPKFKFERVLNQDEAGRRINLYGHVDTQPALLTIQRAPFPSAPEYLSALPANLRSITNLGNNDIYSWFLGSGGPVLENNSDEFADFKIDLIYPCTDKHIKKHSKQGYRFVTETPEIYRDKVRPFMRMNREEGRLNWVYNIIEGKKEVEDVIYRTPLGRDGDEGFLLLPNLHWDRKTIDALHLLGIVERRDIWSLRDLKKKHIPWLKHMRAKLTDGTIKTYPQIEADQLKLFCHYQPTYYHFHIHVVHVQLEANATQSLGKAVGLDSIIEQLEGMAGNEETGMDTISMSYTVGEASDLWLDVFEPLKMRGIASQSQ

SEQ ID NO: 1387 - DNA, 5639 bp, Muscodor strobelii
  misc_feature: SGI EST ID NO. CUFF.3814.2
  misc_feature: Variant of the nucleotide sequence at SEQ ID NO 1385
ggggttggaggggtcgtctgacaacactgctgggctatctactatctcatttctgagtacctttttgaccgtgacatgatctcggaccgcaaagcagcttgtaacctagacgcgaggactctcaattttacgcacctaataacgagtaattacgaggccgaaattatgagcacagaggaggggaagagaagcgccgaggcgctgatccccaagttcaaattcgagcgcgttctgaaccaagatgaagctggacgacgcatcaacttgtatggtcacgtggacacacagccagcgctgttgacgatccaacgcgctccatttcctagcgctcccgaatatctttcagcattgcccgccaatttgcgtagcataacaaatctcggcaacaatgatatctactcctggtttctcggctctggcggaccagtcctcgaaaataacagcgacgaattcgctgacttcaagattgacctgatatatccttgcactgacaagcatatcaaaaagcatagcaagcagggttatcgcttcgtgaccgagacgcccgaaatttaccgcgacaaagtgcgacccttcatgcgaatgaatcgggaggagggtcgtctgaattgggtatacaacatcatcgagggaaagaaagaggtcgaagacgtgatatacagaacacctctgggacgagatggcgacgaagggttcttgctgctgcccaatttgcactgggaccggaagaccatcgatgccttacatctcctcggtattgtcgagcgccgagatatctggagtctccgagacctcaagaagaaacacattccctggcttaaacacatgagagcgaagttgaccgacggcacaattaagacgtacccgcaaatcgaggcagatcagctgaagctgttttgccactaccagcctacatattaccacttccacatccacgtcgtgcacgtgcagctcgaggcgaacgccacacagtcgctggggaaagcagtcggtctggacagcatcattgagcagctcgagggaatggcaggaaatgaagagacggggatggatacgatatcgatgagctatacagtaggggaggcgtcagatttatggctggatgtattcgaaccactcaagatgcgcggtatagcttctcaatcgcaatgacgaggtcgttcacgcctggtccgctgggacagtcggtccactgtccaccgtctcgaatacaatacatttggtcattcaagcgaaccgtgcagcttttcttgacgccaagctagaaataactaattagtacacagatgcgatcgaggggaattgtagaagattatggagatgcgctcaggaacgtacactctcagttctttcgacactgcgccgcaacatgctcatgccaaaggccccatcgtccctcgtcgcgcattcgttgagcttctcgaaatcgactgcgtgctcgagagcgcagtcctggacgagctcgcgttgcgggatgttgggatagtcacgggtcagacacatagtgaagcccagccatatcttgggatccgaatagagctgctgggcgcagagttcgatgatgttgcccatacactcggcggggccgtgtttgcattggacgccgtcgttcacggtgggagtgccgatgaaggagagcgtgaagttgaccttgtcgacgacacggatcatggcgggcaggatcatctccttaagacagtctttggcatccgggcatttgctcatgatgtgagcctcgagaggcacgagctggcgggcctcggtggttgttacgacatcgaggtcaacagactcgcttctgccagggacattcggggctgatacgtcgggaccggcggcgaagtcggtgtcggccgaggggaaggaggtcggcaaagaagtcgaataggcggacaacaggccagacgagtaaagggcgtaaaagctggcggcgacgagcaggacgacgaagaatggcctgtggcgacgacgagaccgacttcgtgcgggtctcctgtcttccacggtgggaagggtgatacgagcagccatggcgcggagctgcggatgagctgcggatgagctgtggatgagctgtggatgagttatgcaggcccaagacgacgggtacaatacgatagcgatgctggatgatagggcagtgagtgtgggacagatatgtagacaatgcaagaaagctatcgacaagcaacgtaaagccgacgtaagacagtagtacagtaatgatgttggtgacggtgttgtcgtgagccgatgcgggacgagacgaggccagaggacccaagggggatggatggtgtggagttcaggtggtaccttggagcagctgagctgttgcaggggtttattaggcctccaatactagatgatgtatgtaaccagctacttcctaccttgtactagtggcaggtgcactccgccgaggggcactgccaaagtataataatccgaacaagatgggacgcgatgtcgccaatccagctgccttccagtggtcactcacgctgcgcacgcgacatctgaaaccgctgggcacttgccgtcgtgtggggctgcgcagatagtctcggctgtcacaggttagaatggaacgggcaggatggataccttacgaatactcgaatgtagcaagttttgatagcgacgagacggctacgatagcttcattccaagcagattcttatccaagatctcactcttacccactttacatgaacacaagatccggccatctaaacttgggacgttacggattcgttcaactcacgtaccgaagcctgccaattgttgaaaacgtttgacgcatgccttgctccgattatatgacgaggcctcattaggtacagaccttctacggagattccatctcgttgcttctatttttatgcagttcgcttccaactttcccggcccagccatttgaacctgcatttccgtctgcattccactgcaactgcaacgtttctagactcggcaagtgagatttgctgctgttacgaccgtccgtcacatgaacaatttgagaaacagagaacattgaatcaaccaactgccgaacttacccagacgttgatcgagagctcgaccaatcacaggcatcgaattccgttgcccttccctttcaacctcagtctcttctaacccttacgttcgcttcatggcatcgaggcaatacaagtccaaaacacttttaacatgatacaaccgccaatgccgcccgcgctggtggcttttctcaagcctttccatgttgacgttgataaagcccacgctcttgcacatgattttcaccagacttttcggacgctagctgctgaatctgcggagcaatttctgccaactcccatatcagaggcgatcttacgcccaggaggaggagaaaagggccgatatcttgccatagacatcggtggcacaaatctgcgtgtggggttcattgagctcttaggcaatggtggtgaccctatccagaatggacattccgaaaatgagaagttatcgggtcatcgaacttcgtccaaccttcgtcgagtcctagagcagtcctggcctatctcagaagagctgaagaacgagaatcccgattctcttttctcttggatcggaagctgcattgctgaaatcgtcaggaaaggctcaaagacttttgggttggaccggcatagtgagctcttgatgggagtcaccttttcttttcctatcgagcaagacgacttgggacgagcttccatcatgtctatgggtaaaggcttcgcaattacatcgaacatcgatcttgatattcatctcatcaatggttacgagatgtggagatcaccagatttaccccctatcagaatcaacgcaatcttgaacgacgcagttgccacccttgtctcattcatataccaatttcaagaagatgattctcacagagcagctatgggtattatctgcgggactggaaccaatgcgacaattcctcttaggaaaagcctgatcaagccctcaaagctgcctagaaaaattcaaactgtgactaacaccccggttagcgacatcaaaatcacagtcaacacggaatggagcatcaatggcaccgctgaaatcctccgcaattcgggattgatcagcgaatgggatagcaaacttgatgctgccggtgaggtccccggctttcaaccatttgagtacatgacatctggtcggtacctcggcgaactagcacgcatcgtatttgtcgactacctcgtatctcatctcgatatatcagaagaaagcattccgatgggactattgcatcggttcggccttggaacaactttcctcagtcactatcagcctctagatcccccgtcgttgctcaggaagttggaagttcagttccctccaaatacatcccaggcgccagttgagtggaccgagaaacatgctgcagcgctgtatcatatcgcaaagtccatacaagtacgggcttcggccatgatggcagctgcagtaatcggtctgttggcttgcgccgatgatattccgcttgcagaaccgttacaggataaaacaaacaggcaacagacaaatggaaggccgaaaccgatgaatctcatcgtcggatacacgggtggctgtatcgtacactttcagaattatttatctgactgccagtcctttttggacgagattatcactacggaattcggggctcatgcccctgtgagagtgacactgagtccatgtcacgacggtggtctaacaggagcaggtgtcctgtgtggtgccgtccgagcaagatcaagagacgtctgaggcttgatgcaagatacgacgcggtggactgtaaatggatacccggatgcgatacgattcatagagaaaacctgtagatgggctaggcaactaaacaagcgggatgaccagatacttacacttacaattcctctcgtgatatcaatgcgggcatctgtaagtcgctacttgtgtggctattcactgcggctgtggcgtagatagctgtgtgatacgggtatctagaacccgtagagcccgcgttcctggcattcaatatttggggttgtgagataccttcggctgaagtgtacttctgggtgtggggacatatccgcttccatacattagaaggtacttccatgtccaagcctcccagccttaccacatacattccctgtctagtggaatgcccattctaaattccaaccagccaacatcatgtcaggccgaacaaagaatcttgcacttctcctcgcgccgctttgctaggcattttatgagagcctcccagaaacagcgatgttccaaattccgagtcgcagagatacgagcatcataggctccctacgccttgattaatgataagctgaatgtattgtctggtcatatactcagctctagcaaacattccctcagtcagtggacctactggggtgtgacgcatttggatatttcacaatcttctgatagtcctacatatctcaccgattcaattgagatcttacttatttacgtgtctttcttcttcgtcttcttggctgcatcttgtttcataacgaagaaaggcgatacgatgagtcccaaccgcaaaggccaaggatccgcgtcgaatgatggcgctgacgaagatgagcgacgtccacttcttgaagaga

SEQ ID NO: 1388 - DNA, 1485 bp, Muscodor strobelii
  misc_feature: SGI cDNA ID NO. 560064
  misc_feature: Encodes the peptide sequence at SEQ ID NO 1389
atggcagacgatccagcatctcagtctcaatctactgaaatggaaggccttgcggcaatccaggatattagtgatgccctgggaaagagactgcgggaggaccatctcgatgtatacatacaagcccgagatgttcatctacgaacagagcgtcctgatgactctgatagagcgcgctccgtccgacgcaagcagctcaacctccttgagaaggaatatgacaacttccttaagattatcgagagagcactccctcagactttagaactattgttcaatgagctgagacgtgaattcaaagagtcaacgaccaagtctcgtttttctgcgccaccgacacccccgaccgtgtctgcagagcttcccagaatcacggcaccgatatcgaaacagacatcgcccgcagcaccaactgctccaatgacgcagacgaacttggaatttagactacgagatacaacaccaccgggtatcggtattataaatgatgtagaaacgagcgtcaccgacatcggaagcccaaatgcaactgcagcaccagatcaacgaaaaaagagacctctgaattcgggtgaaggctcttcgacttcgcacgcgaaaaagaaagcaaagaggacccctcaacataagggtcctgcgaaagaacagccgaataagaaagcgattcttctccgcaagtgctatttagacgaaagggaatgcatattcagatggggagacaacggcttttacgtcttacggtgtaactacagtaaatgtaaagagagggccggacgccctgccaacaaagaaatatgtttcacctctcatcctttccggaatggactcgcgatgaaacactttgaaggcgaagggcactcgataaaagacgagaacgaggtgttccagaagtatgctaggagagtgatggacgcaagccgggagtgtaacactgagtctcagccagcacaagacaaggccccagctggtttcgctggtccaagcaaaagccgtcaggagcgcaacgttccatcaccgcccgtaagcccgggaatgtcgcgtaacaaagggaagcagccggcgcacccgtcgccgtcgcgcgataaaggaaagcaacctgaacgcccgctcgaccattggtggggccggccaacagcattacaaatgataaaggaagcagcgtcagcgtcagcgtcaacctcaacaccgtccaagcagcaagcaaagaaggatgccgagatcgaggcatggaacgactcatcataccaacccaattctctattttcggtctctgttgcgacggaaccggacttaaacagtgacgatgagcctgatctgccaccactcactgccgataacttgttcgtaactcaggatgacgataatcagttcgacaacgataatctcgacgatgagtttcccagaatggactcgcgcggccgcacaattcccgattataaagagaagcctccttcagatgaagaattcaggcaatggcagcgttga

SEQ ID NO: 1389 - protein, 494 aa, Muscodor strobelii
  misc_feature: SGI Peptide ID NO. 560064
MADDPASQSQSTEMEGLAAIQDISDALGKRLREDHLDVYIQARDVHLRTERPDDSDRARSVRRKQLNLLEKEYDNFLKIIERALPQTLELLFNELRREFKESTTKSRFSAPPTPPTVSAELPRITAPISKQTSPAAPTAPMTQTNLEFRLRDTTPPGIGIINDVETSVTDIGSPNATAAPDQRKKRPLNSGEGSSTSHAKKKAKRTPQHKGPAKEQPNKKAILLRKCYLDERECIFRWGDNGFYVLRCNYSKCKERAGRPANKEICFTSHPFRNGLAMKHFEGEGHSIKDENEVFQKYARRVMDASRECNTESQPAQDKAPAGFAGPSKSRQERNVPSPPVSPGMSRNKGKQPAHPSPSRDKGKQPERPLDHWWGRPTALQMIKEAASASASTSTPSKQQAKKDAEIEAWNDSSYQPNSLFSVSVATEPDLNSDDEPDLPPLTADNLFVTQDDDNQFDNDNLDDEFPRMDSRGRTIPDYKEKPPSDEEFRQWQR

SEQ ID NO: 1390 - DNA, 2613 bp, Muscodor strobelii
  misc_feature: SGI EST ID NO. CUFF.3767.0
  misc_feature: Variant of the nucleotide sequence at SEQ ID NO 1388
cgtttatagggatgacgttctgcggttccatgtcattataacacgcatcctggcgcgctcttattggctatcccgagacaatttgcgagttgccgcctttagcacctgtttatatcactttacaccaatatgaatgagtcaagatctgcgatttcgcatccaactcaacttatcattggagcgcggaactttctacagcgttcctagcgggttcttgttgttttctggatgcatagtgttgcagtttatcagccgcatggctgcgaacgacacagcctgaccgtccgattaattgattttgcgcagcgacagagcatgatggagcgggtggcgcagcgtagaggatggccttgtagagaacgaccctagaataagttgagcagacatcgtagcaacaggtttcatccaccccacaacccttgctggagtctcgtagacgcgcaatgtgcatttcagctgagtagacgatcctggccttttcgctgcaccacggaggtggcttgcactagttgagggcgcccagtatgatttttcgatgaattgggcattttctggacggaggggttctcgaacgctatcattttgatcgattcattaattgttccacgacatttaacccatgctctctctgagtataaaagccacttacgagtgatcaaatattcgtgtgctacttttcttgttacattgcacatctaagatcccccacacctgtgccgtcaccgattgcttttgccgcgagcaaataacaagagatccatccacctattagacctattgacttacacaaacttctaagttgcattggtagtctctctcaccacacgaaataacgacgcggcttttactcgtcatggcagacgatccagcatctcagtctcaatctactgaaatggaaggccttgcggcaatccaggatattagtgatgccctgggaaagagactgcgggaggaccatctcgatgtatacatacaagcccgagatgttcatctacgaacagagcgtcctgatgactctgatagagcgcgctccgtccgacgcaagcagctcaacctccttgagaaggaatatgacaacttccttaagattatcgagagagcactccctcagactttagaactattgttcaatgagctgagacgtgaattcaaagagtcaacgaccaagtctcgtttttctgcgccaccgacacccccgaccgtgtctgcagagcttcccagaatcacggcaccgatatcgaaacagacatcgcccgcagcaccaactgctccaatgacgcagacgaacttggaatttagactacgagatacaacaccaccgggtatcggtattataaatgatgtagaaacgagcgtcaccgacatcggaagcccaaatgcaactgcagcaccagatcaacgaaaaaagagacctctgaattcgggtgaaggctcttcgacttcgcacgcgaaaaagaaagcaaagaggacccctcaacataagggtcctgcgaaagaacagccgaataagaaagcgattcttctccgcaagtgctatttagacgaaagggaatgcatattcagatggggagacaacggcttttacgtcttacggtgtaactacagtaaatgtaaagagagggccggacgccctgccaacaaagaaatatgtttcacctctcatcctttccggaatggactcgcgatgaaacactttgaaggcgaagggcactcgataaaagacgagaacgaggtgttccagaagtatgctaggagagtgatggacgcaagccgggagtgtaacactgagtctcagccagcacaagacaaggccccagctggtttcgctggtccaagcaaaagccgtcaggagcgcaacgttccatcaccgcccgtaagcccgggaatgtcgcgtaacaaagggaagcagccggcgcacccgtcgccgtcgcgcgataaaggaaagcaacctgaacgcccgctcgaccattggtggggccggccaacagcattacaaatgataaaggaagcagcgtcagcgtcagcgtcaacctcaacaccgtccaagcagcaagcaaagaaggatgccgagatcgaggcatggaacgactcatcataccaacccaattctctattttcggtctctgttgcgacggaaccggacttaaacagtgacgatgagcctgatctgccaccactcactgccgataacttgttcgtaactcaggatgacgataatcagttcgacaacgataatctcgacgatgagtttcccagaatggactcgcgcggccgcacaattcccgattataaagagaagcctccttcagatgaagaattcaggcaatggcagcgttgaaacccgactgcactcaacacttacgaaacaaagtacgacgctaacgattggtgcggatttggagtttatggcattgtcttttttcagcgtttgtgtttggcattggcaagataggaaaattatacgtaattgcgtcttcatatatgtacctagatacccatacggattgcttagattatattgcgtggcgttatttgtaaacgctcaggtggagtggtattggtgatgctgctatctctatagttaacatgcacttattatgtcgactccgaacc

SEQ ID NO: 1391 - DNA, 1101 bp, Muscodor strobelii
  misc_feature: SGI cDNA ID NO. 560065
  misc_feature: Encodes the peptide sequence at SEQ ID NO 1392
atggctgcccttgttctccttgagtcactgttctgggaactctccgagaatgctctaagcaagaattacatcagccaataccaaccgttccctctccctaagcttgaacaacgacgatatgactcgagaaacgtgagcattattgctcccacgattggatgggcagagaatttcccaactgccattctttcgtggcttgcgatagctcctcgtgaactcatcattgtaacttctgagcgtgaagaagcagctgctcgtgccatcgtcagctctgggccggtccgagatgctgccactgtagcagatactcaaattcagatcttgacgatcgtcgaacccaataagcgggatcagcttattattggaatcaatgccagttccggtcagatcctggcgcttgtggacgacgatacgtactggcctactaacgatgttttcatttcacatgttcttgccccttttcaggaggacgacgttgccctggtagtctcgggcgcaacaatgtttcttcgggctgaggttcttaaggatcccgagtttcaaaaagaatttacagaagagacattcaggggcgtccggctgcacaccggtgacgacagcttcatcactagatgggttctgttccaacatgtcatgagagcgccacgagaagacggtcaaccgcatcggcgaatgcgactcttcatgcaacttctccctgaaaccacggtgatgacaggcctcgcaacggactacaggtatattcggcaaatgaagcgttggctgcgcacaggactgcgcttcagattgacctgcttatttgtgagccctggtctacgtttattccgaagagaagctccgtacatgtgtcggaaaatgtacgagggcctaatgaatccagtgctaaccttgctctggtacgctgcttggtttaggactgtacagacctggccatcattcgcagttttggtagcaatctggtatttgtatggcatggtcacgggaattcagggtttccttcactggtactgctggctaacgctcggcgtcgagacctggagtagtaggctgagtgttcattgggtactctatactatatttcttgccgctctattcttataa

SEQ ID NO: 1392 - protein, 366 aa, Muscodor strobelii
  misc_feature: SGI Peptide ID NO. 560065
  misc_feature (11)..(341): NCBI GI: 46102620 Blast Desc: FG00014.1 [Gibberella zeae PH-1]
  misc_feature (6)..(339): NCBI GI: 261356941 Blast Desc: polysaccharide synthase [Verticillium albo-atrum VaMs.102]
  misc_feature (3)..(324): NCBI GI: 189200593 Blast Desc: polysaccharide synthase [Pyrenophora tritici-repentis Pt-1C-BFP] gi|187983732|gb|EDU49220.1| polysaccharide synthase [Pyrenophora tritici-repentis Pt-1C-BFP]
  misc_feature (27)..(298): NCBI GI: 170093441 Blast Desc: glycosyltransferase family 2 protein [Laccaria bicolor S238N-H82] gi|164647801|gb|EDR12045.1| glycosyltransferase family 2 protein [Laccaria bicolor S238N-H82]
  misc_feature (25)..(298): NCBI GI: 58271398 Blast Desc: polysaccharide synthase [Cryptococcus neoformans var. neoformans JEC21] gi|134114932|ref|XP_773764.1| CNBH2170 [Cryptococcus neoformans var. neoformans B-3501A] polysaccharide
  misc_feature (27)..(298): NCBI GI: 242218200 Blast Desc: [Postia placenta Mad-698-R] gi|220725956|gb|EED79922.1| [Postia placenta Mad-698-R]
  misc_feature (27)..(298): NCBI GI: 242207602 Blast Desc: [Postia placenta Mad-698-R] gi|220731271|gb|EED85117.1| [Postia placenta Mad-698-R]
  misc_feature (18)..(298): NCBI GI: 169848421 Blast Desc: CC1G_02369 [Coprinopsis cinerea okayama7#130] gi|116508087|gb|EAU90982.1| CC1G_02369 [Coprinopsis cinerea okayama7#130]
  misc_feature (44)..(349): NCBI GI: 119196727 Blast Desc: CIMG_02738 [Coccidioides immitis RS]
  misc_feature (22)..(349): NCBI GI: 67904164 Blast Desc: AN9069.2 [Aspergillus nidulans FGSC A4] gi|40742712|gb|EAA61902.1| AN9069.2 [Aspergillus nidulans FGSC A4] gi|259485520|tpe|CBF82611.1| TPA: polysaccharide synthase A4]
MAALVLLESLFWELSENALSKNYISQYQPFPLPKLEQRRYDSRNVSIIAPTIGWAENFPTAILSWLAIAPRELIIVTSEREEAAARAIVSSGPVRDAATVADTQIQILTIVEPNKRDQLIIGINASSGQILALVDDDTYWPTNDVFISHVLAPFQEDDVALVVSGATMFLRAEVLKDPEFQKEFTEETFRGVRLHTGDDSFITRWVLFQHVMRAPREDGQPHRRMRLFMQLLPETTVMTGLATDYRYIRQMKRWLRTGLRFRLTCLFVSPGLRLFRREAPYMCRKMYEGLMNPVLTLLWYAAWFRTVQTWPSFAVLVAIWYLYGMVTGIQGFLHWYCWLTLGVETWSSRLSVHWVLYTIFLAALFL

SEQ ID NO: 1393 - DNA, 383 bp, Muscodor strobelii
  misc_feature: SGI EST ID NO. CUFF.3773.0
  misc_feature: Variant of the nucleotide sequence at SEQ ID NO 1391
tttggtagcaatctggtatttgtatggcatggtcacgggaattcagggtttccttcactggtactgctggctaacgctcggcgtcgagacctggagtagtaggctgagtgttcattgggtactctatactatatttcttgccgctctattcttataatagagtgatgaggcttgtcgcgaaataaatagtattgcaagattgtatgatactttgacaacgcgctttacatgctttcggctatgactaaactcgattgtattcagcccgagtcgccgttcaattaaaataaggccccgatggttgttctacagacagaagttttgcggtaccgtttaattcccaactcgcctcgagtaataggatattagctggtcaggtgtag

SEQ ID NO: 1394 - DNA, 2088 bp, Muscodor strobelii
  misc_feature: SGI cDNA ID NO. 560066
  misc_feature: Elevated expression when VOC is produced
  misc_feature: Encodes the peptide sequence at SEQ ID NO 1395
atgagaggggttacggaaataatcgcaattttattaggcaccggactcgtgagatcactgccgcttcaaaatcaaactcacaatttggtgcagcctgtattccggcctttggatttgggatccgtcaaaccattaggatggcttgaggatcaactcaaactcgaagctgccggcctttcggggaatctctttcatttctaccgatttgttcacgactcaaagtacatcggcggcgagacagagtactcatcacttgatgaagcgtctccatattggttcaatggcttagttccgctagcttttagcctaggtgatgaccaaataatctcgcaagtcaagtactatctggactatgtattgaatcatcagcaagaggatggatggttaggtcccgaaacaacacctcagtctcgcggtctctgggcacgctgtctattgctcttgggcttgatacagtatgcagaagccgatccaactcagacagaacgtattgtggatgcgatgcatcgatatgttgttcttgtacacagcatgcttaaagataatttccaaggtctgattttccatgatggcgatacgtttgataccaagggctggggcgtggcccgttcacatgaatatcatatttcccttcaatggcttttggagcgccatccacgggataattcagctataatatgggagacgatggatctgatgattgaaggcagcgtaatatggggtgcggattggcgacaattctggacagaagatgcctatcccaaggtctactatgacaacaccggttacaacctgagctgggttttccttcatggcgtaaacatggctgaagggctccgctacccgctagctatctatcggactacaggagatccagcattgaaaaagcaaacaagacaagcagtcgacctcctggcttaccataaatctcttgccggtaccatcattgctgacgagtacattacggatctcaaccctagtagaggtgcggagctttgtatctctgcagaagtaatgttttcatcagcatatatataccaatatcttggtgacaacgatatcgcggactgggttgagcagactgcgttcaacgctttccctgtgtcagtagctgcgaattggtggtcgcatcagtatattcagcaagagaaccagccatgggcaaggaacctcagtacatcagaactatggtatgatgtgagtagctacggcaatgtgttcggtctcgaaccaaactatccatgctgcacggtcaatcaccctcaggcttatcctaagttccttgcaaattcctttgcaactacggaagatggcggtctagctcatgtcctcctctcaccagccagcgcagcagtaagacttggccatgaccagaaaaacgtcgtcttggtctcagccaatacgacgtatcctttcggccatactatacagtatacattttcggcaacgaggcctttcacgttttatgcacgaattccaacatgggcccatgctgacagcaccattgatggaaataagaaagtgtcgccaaatgagagaggtctacaaaagattcaagtccccgcaggagagagcacagcatcaatcaagctcaccacggctccacgtgtggtgtcccgcgccaacgaaacggtagctgtctactacggtgcccttctttatgcgcttgctattgactacgactccacgacatcagcccctgtggactacgacacagaaatagttttggcgccaaacacaacggatccctatggtcgcacaaaagacttcgcactcacaccgaagaagaatgtcaaatggaatattgcaattgatcctgagcaaatcagagtcgtccgtacgcaaaactcgcacaagcctttacagaatccgatttgggaccttggtgcaccaccagtcgaacttcaagttgcggctactgagattgattggcccgttgtcagggacacgcctgcggatccgggaacgtttgaggtcaaagcgaaggggaaaccgttcgtagcaagatttgttccctacggaagtgcaaaattgcacatggcattgcttccaaaaatggatttggacaagattgatttgacagcttga

SEQ ID NO: 1395 - protein, 695 aa, Muscodor strobelii
  misc_feature: SGI Peptide ID NO. 560066
  misc_feature (41)..(555): Pfam Id: PF07944 Pfam Desc: glycosyl hydrolase of function (DUF1680)
  misc_feature (29)..(684): NCBI GI: 145244829 Blast Desc: An11g07080 [Aspergillus niger] gi|134079375|emb|CAK97004.1| protein product [Aspergillus niger]
  misc_feature (25)..(695): NCBI GI: 242791337 Blast Desc: conserved [Talaromyces stipitatus ATCC 10500] gi|218718325|gb|EED17745.1| conserved [Talaromyces stipitatus ATCC 10500]
  misc_feature (25)..(695): NCBI GI: 212534848 Blast Desc: conserved [Penicillium marneffei ATCC 18224] gi|210069979|gb|EEA24069.1| conserved [Penicillium marneffei ATCC 18224]
  misc_feature (26)..(686): NCBI GI: 240106974 Blast Desc: CPC735_017630 [Coccidioides posadasii C735 delta SOWgp]
  misc_feature (26)..(686): NCBI GI: 119174877 Blast Desc: CIMG_09386 [Coccidioides immitis RS]
  misc_feature (23)..(688): NCBI GI: 239612929 Blast Desc: conserved [Ajellomyces dermatitidis ER-3]
  misc_feature (22)..(688): NCBI GI: 225561628 Blast Desc: conserved [Ajellomyces capsulatus G186AR]
  misc_feature (23)..(688): NCBI GI: 261189791 Blast Desc: conserved [Ajellomyces dermatitidis SLH14081] gi|239591542|gb|EEQ74123.1| conserved [Ajellomyces dermatitidis SLH14081]
  misc_feature (23)..(688): NCBI GI: 226294202 Blast Desc: conserved [Paracoccidioides brasiliensis Pb18]
  misc_feature (23)..(688): NCBI GI: 225684544 Blast Desc: conserved [Paracoccidioides brasiliensis Pb03]
  misc_feature: Useful for introducing or modulating the production of volatile compounds
MRGVTEIIAILLGTGLVRSLPLQNQTHNLVQPVFRPLDLGSVKPLGWLEDQLKLEAAGLSGNLFHFYRFVHDSKYIGGETEYSSLDEASPYWFNGLVPLAFSLGDDQIISQVKYYLDYVLNHQQEDGWLGPETTPQSRGLWARCLLLLGLIQYAEADPTQTERIVDAMHRYVVLVHSMLKDNFQGLIFHDGDTFDTKGWGVARSHEYHISLQWLLERHPRDNSAIIWETMDLMIEGSVIWGADWRQFWTEDAYPKVYYDNTGYNLSWVFLHGVNMAEGLRYPLAIYRTTGDPALKKQTRQAVDLLAYHKSLAGTIIADEYITDLNPSRGAELCISAEVMFSSAYIYQYLGDNDIADWVEQTAFNAFPVSVAANWWSHQYIQQENQPWARNLSTSELWYDVSSYGNVFGLEPNYPCCTVNHPQAYPKFLANSFATTEDGGLAHVLLSPASAAVRLGHDQKNVVLVSANTTYPFGHTIQYTFSATRPFTFYARIPTWAHADSTIDGNKKVSPNERGLQKIQVPAGESTASIKLTTAPRVVSRANETVAVYYGALLYALAIDYDSTTSAPVDYDTEIVLAPNTTDPYGRTKDFALTPKKNVKWNIAIDPEQIRVVRTQNSHKPLQNPIWDLGAPPVELQVAATEIDWPVVRDTPADPGTFEVKAKGKPFVARFVPYGSAKLHMALLPKMDLDKIDLTA

SEQ ID NO: 1396 - DNA, 10189 bp, Muscodor strobelii
  misc_feature: SGI EST ID NO. CUFF.3924.1
  misc_feature: Variant of the nucleotide sequence at SEQ ID NO 1394
atctgcgtacgtagatacaccatcgacaataaggggtttcaacagtacgtaacccatgatacaatttcgaaatacagcgctctaatagaacactgcgtaatgagtaaacctcagtagcaatgctgctaaagatgcggatgttgaaactatctgatgtgaggaagtgagctttggacaaaatttagtggggtgcataaccattgccattccatcgacatgcattcctttagggctatgcagtgagaagcttattcgtccaaatatcagtcttcgtgcctcgtcgaccttgcagatcacactacactattgtttcacaatggaggcaatagagcaattacgagagcaaaaatccaaggttgaattagagcttcaacgtttgaaggcacaattagcccaacttgaatcatcacgagagacatcaacagccgcccctccagaccatccgcaaacaaccacaaatccggattggaaatggccactcaaagaagaagagtacaatagatatggtcgacagctaattctcccttcagtcggcattaaagggcagctgcgcctcaaatctgccgccgttctcatagtcggagccggtggtctaggctgccccgccgccgcatatctcgccggggccggtgttgggactctaggcgtcgtagacggcgacacggtcgaagtttcaaatctacaccgacagatcgcgcatagcaccgcacgtgttggtatgaagaaggttgatagtcttggcgaatactgtcgaggtctgaacccggaggtcacttatgtttcccatgccgaacatctcaccccgcagaatgccgagcaggttgtaagtggttatgacgtggttctcgactgcaccgaccacccaacctcacgctatctcatctcggatatctgcgtcttgttggggaagccgctagtttctgcttctgctttacgcacggatggccaactcatcgtgttaaataatccacctgctccccgaggctcggccgaaggaggaccatgctaccgatgtatatatcctcggccgcctccagctgacagtgtagtgagctgcggtgaaggcggtatcctcggtccagtcgtaggcgtgatgggagtactgcaagcgctcgaagctatcaagctgattagtgccggtcttggcgataagaacaacttagctcgcaaagagcccttgacacccagtcttctcctattttcagctaaccccacaacaacttttcgatccatcagaatgcgaggccgcaggtcagactgttttgcctgctctgctcaatcaacacttacactgaaagaactgagttctggatccttggattatatccaattctgcggcgtcaacacgccagtcaatattctggaagcggcagagcggataagcccaacggagtataattcacttgcagctgatgaacgcggattgttactcgatgttcgggagaaagagctctttgatatcggtagtgtaccaggagctttcaacattccgttctctacattccaagccaagagtcgagcaaaaatggaaaaccaagccccccaaattgactggttacctagcgaagcagattcatctaagccaatccacgtaatatgccgagtgggcaacgattcgcaactagtcacacaaaagctcaaacagctaggacttgacaagggcggtacgagacatatccgggatatcaaagggggcatgaaggcctggaagctcgaagttgaccagacgatgccgtttctgtagcaagacaatagatagtcaattccacatagaccagcatacctgcgctaatgagtgggttgttcgtataaaatggctctttagtgatccctatctgtacaattgcaacttttttcgtgggagaggctccgaacaccgtcccaagataaaaacgacgcgtatcaacatatcaaacgctgctgccacagcttggaatagaccacttcatctcgttgcagccctcgataccttttcattgcccacctcgatatggaagctcttacacgaagttcgttcgcttcttgttgaatgccctctgatccttcagccattgcctataaccagctacactggagatcttctcgccgtagaaatccgggactatgcaaatattgaagtcagcctcacgcagccgtttagaaaggaatagcccatgaataaaagctcacctgcgttcccgctaagggaactgttgctggggtcaacacggttcttcttgatacggttgaagaactcggactctttgacggccatgggctgcttgacgccacgcttcgtggcgtagaagaaaacagagcctagactggggccagccagccagcccagcccggcgaaactgagcgtgatgatgccaagggcgaagaaggggtccatgggcactttgctcaacagccagtccatgttcatgttgacgagcagcagggcaccagccgttccgcccgcggtcatggtcagcatgctgctagccaattggaatctccgcctagtcttgcgcagctggaagaagtcgttccagttgagtatagtggtaggagttgcagaggtcgaggttgatgatgagtgaggggcggaggcggtggattggctgcggcgggcagcgaacttgcattgcagagaaagaggctttctgacggcggcatggttggacggcagacggactgtggtggggtggtgaagaagcgatacgagggtcgagtatgggcatgctggtcgtcgcgagaaggcagtctgcagctggagctgtcgactgcccagcacggcgaggcgcgcagcgttggtggtcggcgccagcattgtgtcacgcgatccgggtcctatacgtgggtttgaagtatgcgcagtcgtagtcggtagtcaagttttgtcgatgtctgcgatggaggtggagagctcgctggcgtcgctgaggctgtcgaaagcttgacgtcgttggccgggtgcagcttggcgtcgataggaaaagccaagatgcaggtgagagctttgggcacctgcgctaaggcatagctagcgctccttccccgtagcaagctacccgggaagctgtcccttgagcttcaagggcctcccatcttaagtatgtcgatccatgcgaagtctttcttaccacttttcaaacgtaaaggaataatacttataatgactctgccaaaagcaatactattgtcgcatagaagatcattaaacatgcaggatacttgagggtattagatcagggccgatcctgacgccctgccccatcaccgtcgactatctatctgaagccacctttgtcttcgccagtcgctgacagatggatcacagtctggtcgacagagctgatcggaggcctgccattgcgacgatgcaattcactaatttcggtgcttatctaaatacgtgcaaaacgcgtgcattcagaactcctctcacatacagtttccttttaatacagtaagggcagtaggtggtaatacagttgattcggcgatgcgccaggtaaaaaaaacaaaacagctcacacactatctgatggcggcggtccatcaaattagctatcctctgacggaaaacgcgtacagtcgagatagcctcatgttgatggacggaaatgtgtgatgctacatgtgttaattgccctagctggataaggggctgcatcgcagaaagcgataagataagacgcagtagataagcggtggtgttgcttatatggtcactgcgaataggccgaagcccattgcgacgatgcaattacacattaacagatcaagcatctcgacctacagttttggtctccgcctgcgattgagccggtggtaacgtgacatgcatctcggcaacgaaatacgaacaagatcgcccggcttctgactgcatatgttctcgtcctgacctacgcccacagcagggtattccgctcatataggtccatctcaaagtcgaagcaacatgtcttattaaccgacattaggtcgaatgataataccttttacataatcaatcatacacttgctgttgctttcatctcgactgctccttgatgggctgacaaaacgtgcagaagcagcatggctatgttatattaattgacctgcctccagtccccatgcagccaaggcttcgggatatgtcccggcagcactatgaagtagcgtccccattggtgatatgactgaattaacctgccaatctgcaaagtgctctgcagccaagcgcctttcgccactagagttgcatgcacttatacatatatatcgacgccagctctctgatgaactacagctatacttacagtaaacaacgagtaacaaaccttggggctccctgtttgcaaccgtgtcgtcgtcactatgcgaaaacttgtcttattttcgacgattagcattggtatcgagacggttctgggcgcttcttcgttgttgtcagagcctggtcagtcggctgtcataccatcatgggatatacaaactactgccaaggttggaacctggctggaagtcttgtctcagaccggtctcaatacatccgaatggcaccatatcaatgcctcgcgatgcaccttgatgggttgtctcatccatgcaggtgtgtatcgcgaagacgacctattttttttccgagaatctcaagagcttcgacgctagacaatttcacgatccctggatatatcgacaaacatttgttctcgatctcgaccctaagcattattactatcattacttcttgcaaacaaacggcatcagctcgaaaggcgatatctatatcaacggaaagcaagtagctaatcggacgtctcaagccggggcctatggaggtcacgtctacgatatatctaccattgtagagaaggagaacgcattggcggtgcaggtctatccaacagactataattacgactttgcgattggtttcgttgattggaatccatatccaccagacaatgggactggcgtttggcgagatattgtagtgaaacaaaccggtccggtagctttgagtccgttgagggtggttaccaagattgatctaccaactgatgactcctccgccgatattacgatgaaatccactgttcgaaacttggaaacgcatgccgttacggtcagtgtgacaggtaaagtcgggctggaagctggaaatcaaagccacgaatggagccaggaggtgcatcttggcccgttgcaatcgcaggagttggtcttgacgacaactctcaaggagccgaaggtctggtggccgaagcaatggggccagcaacccttatattctgggcaattatcggtatctgttgacgatgcagtatccgataatgtttaccaaactttcggcgttcgcaatttctcatcggtgctaaacactcacaatgatacgatgttttatgtgaatggtagaccttttcaaattcttggcgccggctactccagtgacatgttcttgcgctgggattgcgaaaagttcactcaacaagccaaactcgttttagattccggaggcaacgctataagacttgagggcaaaatggagcagtcagaattgttcgacattgccgatcgcatgggccttctcatcttagccggctgggagtgttgcgacaaatgggaagcatggagttacaatgaagatcttgccgtcaagtcagaatggacagaaagtgactatgatatcgcaaacgccagcatacatcatgaggctctcatgatccaagggcaccccagcttgattgcctttcttgttggaagcgattattggccggatgatcgagcagcacaaatatatacctctgccctcagatcggcagactggcaggttcctattgtcgcctctgcctcaaagagaagttatccagagattttgggaccttcgggtatgaaaatggacgggccctacgactgggtgccgccaaactattggtacgatgtcgagccatctgaagacaggctgggagcggccttcggattcgggtcggaacttggagctggtgtgggaacgccagaactggggagcttgaaaaagttcttgtctgagaaagaccttgacgacttgtggaagaaaccagacatgggactctatcacatgtccaccaatgtttcatcgttctacgaccgcaagatatacaacgatggtctatggaagcgactaggagcaccaaagtctctcgacgactaccttctgaaggcgcagattatggactatgaagcgactcgatctcaatacgaatctgtcgctgctttctggaataaagacagaccggctactgggcttatttattggatgctcacaaatgcttggccaagtttgcactggaatcttttcgattaccacctaaatgccgccggctcttactttggagccaagatgggatcaagaattgagcatgtggcctacgactatatcaagaagacattatacctcatcaaccgctccatagacaaagagggacaacgacgtatcgtagtagagttgatcgacaagaacgggaaatccctatataacaccacaaggacagttgaaacccagccaaacacgagcaaaaacattattgacttagcatcacaattcaaacacatcaaggatctagctttccttcgcctcatcctaaccgatgcagacggtgtgagtctcagccgcaatgtgtattggctagccagtaccatcgatactctagactgggacgattccgattggttctttacccccgttaccaagtatgcaaattatacatcattgagctcgctacaagacgcaaatgtctcggcttcaatcaccaagacatgtcacaaaacctcgtccaatacctatcatatcacacttgagaacctctcctcagtcccagcctttttcgtcaggcttagcttgatggacaaagcgggtgaagacattgcacccgtattctggtcagacaactatgtcacgctatggccacatgaaaacctagagctgcaagtcgaaggcgagaatgctgcagctatccagataagcggcagtaatgttgccaaggcgcaaatcacactcaataaggcaaaccgagccaagtgaaaagcaacagagagtgaacaagttgggtccgcgtgatgcgatcttggagaagcgcgctcaatgctcatgcaaacccctcagaggagaatcttgcagtagcacaccgctgcaccgctgccgccggcaacaaaacaatcatactgcaccaaattcgcgattgcgacctagttcctactgttaggtatatctcatgtccaagcgcattttgactataagccgacgagtcaaatgatgttgtacgttaattatccccgacgtatcaacgagtgttttcgatgaccggtcgtttacaagttgcgctagaaacttactaatggaataccatctactcagtctgcagcttaccagcatagagaacactatcttaatgatgcacaacaacttgactgttcttcgctgtaacccggttgttaaagaacaccccgcacctagtgatcaacgaaacctgatgccttgattcgtacgtgcccttcttattggttcgtgttcctattgcatgcacctcgccccatgtaatccgtggagaggaatgcatgtaagccgcataggtcgcgttgatcggcagaggagtataagatcaataatctgtttataagttagataagtgaagaagatgtatgtagactatctctatgtgactgaactttaaataattctgtacctctcgggccgagctatattggggtcttcaaagtagggttttcttctatttcaaatttttggtgcgaattagtcaagcagctgggactcaatcgacaaaaattttcaagataactttctgttgattcgagatgagaggggttacggaaataatcgcaattttattaggcaccggactcgtgagatcactgccgcttcaaaatcaaactcacaatttggtgcagcctgtattccggcctttggatttgggatccgtcaaaccattaggatggcttgaggatcaactcaaactcgaagctgccggcctttcggggaatctctttcatttctaccgatttgttcacgactcaaagtacatcggcggcgagacagagtactcatcacttgatgaagcgtctccatattggttcaatggcttagttccgctagcttttagcctaggtgatgaccaaataatctcgcaagtcaagtactatctggactatgtattgaatcatcagcaagaggatggatggttaggtcccgaaacaacacctcagtctcgcggtctctgggcacgctgtctattgctcttgggcttgatacagtatgcagaagccgatccaactcagacagaacgtattgtggatgcgatgcatcgatatgttgttcttgtacacagcatgcttaaagataatttccaaggtctgattttccatgatggcgatacgtttgataccaagggctggggcgtggcccgttcacatgaatatcatatttcccttcaatggcttttggagcgccatccacgggataattcagctataatatgggagacgatggatctgatgattgaaggcagcgtaatatggggtgcggattggcgacaattctggacagaagatgcctatcccaaggtctactatgacaacaccggttacaacctgagctgggttttccttcatggcgtaaacatggctgaagggctccgctacccgctagctatctatcggactacaggagatccagcattgaaaaagcaaacaagacaagcagtcgacctcctggcttaccataaatctcttgccggtaccatcattgctgacgagtacattacggatctcaaccctagtagaggtgcggagctttgtatctctgcagaagtaatgttttcatcagcatatatataccaatatcttggtgacaacgatatcgcggactgggttgagcagactgcgttcaacgctttccctgtgtcagtagctgcgaattggtggtcgcatcagtatattcagcaagagaaccagccatgggcaaggaacctcagtacatcagaactatggtatgatgtgagtagctacggcaatgtgttcggtctcgaaccaaactatccatgctgcacggtcaatcaccctcaggcttatcctaagttccttgcaaattcctttgcaactacggaagatggcggtctagctcatgtcctcctctcaccagccagcgcagcagtaagacttggccatgaccagaaaaacgtcgtcttggtctcagccaatacgacgtatcctttcggccatactatacagtatacattttcggcaacgaggcctttcacgttttatgcacgaattccaacatgggcccatgctgacagcaccattgatggaaataagaaagtgtcgccaaatgagagaggtctacaaaagattcaagtccccgcaggagagagcacagcatcaatcaagctcaccacggctccacgtgtggtgtcccgcgccaacgaaacggtagctgtctactacggtgcccttctttatgcgcttgctattgactacgactccacgacatcagcccctgtggactacgacacagaaatagttttggcgccaaacacaacggatccctatggtcgcacaaaagacttcgcactcacaccgaagaagaatgtcaaatggaatattgcaattgatcctgagcaaatcagagtcgtccgtacgcaaaactcgcacaagcctttacagaatccgatttgggaccttggtgcaccaccagtcgaacttcaagttgcggctactgagattgattggcccgttgtcagggacacgcctgcggatccgggaacgtttgaggtcaaagcgaaggggaaaccgttcgtagcaagatttgttccctacggaagtgcaaaattgcacatggcattgcttccaaaaatggatttggacaagattgatttgacagcttgagcactttgaacttatggggtggtgggcatgttctgtgatacccctttcgatagtgtcatgacacgtcctttgttttgcaacctgatattggatgggggttcacagtgagtccgaagcatggcagatacggggaacttgtcacaatcgataccaaagtcactcaagaatcttcttcaaagcctttgttgttgctacccacgccctaaggcaagctatgatacgctcgagagtaatgataatcgataatgtatgcatatcgccggaacccatgttcaaacccatgaatagaaac

SEQ ID NO: 1397 - DNA, 963 bp, Muscodor strobelii
  misc_feature: SGI cDNA ID NO. 560067
  misc_feature: Encodes the peptide sequence at SEQ ID NO 1398
atgtccaccaatgtttcatcgttctacgaccgcaagatatacaacgatggtctatggaagcgactaggagcaccaaagtctctcgacgactaccttctgaaggcgcagattatggactatgaagcgactcgatctcaatacgaatctgtcgctgctttctggaataaagacagaccggctactgggcttatttattggatgctcacaaatgcttggccaagtttgcactggaatcttttcgattaccacctaaatgccgccggctcttactttggagccaagatgggatcaagaattgagcatgtggcctacgactatatcaagaagacattatacctcatcaaccgctccatagacaaagagggacaacgacgtatcgtagtagagttgatcgacaagaacgggaaatccctatataacaccacaaggacagttgaaacccagccaaacacgagcaaaaacattattgacttagcatcacaattcaaacacatcaaggatctagctttccttcgcctcatcctaaccgatgcagacggtgtgagtctcagccgcaatgtgtattggctagccagtaccatcgatactctagactgggacgattccgattggttctttacccccgttaccaagtatgcaaattatacatcattgagctcgctacaagacgcaaatgtctcggcttcaatcaccaagacatgtcacaaaacctcgtccaatacctatcatatcacacttgagaacctctcctcagtcccagcctttttcgtcaggcttagcttgatggacaaagcgggtgaagacattgcacccgtattctggtcagacaactatgtcacgctatggccacatgaaaacctagagctgcaagtcgaaggcgagaatgctgcagctatccagataagcggcagtaatgttgccaaggcgcaaatcacactcaataaggcaaaccgagccaagtga

SEQ ID NO: 1398 - protein, 320 aa, Muscodor strobelii
  misc_feature: SGI Peptide ID NO. 560067
  misc_feature (1)..(313): NCBI GI: 67625669 Blast Desc: exo-beta-D-glucosaminidase [Hypocrea jecorina]
  misc_feature (1)..(313): NCBI GI: 224760945 Blast Desc: exo-beta-D-glucosaminidase [Hypocrea virens]
  misc_feature (1)..(313): NCBI GI: 116179354 Blast Desc: CHGG_00305 [Chaetomium globosum CBS 148.51] gi|88184602|gb|EAQ92070.1| CHGG_00305 [Chaetomium globosum CBS 148.51]
  misc_feature (1)..(314): NCBI GI: 145603719 Blast Desc: MGG_05864 [Magnaporthe grisea 70-15] gi|145011890|gb|EDJ96546.1| MGG_05864 [Magnaporthe grisea 70-15]
  misc_feature (1)..(313): NCBI GI: 242780388 Blast Desc: glycosyl hydrolase, [Talaromyces stipitatus ATCC 10500] gi|218719731|gb|EED19150.1| glycosyl hydrolase, [Talaromyces stipitatus ATCC 10500]
  misc_feature (1)..(308): NCBI GI: 212526232 Blast Desc: glycosyl hydrolase, [Penicillium marneffei ATCC 18224] gi|210072671|gb|EEA26758.1| glycosyl hydrolase, [Penicillium marneffei ATCC 18224]
  misc_feature (1)..(312): NCBI GI: 70981776 Blast Desc: glycosyl hydrolase [Aspergillus fumigatus Af293] gi|66844039|gb|EAL84379.1| glycosyl hydrolase, [Aspergillus fumigatus Af293]
  misc_feature (1)..(312): NCBI GI: 226973796 Blast Desc: exo-beta-D-glucosaminidase [Aspergillus sp. CJ22-326]
  misc_feature (1)..(312): NCBI GI: 159121974 Blast Desc: glycosyl hydrolase, [Aspergillus fumigatus A1163]
  misc_feature (1)..(313): NCBI GI: 255933359 Blast Desc: Pc12g13420 [Penicillium chrysogenum Wisconsin 54-1255] gi|211582769|emb|CAP80969.1| Pc12g13420 [Penicillium chrysogenum Wisconsin 54-1255]
  misc_feature (23)..(291): SWISSPROT Homolog: EC 3.2.1.152 Mannosylglycoprotein endo-beta-mannosidase
MSTNVSSFYDRKIYNDGLWKRLGAPKSLDDYLLKAQIMDYEATRSQYESVAAFWNKDRPATGLIYWMLTNAWPSLHWNLFDYHLNAAGSYFGAKMGSRIEHVAYDYIKKTLYLINRSIDKEGQRRIVVELIDKNGKSLYNTTRTVETQPNTSKNIIDLASQFKHIKDLAFLRLILTDADGVSLSRNVYWLASTIDTLDWDDSDWFFTPVTKYANYTSLSSLQDANVSASITKTCHKTSSNTYHITLENLSSVPAFFVRLSLMDKAGEDIAPVFWSDNYVTLWPHENLELQVEGENAAAIQISGSNVAKAQITLNKANRAK

SEQ ID NO: 1399 - DNA, 10189 bp, Muscodor strobelii; identical to SEQ ID NO: 1396
  misc_feature: SGI EST ID NO. CUFF.3924.1
  misc_feature: Variant of the nucleotide sequence at SEQ ID NO 1397

SEQ ID NO: 1400 - DNA, 726 bp, Muscodor strobelii
  misc_feature: SGI cDNA ID NO. 560068
  misc_feature: Encodes the peptide sequence at SEQ ID NO 1401
atgctggcgccgaccaccaacgctgcgcgcctcgccgtgctgggcagtcgacagctccagctgcagactgccttctcgcgacgaccagcatgcccatactcgaccctcgtatcgcttcttcaccaccccaccacagtccgtctgccgtccaaccatgccgccgtcagaaagcctctttctctgcaatgcaagttcgctgcccgccgcagccaatccaccgcctccgcccctcactcatcatcaacctcgacctctgcaactcctaccactatactcaactggaacgacttcttccagctgcgcaagactaggcggagattccaattggctagcagcatgctgaccatgaccgcgggcggaacggctggtgccctgctgctcgtcaacatgaacatggactggctgttgagcaaagtgcccatggaccccttcttcgcccttggcatcatcacgctcagtttcgccgggctgggctggctggctggccccagtctaggctctgttttcttctacgccacgaagcgtggcgtcaagcagcccatggccgtcaaagagtccgagttcttcaaccgtatcaagaagaaccgtgttgaccccagcaacagttcccttagcgggaacgcagtcccggatttctacggcgagaagatctccagtgtagctggttataggcaatggctgaaggatcagagggcattcaacaagaagcgaacgaacttcgtgtaa

SEQ ID NO: 1401 - protein, 241 aa, Muscodor strobelii
  misc_feature: SGI Peptide ID NO. 560068
  misc_feature (67)..(241): Pfam Id: PF08566 Pfam Desc: Mitochondrial import protein Pam17
  misc_feature (91)..(241): NCBI GI: 116181080 Blast Desc: CHGG_01168 [Chaetomium globosum CBS 148.51] gi|88185465|gb|EAQ92933.1| CHGG_01168 [Chaetomium globosum CBS 148.51]
  misc_feature (91)..(241): NCBI GI: 85112693 Blast Desc: NCU00737 [Neurospora crassa OR74A] gi|74618164|sp|Q7SEE1.1|PAM17_NEUCR RecName: Full=Presequence translocated-associated motor subunit pam-17, mitochondrial;
  misc_feature (29)..(241): NCBI GI: 256726785 Blast Desc: NECHADRAFT_66132 [Nectria haematococca mpVI 77-13-4]
  misc_feature (89)..(241): NCBI GI: 156036140 Blast Desc: SS1G_12756 [Sclerotinia sclerotiorum 1980] gi|154698164|gb|EDN97902.1| SS1G_12756 [Sclerotinia sclerotiorum 1980]
  misc_feature (86)..(241): NCBI GI: 154314295 Blast Desc: BC1G_05241 [Botryotinia fuckeliana B05.10] gi|150848886|gb|EDN24079.1| BC1G_05241 [Botryotinia fuckeliana B05.10]
  misc_feature (29)..(241): NCBI GI: 46121301 Blast Desc: FG05029.1 [Gibberella zeae PH-1] gi|83288373|sp|Q4ICM9.1|PAM17_GIBZE RecName: Full=Presequence translocated-associated motor subunit PAM17, mitochondrial;
  misc_feature (89)..(237): NCBI GI: 171695814 Blast Desc: protein product [Podospora anserina] gi|170948149|emb|CAP60313.1| protein product [Podospora anserina]
  misc_feature (120)..(241): NCBI GI: 261356526 Blast Desc: presequence translocase-associated motor [Verticillium albo-atrum VaMs.102]
  misc_feature (68)..(241): NCBI GI: 242795991 Blast Desc: presequence translocase-associated motor subunit Pam17, [Talaromyces stipitatus ATCC 10500] gi|218719293|gb|EED18713.1| presequence translocase-associated
  misc_feature (68)..(241): NCBI GI: 258569242 Blast Desc: presequence translocated-associated motor subunit pam-17 [Uncinocarpus reesii 1704] gi|237906811|gb|EEP81212.1| presequence translocated-associated motor subunit pam-17 reesii
MLAPTTNAARLAVLGSRQLQLQTAFSRRPACPYSTLVSLLHHPTTVRLPSNHAAVRKPLSLQCKFAARRSQSTASAPHSSSTSTSATPTTILNWNDFFQLRKTRRRFQLASSMLTMTAGGTAGALLLVNMNMDWLLSKVPMDPFFALGIITLSFAGLGWLAGPSLGSVFFYATKRGVKQPMAVKESEFFNRIKKNRVDPSNSSLSGNAVPDFYGEKISSVAGYRQWLKDQRAFNKKRTNFV

SEQ ID NO: 1402 - DNA, 7757 bp, Muscodor strobelii
  misc_feature: SGI EST ID NO. CUFF.3923.2
  misc_feature: Variant of the nucleotide sequence at SEQ ID NO 1400
gtttgattttgaagcggcagtgatctcacgagtccggtgcctaataaaattgcgattatttccgtaacccctctcatctcgaatcaacagaaagttatcttgaaaatttttgtcgattgagtcccagctgcttgactaattcgcaccaaaaatttgaaatagaagaaaaccctactttgaagaccccaatatagctcggcccgagaggtacagaattatttaaagttcagtcacatagagatagtctacatacatcttcttcacttatctaacttataaacagattattgatcttatactcctctgccgatcaacgcgacctatgcggcttacatgcattcctctccacggattacatggggcgaggtgcatgcaataggaacacgaaccaataagaagggcacgtacgaatcaaggcatcaggtttcgttgatcactaggtgcggggtgttctttaacaaccgggttacagcgaagaacagtcaagttgttgtgcatcattaagatagtgttctctatgctggtaagctgcagactgagtagatggtattccattagtaagtttctagcgcaacttgtaaacgaccggtcatcgaaaacactcgttgatacgtcggggataattaacgtacaacatcatttgactcgtcggcttatagtcaaaatgcgcttggacatgagatatacctaacagtaggaactaggtcgcaatcgcgaatttggtgcagtatgattgttttgttgccggcggcagcggtgcagcggtgtgctactgcaagattctcctctgaggggtttgcatgagcattgagcgcgcttctccaagatcgcatcacgcggacccaacttgttcactctctgttgcttttcacttggctcggtttgccttattgagtgtgatttgcgccttggcaacattactgccgcttatctggatagctgcagcattctcgccttcgacttgcagctctaggttttcatgtggccatagcgtgacatagttgtctgaccagaatacgggtgcaatgtcttcacccgctttgtccatcaagctaagcctgacgaaaaaggctgggactgaggagaggttctcaagtgtgatatgataggtattggacgaggttttgtgacatgtcttggtgattgaagccgagacatttgcgtcttgtagcgagctcaatgatgtataatttgcatacttggtaacgggggtaaagaaccaatcggaatcgtcccagtctagagtatcgatggtactggctagccaatacacattgcggctgagactcacaccgtctgcatcggttaggatgaggcgaaggaaagctagatccttgatgtgtttgaattgtgatgctaagtcaataatgtttttgctcgtgtttggctgggtttcaactgtccttgtggtgttatatagggatttcccgttcttgtcgatcaactctactacgatacgtcgttgtccctctttgtctatggagcggttgatgaggtataatgtcttcttgatatagtcgtaggccacatgctcaattcttgatcccatcttggctccaaagtaagagccggcggcatttaggtggtaatcgaaaagattccagtgcaaacttggccaagcatttgtgagcatccaataaataagcccagtagccggtctgtctttattccagaaagcagcgacagattcgtattgagatcgagtcgcttcatagtccataatctgcgccttcagaaggtagtcgtcgagagactttggtgctcctagtcgcttccatagaccatcgttgtatatcttgcggtcgtagaacgatgaaacattggtggacatgtgatagagtcccatgtctggtttcttccacaagtcgtcaaggtctttctcagacaagaactttttcaagctccccagttctggcgttcccacaccagctccaagttccgacccgaatccgaaggccgctcccagcctgtcttcagatggctcgacatcgtaccaatagtttggcggcacccagtcgtagggcccgtccattttcatacccgaaggtcccaaaatctctggataacttctctttgaggcagaggcgacaataggaacctgccagtctgccgatctgagggcagaggtatatatttgtgctgctcgatcatccggccaataatcgcttccaacaagaaaggcaatcaagctggggtgcccttggatcatgagagcctcatgatgtatgctggcgtttgcgatatcatagtcactttctgtccattctgacttgacggcaagatcttcattgtaactccatgcttcccatttgtcgcaacactcccagccggctaagatgagaaggcccatgcgatcggcaatgtcgaacaattctgactgctccattttgccctcaagtcttatagcgttgcctccggaatctaaaacgagtttggcttgttgagtgaacttttcgcaatcccagcgcaagaacatgtcactggagtagccggcgccaagaatttgaaaaggtctaccattcacataaaacatcgtatcattgtgagtgtttagcaccgatgagaaattgcgaacgccgaaagtttggtaaacattatcggatactgcatcgtcaacagataccgataattgcccagaatataagggttgctggccccattgcttcggccaccagaccttcggctccttgagagttgtcgtcaagaccaactcctgcgattgcaacgggccaagatgcacctcctggctccattcgtggctttgatttccagcttccagcccgactttacctgtcacactgaccgtaacggcatgcgtttccaagtttcgaacagtggatttcatcgtaatatcggcggaggagtcatcagttggtagatcaatcttggtaaccaccctcaacggactcaaagctaccggaccggtttgtttcactacaatatctcgccaaacgccagtcccattgtctggtggatatggattccaatcaacgaaaccaatcgcaaagtcgtaattatagtctgttggatagacctgcaccgccaatgcgttctccttctctacaatggtagatatatcgtagacgtgacctccataggccccggcttgagacgtccgattagctacttgctttccgttgatatagatatcgcctttcgagctgatgccgtttgtttgcaagaagtaatgatagtaataatgcttagggtcgagatcgagaacaaatgtttgtcgatatatccagggatcgtgaaattgtctagcgtcgaagctcttgagattctcggaaaaaaaataggtcgtcttcgcgatacacacctgcatggatgagacaacccatcaaggtgcatcgcgaggcattgatatggtgccattcggatgtattgagaccggtctgagacaagacttccagccaggttccaaccttggcagtagtttgtatatcccatgatggtatgacagccgactgaccaggctctgacaacaacgaagaagcgcccagaaccgtctcgataccaatgctaatcgtcgaaaataagacaagttttcgcatagtgacgacgacacggttgcaaacagggagccccaaggtttgttactcgttgtttactgtaagtatagctgtagttcatcagagagctggcgtcgatatatatgtataagtgcatgcaactctagtggcgaaaggcgcttggctgcagagcactttgcagattggcaggttaattcagtcatatcaccaatggggacgctacttcatagtgctgccgggacatatcccgaagccttggctgcatggggactggaggcaggtcaattaatataacatagccatgctgcttctgcacgttttgtcagcccatcaaggagcagtcgagatgaaagcaacagcaagtgtatgattgattatgtaaaaggtattatcattcgacctaatgtcggttaataagacatgttgcttcgactttgagatggacctatatgagcggaataccctgctgtgggcgtaggtcaggacgagaacatatgcagtcagaagccgggcgatcttgttcgtatttcgttgccgagatgcatgtcacgttaccaccggctcaatcgcaggcggagaccaaaactgtaggtcgagatgcttgatctgttaatgtgtaattgcatcgtcgcaatgggcttcggcctattcgcagtgaccatataagcaacaccaccgcttatctactgcgtcttatcttatcgctttctgcgatgcagccccttatccagctagggcaattaacacatgtagcatcacacatttccgtccatcaacatgaggctatctcgactgtacgcgttttccgtcagaggatagctaatttgatggaccgccgccatcagatagtgtgtgagctgttttgttttttttacctggcgcatcgccgaatcaactgtattaccacctactgcccttactgtattaaaaggaaactgtatgtgagaggagttctgaatgcacgcgttttgcacgtatttagataagcaccgaaattagtgaattgcatcgtcgcaatggcaggcctccgatcagctctgtcgaccagactgtgatccatctgtcagcgactggcgaagacaaaggtggcttcagatagatagtcgacggtgatggggcagggcgtcaggatcggccctgatctaataccctcaagtatcctgcatgtttaatgatcttctatgcgacaatagtattgcttttggcagagtcattataagtattattcctttacgtttgaaaagtggtaagaaagacttcgcatggatcgacatacttaagatgggaggcccttgaagctcaagggacagcttcccgggtagcttgctacggggaaggagcgctagctatgccttagcgcaggtgcccaaagctctcacctgcatcttggcttttcctatcgacgccaagctgcacccggccaacgacgtcaagctttcgacagcctcagcgacgccagcgagctctccacctccatcgcagacatcgacaaaacttgactaccgactacgactgcgcatacttcaaacccacgtataggacccggatcgcgtgacacaatgctggcgccgaccaccaacgctgcgcgcctcgccgtgctgggcagtcgacagctccagctgcagactgccttctcgcgacgaccagcatgcccatactcgaccctcgtatcgcttcttcaccaccccaccacagtccgtctgccgtccaaccatgccgccgtcagaaagcctctttctctgcaatgcaagttcgctgcccgccgcagccaatccaccgcctccgcccctcactcatcatcaacctcgacctctgcaactcctaccactatactcaactggaacgacttcttccagctgcgcaagactaggcggagattccaattggctagcagcatgctgaccatgaccgcgggcggaacggctggtgccctgctgctcgtcaacatgaacatggactggctgttgagcaaagtgcccatggaccccttcttcgcccttggcatcatcacgctcagtttcgccgggctgggctggctggctggccccagtctaggctctgttttcttctacgccacgaagcgtggcgtcaagcagcccatggccgtcaaagagtccgagttcttcaaccgtatcaagaagaaccgtgttgaccccagcaacagttcccttagcgggaacgcagtcccggatttctacggcgagaagatctccagtgtagctggttataggcaatggctgaaggatcagagggcattcaacaagaagcgaacgaacttcgtgtaagagcttccatatcgaggtgggcaatgaaaaggtatcgagggctgcaacgagatgaagtggtctattccaagctgtggcagcagcgtttgatatgttgatacgcgtcgtttttatcttgggacggtgttcggagcctctcccacgaaaaaagttgcaattgtacagatagggatcactaaagagccattttatacgaacaacccactcattagcgcaggtatgctggtctatgtggaattgactatctattgtcttgctacagaaacggcatcgtctggtcaacttcgagcttccaggccttcatgccccctttgatatcccggatatgtctcgtaccgcccttgtcaagtcctagctgtttgagcttttgtgtgactagttgcgaatcgttgcccactcggcatattacgtggattggcttagatgaatctgcttcgctaggtaaccagtcaatttggggggcttggttttccatttttgctcgactcttggcttggaatgtagagaacggaatgttgaaagctcctggtacactaccgatatcaaagagctctttctcccgaacatcgagtaacaatccgcgttcatcagctgcaagtgaattatactccgttgggcttatccgctctgccgcttccagaatattgactggcgtgttgacgccgcagaattggatataatccaaggatccagaactcagttctttcagtgtaagtgttgattgagcagagcaggcaaaacagtctgacctgcggcctcgcattctgatggatcgaaaagttgttgtggggttagctgaaaataggagaagactgggtgtcaagggctctttgcgagctaagttgttcttatcgccaagaccggcactaatcagcttgatagcttcgagcgcttgcagtactcccatcacgcctacgactggaccgaggataccgccttcaccgcagctcactacactgtcagctggaggcggccgaggatatatacatcggtagcatggtcctccttcggccgagcctcggggagcaggtggattatttaacacgatgagttggccatccgtgcgtaaagcagaagcagaaactagcggcttccccaacaagacgcagatatccgagatgagatagcgtgaggttgggtggtcggtgcagtcgagaaccacgtcataaccacttacaacctgctcggcattctgcggggtgagatgttcggcatgggaaacataagtgacctccgggttcagacctcgacagtattcgccaagactatcaaccttcttcataccaacacgtgcggtgctatgcgcgatctgtcggtgtagatttgaaacttcgaccgtgtcgccgtctacgacgcctagagtcccaacaccggccccggcgagatatgcggcggcggggcagcctagaccaccggctccgactatgagaacggcggcagatttgaggcgcagctgccctttaatgccgactgaagggagaattagctgtcgaccatatctattgtactcttcttctttgagtggccatttccaatccggatttgtggttgtttgcggatggtctggaggggcggctgttgatgtctctcgtgatgattcaagttgggctaattgtgccttcaaacgttgaagctctaattcaaccttggatttttgctctcgtaattgctctattgcctccattgtgaaacaatagtgtagtgtgatctgcaaggtcgacgaggcacgaagactgatatttggacgaataagcttctcactgcatagccctaaaggaatgcatgtcgatggaatggcaatggttatgcaccccactaaattttgtccaaagctcacttcctcacatcagatagtttcaacatccgcatctttagcagcattgctactgaggtttactcattacgcagtgttctattagagcgctgtatttcgaaattg

SEQ ID NO: 1403 - DNA, 1428 bp, Muscodor strobelii
  misc_feature: SGI cDNA ID NO. 560069
  misc_feature: Encodes the peptide sequence at SEQ ID NO 1404
atggaggcaatagagcaattacgagagcaaaaatccaaggttgaattagagcttcaacgtttgaaggcacaattagcccaacttgaatcatcacgagagacatcaacagccgcccctccagaccatccgcaaacaaccacaaatccggattggaaatggccactcaaagaagaagagtacaatagatatggtcgacagctaattctcccttcagtcggcattaaagggcagctgcgcctcaaatctgccgccgttctcatagtcggagccggtggtctaggctgccccgccgccgcatatctcgccggggccggtgttgggactctaggcgtcgtagacggcgacacggtcgaagtttcaaatctacaccgacagatcgcgcatagcaccgcacgtgttggtatgaagaaggttgatagtcttggcgaatactgtcgaggtctgaacccggaggtcacttatgtttcccatgccgaacatctcaccccgcagaatgccgagcaggttgtaagtggttatgacgtggttctcgactgcaccgaccacccaacctcacgctatctcatctcggatatctgcgtcttgttggggaagccgctagtttctgcttctgctttacgcacggatggccaactcatcgtgttaaataatccacctgctccccgaggctcggccgaaggaggaccatgctaccgatgtatatatcctcggccgcctccagctgacagtgtagtgagctgcggtgaaggcggtatcctcggtccagtcgtaggcgtgatgggagtactgcaagcgctcgaagctatcaagctgattagtgccggtcttggcgataagaacaacttagctcgcaaagagcccttgacacccagtcttctcctattttcagctaaccccacaacaacttttcgatccatcagaatgcgaggccgcaggtcagactgttttgcctgctctgctcaatcaacacttacactgaaagaactgagttctggatccttggattatatccaattctgcggcgtcaacacgccagtcaatattctggaagcggcagagcggataagcccaacggagtataattcacttgcagctgatgaacgcggattgttactcgatgttcgggagaaagagctctttgatatcggtagtgtaccaggagctttcaacattccgttctctacattccaagccaagagtcgagcaaaaatggaaaaccaagccccccaaattgactggttacctagcgaagcagattcatctaagccaatccacgtaatatgccgagtgggcaacgattcgcaactagtcacacaaaagctcaaacagctaggacttgacaagggcggtacgagacatatccgggatatcaaagggggcatgaaggcctggaagctcgaagttgaccagacgatgccgtttctgtag

SEQ ID NO: 1404 - protein, 475 aa, Muscodor strobelii
  misc_feature: SGI Peptide ID NO. 560069
  misc_feature (226)..(322): Pfam Id: PF05237 Pfam Desc: MoeZ/MoeB domain
  misc_feature (356)..(467): Pfam Id: PF00581 Pfam Desc: Rhodanese-like domain
  misc_feature (81)..(215): Pfam Id: PF00899 Pfam Desc: ThiF family
  misc_feature (1)..(474): NCBI GI: 261356525 Blast Desc: molybdenum cofactor synthesis protein [Verticillium albo-atrum VaMs.102]
  misc_feature (5)..(475): NCBI GI: 39941316 Blast Desc: MGG_05569 [Magnaporthe grisea 70-15] gi|226713615|sp|A4RPM5.1|UBA4_MAGGR RecName: Full=Adenylyltransferase and sulfurtransferase UBA4; AltName: 4;
  misc_feature (1)..(475): NCBI GI: 256727347 Blast Desc: [Nectria haematococca mpVI 77-13-4]
  misc_feature (1)..(475): NCBI GI: 46121299 Blast Desc: FG05028.1 [Gibberella zeae PH-1]
  misc_feature (2)..(473): NCBI GI: 156036142 Blast Desc: SS1G_12757 [Sclerotinia sclerotiorum 1980] gi|226713009|sp|A7F582.1|UBA4_SCLS1 RecName: Full=Adenylyltransferase and sulfurtransferase uba4; AltName: 4;
  misc_feature (1)..(473): NCBI GI: 67523743 Blast Desc: AN2327.2 [Aspergillus nidulans FGSC A4] gi|3025796|gb|AAC24520.1| molybdenum cofactor biosynthetic protein [Emericella nidulans] gi|40745282|gb|EAA64438.1| AN2327.2
  misc_feature (1)..(473): NCBI GI: 226713779 Blast Desc: AN2327.2 [Aspergillus nidulans FGSC A4] gi|3025796|gb|AAC24520.1| molybdenum cofactor biosynthetic protein [Emericella nidulans] gi|40745282|gb|EAA64438.1| AN2327.2
  misc_feature (1)..(473): NCBI GI: 145249430 Blast Desc: An14g04300 [Aspergillus niger] gi|226713600|sp|A2R3H4.1|UBA4_ASPNC RecName: Full=Adenylyltransferase and sulfurtransferase uba4; AltName: 4;
  misc_feature (4)..(473): NCBI GI: 189197023 Blast Desc: molybdopterin biosynthesis protein moeB [Pyrenophora tritici-repentis Pt-1C-BFP] gi|187980797|gb|EDU47423.1| molybdopterin biosynthesis protein moeB [Pyrenophora Pt-1C-BFP]
  misc_feature (7)..(473): NCBI GI: 115401266 Blast Desc: ATEG_07600 [Aspergillus terreus NIH2624] gi|121735794|sp|Q0CFD4.1|UBA4_ASPTN RecName: Full=Adenylyltransferase and sulfurtransferase uba4; AltName: 4;
MEAIEQLREQKSKVELELQRLKAQLAQLESSRETSTAAPPDHPQTTTNPDWKWPLKEEEYNRYGRQLILPSVGIKGQLRLKSAAVLIVGAGGLGCPAAAYLAGAGVGTLGVVDGDTVEVSNLHRQIAHSTARVGMKKVDSLGEYCRGLNPEVTYVSHAEHLTPQNAEQVVSGYDVVLDCTDHPTSRYLISDICVLLGKPLVSASALRTDGQLIVLNNPPAPRGSAEGGPCYRCIYPRPPPADSVVSCGEGGILGPVVGVMGVLQALEAIKLISAGLGDKNNLARKEPLTPSLLLFSANPTTTFRSIRMRGRRSDCFACSAQSTLTLKELSSGSLDYIQFCGVNTPVNILEAAERISPTEYNSLAADERGLLLDVREKELFDIGSVPGAFNIPFSTFQAKSRAKMENQAPQIDWLPSEADSSKPIHVICRVGNDSQLVTQKLKQLGLDKGGTRHIRDIKGGMKAWKLEVDQTMPFL

SEQ ID NO: 1405 - DNA, 10189 bp, Muscodor strobelii; identical to SEQ ID NO: 1396
  misc_feature: SGI EST ID NO. CUFF.3924.1
  misc_feature: Variant of the nucleotide sequence at SEQ ID NO 1403

SEQ ID NO: 1406 - DNA, 2022 bp, Muscodor strobelii
  misc_feature: SGI cDNA ID NO. 560070
  misc_feature: Reduced expression when VOC is produced
  misc_feature: Encodes the peptide sequence at SEQ ID NO 1407
atgatgaacgccagcccctggaacgggcaagatcaaggcatgccgtcgtctggcgacgatgaattccaccagttcttcgacattggcatgtcgggcatgggcgactccatgcagtttgactaccacgatttcgctccccaaggcggcccctccatgatgcaggcgcatcgccgcgaccctgtcgatactcccatgagcgacgccaacgtctcctctcttctctctcacgccaacatgccccccatgtctaccgcctcgagccatcccacgatcccttcacagatcttggccacccagcacccgccaaatgataccatatcagagatcgatgcgcagatccagtttctgcaacatcagaggctgcaacaacagcagcgccagctggaggaacaacagaggcgacttcaggagcagcaggctgccttttatgcccagcagcaacagcgaaatatggtaccgcccacgccacagagtttggagttgcaggccggtggacacatatttacggcgcaggaccggggacactcatctggcatcttcgatagctaccaacagttgaaagagcaacacgacatggccttcactccgctagtttcgccggcagtcacaccattggatgcacatttttcggcagaacatcagttcacggttcccggtgcatatttcagtcctatatcgtcacctgcgctgcacgctcagaacgattcagcatcgacttatgacctgcgacactcaggccatacgcacaactctccggcgaccatggatgtagaatctccgtccacgctcaccatctcagatgccacgactaaaccggcgcgcaagaccgctgggccgagaaggaagtcaaaggtacggcaatcaccgattacgaagccgcaaaggaagaagactgcttcgacgcctgtgatgaatgctcaggctttgacagagctagcagaagcagtcgcagagacatcagaagcgcctttgcacccaaaaccagtttctgcgtcttcaggcgatgaatcggaaaacgcctccgtttcaccagaagcccttgagatgcctccaccaccacttccgctacctcgttcagcgcggcaatctccttacattgctcctcaaatttctgataaacctccgcaacccgcggccctcaagaacttaagtgggaagccatcacccgctaccccagcctcgctcttcaggatatcaccgagaaataagacggcagattctggcaatgcggattctcatgctccggagcatatcgagaacctcgagcttcccgaatctatcggatcgatgacatcttccaaacccttttccccgctagaaaaatctcggccgccatcacaatcgtcttcagagctggccaccccgaagatgacgccgctcgcagctttgccgccccccagtctgccgagatccagccagccaccttccgccagcccgagtccgcagctcactccccgctcctccacgcccgcgttcagaaatacaccgctgctggctgcaaaagcgggtagaaaacgggcgagcatcagttctagttcgccagccctactaccgaggatatcgccaaatatcaagccgttactacccggcaccccgggcttgacggacgaggacacggcgtcgaaactactcgcttcaaaatccaactatcagcgaatcttagaaggcaacacgatgccgggcgtgacataccccagcgagctctcgacgaatctcacgtcgaaacgaacatcgcacaagatcgcggagcaagggcggaggaaccgaatcaactcggcgcttcaggagatagcaatactgctcccaaagtcggtgatgaaagaaggagccgagggagatggcgacagcgggagtggagataagaaggacgggaaacagagcagcgcgcagggcagcaaggcgagcacggtagagtcggcgatcgagtacatcaaacagctgcagatggaactagccgaggccaacaaacgggcggaagcggctgagcaaaagctacgggaaacgacactaacggaaggctga

SEQ ID NO: 1407 - protein, 673 aa, Muscodor strobelii
  misc_feature: SGI Peptide ID NO. 560070
  misc_feature (575)..(648): Pfam Id: PF00010 Pfam Desc: Helix-loop-helix DNA-binding domain
  misc_feature (2)..(665): NCBI GI: 46107324 Blast Desc: FG00545.1 [Gibberella zeae PH-1]
  misc_feature (2)..(672): NCBI GI: 256734516 Blast Desc: NECHADRAFT_32105 [Nectria haematococca mpVI 77-13-4]
  misc_feature (2)..(668): NCBI GI: 171687937 Blast Desc: protein product [Podospora anserina] gi|170943930|emb|CAP69582.1| protein product [Podospora anserina]
  misc_feature (2)..(673): NCBI GI: 128830 Blast Desc: NUC1_NEUCR RecName: Full=Phosphorus acquisition-controlling protein gi|168852|gb|AAA33603.1| phosphorus acquisition controlling protein [Neurospora crassa]
  misc_feature (1)..(666): NCBI GI: 39944754 Blast Desc: MGG_04359 [Magnaporthe grisea 70-15] gi|145021605|gb|EDK05734.1| MGG_04359 [Magnaporthe grisea 70-15]
  misc_feature (79)..(673): NCBI GI: 85111481 Blast Desc: NCU09315 [Neurospora crassa OR74A] gi|28925710|gb|EAA34721.1| [Neurospora crassa OR74A]
  misc_feature (7)..(667): NCBI GI: 154296238 Blast Desc: BC1G_12946 [Botryotinia fuckeliana B05.10] gi|150843510|gb|EDN18703.1| BC1G_12946 [Botryotinia fuckeliana B05.10]
  misc_feature (33)..(667): NCBI GI: 156035962 Blast Desc: SS1G_12667 [Sclerotinia sclerotiorum 1980] gi|154698075|gb|EDN97813.1| SS1G_12667 [Sclerotinia sclerotiorum 1980]
  misc_feature (244)..(665): NCBI GI: 116180306 Blast Desc: CHGG_00781 [Chaetomium globosum CBS 148.51] gi|88185078|gb|EAQ92546.1| CHGG_00781 [Chaetomium globosum CBS 148.51]
  misc_feature (141)..(665): NCBI GI: 242803958 Blast Desc: HLH transcription factor (PalcA), [Talaromyces stipitatus ATCC 10500] gi|218717623|gb|EED17044.1| HLH transcription factor (PalcA), [Talaromyces stipitatus ATCC 10500]
  misc_feature: Useful for introducing or modulating the production of volatile compounds
MMNASPWNGQDQGMPSSGDDEFHQFFDIGMSGMGDSMQFDYHDFAPQGGPSMMQAHRRDPVDTPMSDANVSSLLSHANMPPMSTASSHPTIPSQILATQHPPNDTISEIDAQIQFLQHQRLQQQQRQLEEQQRRLQEQQAAFYAQQQQRNMVPPTPQSLELQAGGHIFTAQDRGHSSGIFDSYQQLKEQHDMAFTPLVSPAVTPLDAHFSAEHQFTVPGAYFSPISSPALHAQNDSASTYDLRHSGHTHNSPATMDVESPSTLTISDATTKPARKTAGPRRKSKVRQSPITKPQRKKTASTPVMNAQALTELAEAVAETSEAPLHPKPVSASSGDESENASVSPEALEMPPPPLPLPRSARQSPYIAPQISDKPPQPAALKNLSGKPSPATPASLFRISPRNKTADSGNADSHAPEHIENLELPESIGSMTSSKPFSPLEKSRPPSQSSSELATPKMTPLAALPPPSLPRSSQPPSASPSPQLTPRSSTPAFRNTPLLAAKAGRKRASISSSSPALLPRISPNIKPLLPGTPGLTDEDTASKLLASKSNYQRILEGNTMPGVTYPSELSTNLTSKRTSHKIAEQGRRNRINSALQEIAILLPKSVMKEGAEGDGDSGSGDKKDGKQSSAQGSKASTVESAIEYIKQLQMELAEANKRAEAAEQKLRETTLTEG

SEQ ID NO: 1408 - DNA, 2861 bp, Muscodor strobelii
  misc_feature: SGI EST ID NO. CUFF.3887.0
  misc_feature: Variant of the nucleotide sequence at SEQ ID NO 1406
gtcggttcatccaagggttggccgtcgtcgaacctgcctagctggtggtgtactcctcttcgccagtattgtccgtagcgacattccgaatgagcagagttctcccctcagacaacagaatactgctgcagatttgagcagaacttgaagattcgcgcatccgaatgtactgttgaacgcagcacacgagaccgacccacgtatcatgtgcttcaagacgtctctgacgatcgcataaacggacgcactgcattcaggccagtcccacgggtacatcacgggcgtaattatatagacaccaccagcccggaccacaacgatctcttacgaaaggaattctacacacgcgctccgctccaaacggctggcctgtgcccatatgcgaccagtcgctgctctccgttgggcattagacacttcaagtgatggccatgatgaacgccagcccctggaacgggcaagatcaaggcatgccgtcgtctggcgacgatgaattccaccagttcttcgacattggcatgtcgggcatgggcgactccatgcagtttgactaccacgatttcgctccccaaggcggcccctccatgatgcaggcgcatcgccgcgaccctgtcgatactcccatgagcgacgccaacgtctcctctcttctctctcacgccaacatgccccccatgtctaccgcctcgagccatcccacgatcccttcacagatcttggccacccagcacccgccaaatgataccatatcagagatcgatgcgcagatccagtttctgcaacatcagaggctgcaacaacagcagcgccagctggaggaacaacagaggcgacttcaggagcagcaggctgccttttatgcccagcagcaacagcgaaatatggtaccgcccacgccacagagtttggagttgcaggccggtggacacatatttacggcgcaggaccggggacactcatctggcatcttcgatagctaccaacagttgaaagagcaacacgacatggccttcactccgctagtttcgccggcagtcacaccattggatgcacatttttcggcagaacatcagttcacggttcccggtgcatatttcagtcctatatcgtcacctgcgctgcacgctcagaacgattcagcatcgacttatgacctgcgacactcaggccatacgcacaactctccggcgaccatggatgtagaatctccgtccacgctcaccatctcagatgccacgactaaaccggcgcgcaagaccgctgggccgagaaggaagtcaaaggtacggcaatcaccgattacgaagccgcaaaggaagaagactgcttcgacgcctgtgatgaatgctcaggctttgacagagctagcagaagcagtcgcagagacatcagaagcgcctttgcacccaaaaccagtttctgcgtcttcaggcgatgaatcggaaaacgcctccgtttcaccagaagcccttgagatgcctccaccaccacttccgctacctcgttcagcgcggcaatctccttacattgctcctcaaatttctgataaacctccgcaacccgcggccctcaagaacttaagtgggaagccatcacccgctaccccagcctcgctcttcaggatatcaccgagaaataagacggcagattctggcaatgcggattctcatgctccggagcatatcgagaacctcgagcttcccgaatctatcggatcgatgacatcttccaaacccttttccccgctagaaaaatctcggccgccatcacaatcgtcttcagagctggccaccccgaagatgacgccgctcgcagctttgccgccccccagtctgccgagatccagccagccaccttccgccagcccgagtccgcagctcactccccgctcctccacgcccgcgttcagaaatacaccgctgctggctgcaaaagcgggtagaaaacgggcgagcatcagttctagttcgccagccctactaccgaggatatcgccaaatatcaagccgttactacccggcaccccgggcttgacggacgaggacacggcgtcgaaactactcgcttcaaaatccaactatcagcgaatcttagaaggcaacacgatgccgggcgtgacataccccagcgagctctcgacgaatctcacgtcgaaacgaacatcgcacaagatcgcggagcaagggcggaggaaccgaatcaactcggcgcttcaggagatagcaatactgctcccaaagtcggtgatgaaagaaggagccgagggagatggcgacagcgggagtggagataagaaggacgggaaacagagcagcgcgcagggcagcaaggcgagcacggtagagtcggcgatcgagtacatcaaacagctgcagatggaactagccgaggccaacaaacgggcggaagcggctgagcaaaagctacgggaaacgacactaacggaaggctgacgaggtaatgtctaataagttgtagagaggccgacaacagtctacttatgggcgtattgctgtttagatgggatagacggcgtggcgagtttgtacaaggaattgtatttcctggaattcatggctggcatatcttgggcatcccgcattatatcttgcgcatcgtggctcgtccatcataaccctgctcccatggacagatatgcagcaatgatatcactggggaagtcgatctaaggcagatgagatgcgggagaaatgaaaggcaagattcgtatacatatataccacgacggctctttctaatgcgaaagagtttgtagtaaatacagcgattgcatacagaatcagtatagcattataatgaacgaatagaaattcatctaatctctgtttcgaagttcaggc

SEQ ID NO: 1409 - DNA, 2145 bp, Muscodor strobelii
  misc_feature: SGI cDNA ID NO. 560071
  misc_feature: Encodes the peptide sequence at SEQ ID NO 1410
atgtccgactcggagagtctcgagtacctccaaccgggattcgatcccaagtccctgaccattccgcgcctcaggtccattcttgtagcccacaacgtgtcttattcttcaaatgcaaagaaggcgcagttggtcgaactcttcaacgataatgtcgtgccacagtctaagaagatcctcgaggccagagctcgcgccaagcgcagcagcaaaggcatattcgacgccgactctacctccacagcaagcagcagcaacccgtttgacgactaccaggaggatcttgcgccccctccgcagcgacccgtaagcactcgaagatcgcgatctcccaggaagacatcaactagaatcaagtcggaggagccagacttcgacccgcccatgccgcctcgcgtgacaaggagcccgccaaaacgtgcgtctcgctcagctagccgtcagctccaggcctcagataccgaaggatccgagcttgacacgggcctcgtgcaaaagaagacgcgccgcgctcccacacccaagctcaagcaggaagattcggatggcctctttcgccgcacttctgatgtctttaccgccgataacccatttcaaagcggtagctctcccgcggctgagcagactcctcgtaggcgcacaaccggccataatgtgtcgcgcagctccagcaaaggggtccatcgacagagcggaggctactccgaccaagacgatggccattacgacgactacgatgacatgaagactcccgtgccgcaggtctcacggccacgaacaccagaatctcgctacaagactccagtgcaagagtcgcccgccatagaagcaggcgaggaattcacaccacaagagcaattggagctcgctgccgaggaagccacaactggccaagtcgccgttgtgccttcgcgacagactcgtcctgccaaaaagtcaaacaaaggtactccgattgcaatgctgcttatcactggattagccgcctacgttggatggtatcgtcaggaaaagcttgcggtagggtattgcggagtcggccaaagtatcagctccatcccttccgagattgaggttccggaatgggcgcaatcggtcctaccgccgcagatcaaggttccccaggccctgatcgacagcctggagcccgaatgtgagccttgcccatcccacgcaacctgttatagcgatttctctgttcgctgcgaccaagattacctccttcagccgcacccgtttgcgatgggtggcgcggttccattgcccccaacgtgtgaacctgatggcgaaaaagtccgtcgagtccaggctgttgcagatcgagctatagaagagcttcgagagcgcactgccaaattcgaatgtggtgagctcgtggacgaagaaggcgccaaggtcgagacaccggcgatcgaggagcaagagttaaaacagatcatcgataagaagaggagtaaaaagatgacaaaccaagaattcgaagagctgtggggctccgccattggcgagatcaagcagcgcgaggaagtggaggtccaagtcaaagaagcgtccgatcccgctgccgttccaaacaccctcttatcgtcaacctctctcgctcgccttccgctcacatgcgcggtcaggcgcgcgttctggctcggactggcaagaaatcgcctccaaattagcgctgtagtctcgtttatcgggacggtactgtacgcctattctcgcgtcttgtccatccgtgccgactctgcaagagttccagaactcgtcgacaaggttctcgataagctcgccaagcagagggaggccggtggctacgaaggggatgatgaagacgcgtttctgtttcttcccaatctacgtgatgatattctccggaacactcacaaactaagtgaccgtgagcgtgtctggcagcgtgttgtccgcatcgtggagcagaacagcaacgttcgtactggccagcgcaccagcgacgtcagtggtgaggttggcagggcatgggagtggattggccctacggccggtgatagcggtggaagacgtcggaagagcggccgggtgtcctggggtcgcgatgttaaggacgaggaggaggaggataagtcggtgctgcatcagaagtggcaagaaccgaggcctgtctactaa

SEQ ID NO: 1410 - protein, 714 aa, Muscodor strobelii
  misc_feature: SGI Peptide ID NO. 560071
  misc_feature (571)..(670): Pfam Id: PF09402 Pfam Desc: MAN1 C terminal
  misc_feature (572)..(670): Pfam Id: PF09402 Pfam Desc: MAN1 C terminal
  misc_feature (1)..(714): NCBI GI: 116180308 Blast Desc: CHGG_00782 [Chaetomium globosum CBS 148.51] gi|88185079|gb|EAQ92547.1| CHGG_00782 [Chaetomium globosum CBS 148.51]
  misc_feature (1)..(714): NCBI GI: 171687933 Blast Desc: protein product [Podospora anserina] gi|170943928|emb|CAP69580.1| protein product [Podospora anserina]
  misc_feature (1)..(714): NCBI GI: 256734589 Blast Desc: NECHADRAFT_57472 [Nectria haematococca mpVI 77-13-4]
  misc_feature (8)..(714): NCBI GI: 46105492 Blast Desc: FG00374.1 [Gibberella zeae PH-1]
  misc_feature (1)..(709): NCBI GI: 145614704 Blast Desc: MGG_04363 [Magnaporthe grisea 70-15] gi|145021601|gb|EDK05730.1| MGG_04363 [Magnaporthe grisea 70-15]
  misc_feature (1)..(695): NCBI GI: 85111619 Blast Desc: NCU09319 [Neurospora crassa OR74A] gi|28925782|gb|EAA34787.1| [Neurospora crassa OR74A]
  misc_feature (1)..(714): NCBI GI: 261356170 Blast Desc: conserved [Verticillium albo-atrum VaMs.102]
  misc_feature (4)..(710): NCBI GI: 156050263 Blast Desc: SS1G_07718 [Sclerotinia sclerotiorum 1980] gi|154692119|gb|EDN91857.1| SS1G_07718 [Sclerotinia sclerotiorum 1980]
  misc_feature (4)..(678): NCBI GI: 70991787 Blast Desc: sister chromatid separation protein (Src1) [Aspergillus fumigatus Af293] gi|66848375|gb|EAL88704.1| sister chromatid separation protein (Src1), [Aspergillus fumigatus
  misc_feature (4)..(677): NCBI GI: 119469753 Blast Desc: sister chromatid separation protein (Src1), [Neosartorya fischeri NRRL 181] gi|119406121|gb|EAW16072.1| sister chromatid separation protein (Src1), [Neosartorya fischeri
MSDSESLEYLQPGFDPKSLTIPRLRSILVAHNVSYSSNAKKAQLVELFNDNVVPQSKKILEARARAKRSSKGIFDADSTSTASSSNPFDDYQEDLAPPPQRPVSTRRSRSPRKTSTRIKSEEPDFDPPMPPRVTRSPPKRASRSASRQLQASDTEGSELDTGLVQKKTRRAPTPKLKQEDSDGLFRRTSDVFTADNPFQSGSSPAAEQTPRRRTTGHNVSRSSSKGVHRQSGGYSDQDDGHYDDYDDMKTPVPQVSRPRTPESRYKTPVQESPAIEAGEEFTPQEQLELAAEEATTGQVAVVPSRQTRPAKKSNKGTPIAMLLITGLAAYVGWYRQEKLAVGYCGVGQSISSIPSEIEVPEWAQSVLPPQIKVPQALIDSLEPECEPCPSHATCYSDFSVRCDQDYLLQPHPFAMGGAVPLPPTCEPDGEKVRRVQAVADRAIEELRERTAKFECGELVDEEGAKVETPAIEEQELKQIIDKKRSKKMTNQEFEELWGSAIGEIKQREEVEVQVKEASDPAAVPNTLLSSTSLARLPLTCAVRRAFWLGLARNRLQISAVVSFIGTVLYAYSRVLSIRADSARVPELVDKVLDKLAKQREAGGYEGDDEDAFLFLPNLRDDILRNTHKLSDRERVWQRVVRIVEQNSNVRTGQRTSDVSGEVGRAWEWIGPTAGDSGGRRRKSGRVSWGRDVKDEEEEDKSVLHQKWQEPRPVY

SEQ ID NO: 1411 - DNA, 2747 bp, Muscodor strobelii
  misc_feature: SGI EST ID NO. CUFF.3902.1
  misc_feature: Variant of the nucleotide sequence at SEQ ID NO 1409
gctgcaacgacgaacctgtccactttccagatcgggtcaatagatgtacacaaaacccgactgacagacttccccaccttgttttgctgcaagattgcgcctgccagatggatggatgccgtcagcgccgtcagtctcccacccggacacacagtacctacaagcgctttccaaaaacgcatccatcctcacagctccttccgatccaccttcatcgccgttatctgcttgtcctgacgagggaaccacccttttgcccttgcgtcctggtctttcctcaagacggcagtgtcgcattccgctgtctcagatctgtcgtgtcgccacgctgcaggtgcaggcctcttgcgcagcgagggaaacgacggtctgtctgattgttgccatcaaccatcaactaccattcatcacccatttctcatcgccaacagcactttattacctgccttatcgcgcagctttcccatcgccacaagctcaccatgtccgactcggagagtctcgagtacctccaaccgggattcgatcccaagtccctgaccattccgcgcctcaggtccattcttgtagcccacaacgtgtcttattcttcaaatgcaaagaaggcgcagttggtcgaactcttcaacgataatgtcgtgccacagtctaagaagatcctcgaggccagagctcgcgccaagcgcagcagcaaaggcatattcgacgccgactctacctccacagcaagcagcagcaacccgtttgacgactaccaggaggatcttgcgccccctccgcagcgacccgtaagcactcgaagatcgcgatctcccaggaagacatcaactagaatcaagtcggaggagccagacttcgacccgcccatgccgcctcgcgtgacaaggagcccgccaaaacgtgcgtctcgctcagctagccgtcagctccaggcctcagataccgaaggatccgagcttgacacgggcctcgtgcaaaagaagacgcgccgcgctcccacacccaagctcaagcaggaagattcggatggcctctttcgccgcacttctgatgtctttaccgccgataacccatttcaaagcggtagctctcccgcggctgagcagactcctcgtaggcgcacaaccggccataatgtgtcgcgcagctccagcaaaggggtccatcgacagagcggaggctactccgaccaagacgatggccattacgacgactacgatgacatgaagactcccgtgccgcaggtctcacggccacgaacaccagaatctcgctacaagactccagtgcaagagtcgcccgccatagaagcaggcgaggaattcacaccacaagagcaattggagctcgctgccgaggaagccacaactggccaagtcgccgttgtgccttcgcgacagactcgtcctgccaaaaagtcaaacaaaggtactccgattgcaatgctgcttatcactggattagccgcctacgttggatggtatcgtcaggaaaagcttgcggtagggtattgcggagtcggccaaagtatcagctccatcccttccgagattgaggttccggaatgggcgcaatcggtcctaccgccgcagatcaaggttccccaggccctgatcgacagcctggagcccgaatgtgagccttgcccatcccacgcaacctgttatagcgatttctctgttcgctgcgaccaagattacctccttcagccgcacccgtttgcgatgggtggcgcggttccattgcccccaacgtgtgaacctgatggcgaaaaagtccgtcgagtccaggctgttgcagatcgagctatagaagagcttcgagagcgcactgccaaattcgaatgtggtgagctcgtggacgaagaaggcgccaaggtcgagacaccggcgatcgaggagcaagagttaaaacagatcatcgataagaagaggagtaaaaagatgacaaaccaagaattcgaagagctgtggggctccgccattggcgagatcaagcagcgcgaggaagtggaggtccaagtcaaagaagcgtccgatcccgctgccgttccaaacaccctcttatcgtcaacctctctcgctcgccttccgctcacatgcgcggtcaggcgcgcgttctggctcggactggcaagaaatcgcctccaaattagcgctgtagtctcgtttatcgggacggtactgtacgcctattctcgcgtcttgtccatccgtgccgactctgcaagagttccagaactcgtcgacaaggttctcgataagctcgccaagcagagggaggccggtggctacgaaggggatgatgaagacgcgtttctgtttcttcccaatctacgtgatgatattctccggaacactcacaaactaagtgaccgtgagcgtgtctggcagcgtgttgtccgcatcgtggagcagaacagcaacgttcgtactggccagcgcaccagcgacgtcagtggtgaggttggcagggcatgggagtggattggccctacggccggtgatagcggtggaagacgtcggaagagcggccgggtgtcctggggtcgcgatgttaaggacgaggaggaggaggataagtcggtgctgcatcagaagtggcaagaaccgaggcctgtctactaatttgttgtatttcttttgtaccatcagtaagctgtaggagccataactacatacacggtcggacgcgagctagcaattggcgtcattatcatttttctaatgcatacattcatgaaaaac

SEQ ID NO: 1412 - DNA, 2310 bp, Muscodor strobelii
  misc_feature: SGI cDNA ID NO. 560072
  misc_feature: Encodes the peptide sequence at SEQ ID NO 1413
atgtcgctgcctcaaccgcctatagccctgacgggctgtagtgttattttcaataacacactctatgcttattcttcgactggttttcaatcacttgaattagacgcggggcaggaatggaagaagcaaaagctgagtggtgagccagtgaatgggggagtatgtgttggctcaacaccaaaggatacttcggcggcagggctgttcatcgtcggcggcacatcttcttcgtcagactataccggcctgcaaaagttcacatactctacaggcaagtgggaatccatcacgtcgacaggtagcgctacgaaagaccgagtataccacagcgctgtctatctgaacggcccagactccatcctcatatatgcgggttcaaccaatggtaaacccgacttatcacagcagcacttcttaatacaggcttcggaaccttatggtgttttatcatcgagctccgtcctggccccagcagctgtcgctcctctattactcccatggtcagatacagaggcagtcctgatcggtgggactacttccaatacagaagtgatgatttttgacacagcagataaatcgaattcaatggctgggtcgtggaggaattctggggtcaccttggcagaacctttatccaagaacacgaccttggtcaaaggcataatcgtgaacggcgatgataaaagcaaacatctgtacactttcgatctgacaacgtcaccaaacacagtcaatcgaactgtactactcgacggcaatggcaacccacttggccagtcggcgccagtacaaaacacagctataactcagcaagatcagacgagtacgaaagaaactgatattagtgagagagatgttaacgccaacgactggccagcatacaatgctacgcttgcgccaaagagcacgaggacggattattcgcttgcaacagatgaaaaagggttggtggtcatgtcgggagggagccaggatgatgttctgtgcatgttcaacgtttatgagaatagctggttaaatgccagccgtattctagaagccgacaccgccgacacgttgtcgatccaatcgtcaccaacgatgacatcctctacagtcacagcctcagccacttcgacctcgactgtttcaccgctatcaacaagtagtacagcaagcagcacggcgagcccgagctcggcgaccactgtgcctgctgctgctgcaccagttcaagctacgaaaaatgggttaccaccgacgactattctcggcatatcacttggttcaatcttcggcgccgcaataattctcgtcttaattcttttactcctccgaagacgacgccagagacgaagctttattgaggctggtcatgcccgtcgggccagtggcatacctgacactaaagatttcttgaacgacgacatggcaaagacctcgggtggatatttccgtggacatgggcaacaagagtcacaaaactctttttcttcaatggcaatgtttctcggcaagccccaaaagcctgttcttcaacgcaaaggcagcggtcaggaaaagaagcgtgtatcgaacgatgtaatgtgcagtcaagacttcaagaacacgataagccggccacaaccccaaccaactgctcagcactcgttcctcgagcggaacgagaagcctccttcaatgccagcatcgacgttgcccagacctcgcgcaccgccatcagaggcgcaagatggtgcactgcgaagaagctctgggtggaatcggtattggtctggagctagtacgccgcacattctcggtattggaagcaccaacgccaattctcgccgaaacaccgaagtctcgtctgacgaaagctcacgatactctgatatgcatcgtatgactcaagattcggctaccgtaccaccgctgaaagttgacgggcgaccctcatttcacagggtgaactcaggaagcccaactgtttctcaatacgacccgagaattagcgagggaatctctgggcatatcgaacgacctgtgtccccagtgtcatcttcgggctactcaagcggcattcctccaagcgtacacgaggcctgggatccaacggaacctaaaaagccatggggctctgatcgtgcaccgagcagcgcgtacagtcaaagcactatggatgagccagcgtaccaaactgcccttggtgcgccgactggaagccgacagccaacgggcatttcaagacaacctcagcttgctattgcaaagacgtcaactgacatgagctggctcaatctgggagatcaggagaggtccaataattactatgaccgctcataccgctaa

SEQ ID NO: 1413 - protein, 769 aa, Muscodor strobelii
  misc_feature: SGI Peptide ID NO. 560072
  misc_feature (2)..(761): NCBI GI: 39944898 Blast Desc: MGG_04431 [Magnaporthe grisea 70-15] gi|145021547|gb|EDK05676.1| MGG_04431 [Magnaporthe grisea 70-15]
  misc_feature (1)..(757): NCBI GI: 85111613 Blast Desc: NCU09316 [Neurospora crassa OR74A] gi|28925779|gb|EAA34784.1| [Neurospora crassa OR74A]
  misc_feature (1)..(765): NCBI GI: 261357459 Blast Desc: conserved [Verticillium albo-atrum VaMs.102]
  misc_feature (1)..(758): NCBI GI: 256734515 Blast Desc: NECHADRAFT_98812 [Nectria haematococca mpVI 77-13-4]
  misc_feature (1)..(755): NCBI GI: 171687939 Blast Desc: protein product [Podospora anserina] gi|170943931|emb|CAP69583.1| protein product [Podospora anserina]
  misc_feature (1)..(759): NCBI GI: 154308374 Blast Desc: BC1G_08247 [Botryotinia fuckeliana B05.10] gi|150852788|gb|EDN27980.1| BC1G_08247 [Botryotinia fuckeliana B05.10]
  misc_feature (1)..(755): NCBI GI: 116180304 Blast Desc: CHGG_00780 [Chaetomium globosum CBS 148.51] gi|88185077|gb|EAQ92545.1| CHGG_00780 [Chaetomium globosum CBS 148.51]
  misc_feature (1)..(432): NCBI GI: 156057747 Blast Desc: SS1G_04605 [Sclerotinia sclerotiorum 1980] gi|154702390|gb|EDO02129.1| SS1G_04605 [Sclerotinia sclerotiorum 1980]
  misc_feature (1)..(759): NCBI GI: 226290241 Blast Desc: conserved [Paracoccidioides brasiliensis Pb18]
  misc_feature (1)..(759): NCBI GI: 226285310 Blast Desc: conserved [Paracoccidioides brasiliensis Pb01]
MSLPQPPIALTGCSVIFNNTLYAYSSTGFQSLELDAGQEWKKQKLSGEPVNGGVCVGSTPKDTSAAGLFIVGGTSSSSDYTGLQKFTYSTGKWESITSTGSATKDRVYHSAVYLNGPDSILIYAGSTNGKPDLSQQHFLIQASEPYGVLSSSSVLAPAAVAPLLLPWSDTEAVLIGGTTSNTEVMIFDTADKSNSMAGSWRNSGVTLAEPLSKNTTLVKGIIVNGDDKSKHLYTFDLTTSPNTVNRTVLLDGNGNPLGQSAPVQNTAITQQDQTSTKETDISERDVNANDWPAYNATLAPKSTRTDYSLATDEKGLVVMSGGSQDDVLCMFNVYENSWLNASRILEADTADTLSIQSSPTMTSSTVTASATSTSTVSPLSTSSTASSTASPSSATTVPAAAAPVQATKNGLPPTTILGISLGSIFGAAIILVLILLLLRRRRQRRSFIEAGHARRASGIPDTKDFLNDDMAKTSGGYFRGHGQQESQNSFSSMAMFLGKPQKPVLQRKGSGQEKKRVSNDVMCSQDFKNTISRPQPQPTAQHSFLERNEKPPSMPASTLPRPRAPPSEAQDGALRRSSGWNRYWSGASTPHILGIGSTNANSRRNTEVSSDESSRYSDMHRMTQDSATVPPLKVDGRPSFHRVNSGSPTVSQYDPRISEGISGHIERPVSPVSSSGYSSGIPPSVHEAWDPTEPKKPWGSDRAPSSAYSQSTMDEPAYQTALGAPTGSRQPTGISRQPQLAIAKTSTDMSWLNLGDQERSNNYYDRSYR

SEQ ID NO: 1414 - DNA, 3957 bp, Muscodor strobelii
  misc_feature: SGI EST ID NO. CUFF.3794.0
  misc_feature: Variant of the nucleotide sequence at SEQ ID NO 1412
gggattggctcttggtggtggtgttgctagaatctgctattctccctattctctcggccatcgtggttctggaaaccttgatgtcgtgtgtcgtcgtgtctgggcattgtcactgcttcctctactttcacggtataccgagcaagccatcgtcatttgggttgaaccgcaggtcgtcgaaacatcattcccaatactctctgtgaagtaataattctcgtgttctatggatgtacatatcctcctccctttttcaatatcacgttgcacatattccaggggccaacgctgcgtggactttcgaatttgtgttgagatccgcctttagcccaacttctgcgacacaacgcacttcagaaaatagcccattgtagcatccttctaccttggtaacctactcaaacctcctgtttgcaaacaccctttactcttcgcacatcatcaaacattgtttcgcggatcctgaaaagttccttggggtttgctctcgcctgtgttggaaacggtctggttacactcttgtgcgtggacgcgacgtgggaggctattcatgaccaacgcaaaacattcgcatacgtttgatgttcctcgacgattgcagtaaacgcgaacttcttttcgattcagtccgtgttggaggataaggatattctaagccaccgagcgtgccccaagtcgtacagtatattgtacggcgttttgttacagacaggttgctgcgcctcgatcatcacaccagaggacatttccgactcgcaagtttcgctccatttcacccttgtcaactgaccatggttgatgtgaattgatcgacgtacgatctcatcgtttcctcttgtcttttgacaataatcaaccccaaagagccttgctggctatagggtcatagaggcatattcgacgatgtcgctgcctcaaccgcctatagccctgacgggctgtagtgttattttcaataacacactctatgcttattcttcgactggttttcaatcacttgaattagacgcggggcaggaatggaagaagcaaaagctgagtggtgagccagtgaatgggggagtatgtgttggctcaacaccaaaggatacttcggcggcagggctgttcatcgtcggcggcacatcttcttcgtcagactataccggcctgcaaaagttcacatactctacaggcaagtgggaatccatcacgtcgacaggtagcgctacgaaagaccgagtataccacagcgctgtctatctgaacggcccagactccatcctcatatatgcgggttcaaccaatggtaaacccgacttatcacagcagcacttcttaatacaggcttcggaaccttatggtgttttatcatcgagctccgtcctggccccagcagctgtcgctcctctattactcccatggtcagatacagaggcagtcctgatcggtgggactacttccaatacagaagtgatgatttttgacacagcagataaatcgaattcaatggctgggtcgtggaggaattctggggtcaccttggcagaacctttatccaagaacacgaccttggtcaaaggcataatcgtgaacggcgatgataaaagcaaacatctgtacactttcgatctgacaacgtcaccaaacacagtcaatcgaactgtactactcgacggcaatggcaacccacttggccagtcggcgccagtacaaaacacagctataactcagcaagatcagacgagtacgaaagaaactgatattagtgagagagatgttaacgccaacgactggccagcatacaatgctacgcttgcgccaaagagcacgaggacggattattcgcttgcaacagatgaaaaagggttggtggtcatgtcgggagggagccaggatgatgttctgtgcatgttcaacgtttatgagaatagctggttaaatgccagccgtattctagaagccgacaccgccgacacgttgtcgatccaatcgtcaccaacgatgacatcctctacagtcacagcctcagccacttcgacctcgactgtttcaccgctatcaacaagtagtacagcaagcagcacggcgagcccgagctcggcgaccactgtgcctgctgctgctgcaccagttcaagctacgaaaaatgggttaccaccgacgactattctcggcatatcacttggttcaatcttcggcgccgcaataattctcgtcttaattcttttactcctccgaagacgacgccagagacgaagctttattgaggctggtcatgcccgtcgggccagtggcatacctgacactaaagatttcttgaacgacgacatggcaaagacctcgggtggatatttccgtggacatgggcaacaagagtcacaaaactctttttcttcaatggcaatgtttctcggcaagccccaaaagcctgttcttcaacgcaaaggcagcggtcaggaaaagaagcgtgtatcgaacgatgtaatgtgcagtcaagacttcaagaacacgataagccggccacaaccccaaccaactgctcagcactcgttcctcgagcggaacgagaagcctccttcaatgccagcatcgacgttgcccagacctcgcgcaccgccatcagaggcgcaagatggtgcactgcgaagaagctctgggtggaatcggtattggtctggagctagtacgccgcacattctcggtattggaagcaccaacgccaattctcgccgaaacaccgaagtctcgtctgacgaaagctcacgatactctgatatgcatcgtatgactcaagattcggctaccgtaccaccgctgaaagttgacgggcgaccctcatttcacagggtgaactcaggaagcccaactgtttctcaatacgacccgagaattagcgagggaatctctgggcatatcgaacgacctgtgtccccagtgtcatcttcgggctactcaagcggcattcctccaagcgtacacgaggcctgggatccaacggaacctaaaaagccatggggctctgatcgtgcaccgagcagcgcgtacagtcaaagcactatggatgagccagcgtaccaaactgcccttggtgcgccgactggaagccgacagccaacgggcatttcaagacaacctcagcttgctattgcaaagacgtcaactgacatgagctggctcaatctgggagatcaggagaggtccaataattactatgaccgctcataccgctaaccctgtcgactctgttcaccatcaaacttgatatcacacttcatacatccccaaccacagaaaacagctccttttctggggtcagactttactttcacatcatcacatcggcatcttgtcacatatattctgtactgcgctacgttgcattgcatccaaaaatggcgcctggacgtgttacttttttcttccgctgcacataatcataccttcatcgacgcaaggttcttacccaagtcctcgcgagcagctcgatgagccatatgtatatcgccgtgcttcatttgctttgcctttcagcattcactacattcttgtccggcggctggtggttatgcccccctattgttatagagtgcccggtgcccggtcacccacgtcattcgtttgtgataccaataccaaagacatccctttatacgagagcgacgaacgaatcgaactactacctggtgtaatgatgatttaggagacatggagagggatgaggcaggaaggctgtgaacgagggtgtcacgagaggaaaatgggaggagttggctctgtggaagacgactgaagacattgctggtcttaggctatatgaacgaagagagaaaataaaaccaaatcaaataaaagcttgcctgtcttaatgtgacatgaagtatatatcctagcggccttgattctcatcaatcaaggagagaatctctgtagataaacttcatcatttcaacatcaacatgtaacgcgttcgctcgc

SEQ ID NO: 1415 - DNA, 1932 bp, Muscodor strobelii
  misc_feature: SGI cDNA ID NO. 560073
  misc_feature: Reduced expression when VOC is produced
  misc_feature: Encodes the peptide sequence at SEQ ID NO 1416
atggcacccactggtcccaagaagggctctgccccaaatggtcgtggcccgcgcagcacatctaacaacacggctggtggcaaggcgagcacccgcagcggcgtttccaagcgtcggaatggccctcccgtcaaggccgatcgagatggcgacctcgacatggacgcctcgactaccgccaacggcacctccacaaagcgctccagaaaccacaccacatcttctggttcctcggctcggccctctgggcgacactccaaacccaccgcaaagacccagaaggcgatagagcgccacatcaacggcaactctcgatcgccgcccgtcacgctccaggtcgagggcctcaaagacagcaaggctgcctccaacgaaggcggcgggctgaaggagctactgaccttcctcgagcgaaaagcccagagcgtcggccacgtcacacgacccatcaggatcaagaagtcgcaaatcaagggcaaatttgtttacgtcacagctaccagggaagacgcagatgagattttaaagctcaacaacttcatgttcgccaatgccaatctgctcatcacagaggcaccagacggcgctaacagcgctttgtccgagactgctttggagctcaaagaaaaactccgtagcgttcttagtacccgctatgatcaacaagccaagctactaaacctgtctgcactcggcgaagaccccaacctcaatcagctgggagccttcagcggcgaggcaacgcccgaaaaactattcaagggtttaatggcagtctgcaatggactcttcgagactgcccaacacaagcgcgaagcggtcatcagtatcagtctcgcaggcaacaacgtcgatgatgtctctcaagtctttgctctcgccgacacgtttcccgacttgatcaacttggacctaagtcttaatcaattcaaagatctcaaaggtctgcaaaaatggaagctccggctgcgtaacttagagactcttctactcaatgacaaccccatcgagaccgctctgccaggctacaaaacagaattgaccacttggttccccaagctcatgaacctcagtggtacacaggtccggacgcccgaagagatagcagccgcagaggctgcgaccaaacccaatcctatcccacagtatggtgccgattttcgagacattaaccgtgtcggtgaagggttcatcaccgaattcatgcagctgtacgacatggaccgagatggattggcggcaaaatattacgacgaacagagctccttttctattgcagtcactaccgacgggcctcgtgcgccggatgtcccgaacctaccatggactgcctatatcaagttctcgcgtaatcacaccaggatcacgtataccgagcctcgacaacagcggctattcactggccctagccaggtacgaggtgtatggcaacagctaccgcgcacacagcacccgaatcttgcaacacaattcgacaagtacatcgtcgattgccacccaattcaaggattggcagatccatctggccagagtccacttggagtagatggaatgatcatgacaatccatggcgaattcgaagatcaacatcctgataccgggaagacagccaagcgaagcttcacccgcacttttctgctcggccctggtgcacccggtagaaatccgattcgtgtcgttagtgacatgctttctgtcagaccattcaatgtcctacccacaatcacaacaccgccagttgcacagacgacgaccaccggcgagccacagaaagagcaaatgctctcagaactctgcaaacaaacgggcatgaccgtcgaatactcgcgtttctgcctcgatcacgcgaactggaacttcgagcttgctttggccacattcaacgagaagaagggaacacttcccccggaggcattcgctccacagatataa

SEQ ID NO: 1416 - protein, 643 aa, Muscodor strobelii
  misc_feature: SGI Peptide ID NO. 560073
  misc_feature (592)..(640): Pfam Id: PF03943 Pfam Desc: TAP C-terminal domain
  misc_feature (11)..(640): NCBI GI: 256734514 Blast Desc: NECHADRAFT_98811 [Nectria haematococca mpVI 77-13-4]
  misc_feature (11)..(643): NCBI GI: 46107328 Blast Desc: FG00547.1 [Gibberella zeae PH-1]
  misc_feature (46)..(639): NCBI GI: 39944896 Blast Desc: MGG_04430 [Magnaporthe grisea 70-15] gi|145021549|gb|EDK05678.1| MGG_04430 [Magnaporthe grisea 70-15]
  misc_feature (15)..(639): NCBI GI: 154297542 Blast Desc: BC1G_12616 [Botryotinia fuckeliana B05.10] gi|150858439|gb|EDN33631.1| BC1G_12616 [Botryotinia fuckeliana B05.10]
  misc_feature (17)..(640): NCBI GI: 261357458 Blast Desc: mRNA export factor mex67 [Verticillium albo-atrum VaMs.102]
  misc_feature (15)..(639): NCBI GI: 156030891 Blast Desc: SS1G_14226 [Sclerotinia sclerotiorum 1980] gi|154700617|gb|EDO00356.1| SS1G_14226 [Sclerotinia sclerotiorum 1980]
  misc_feature (3)..(639): NCBI GI: 85111615 Blast Desc: NCU09317 [Neurospora crassa OR74A] gi|28925780|gb|EAA34785.1| [Neurospora crassa OR74A]
  misc_feature (15)..(643): NCBI GI: 67524559 Blast Desc: AN2737.2 [Aspergillus nidulans FGSC A4] gi|40743849|gb|EAA63035.1| AN2737.2 [Aspergillus nidulans FGSC A4] gi|259486350|tpe|CBF84117.1| TPA: mRNA export factor mex67
  misc_feature (16)..(639): NCBI GI: 171687941 Blast Desc: protein product [Podospora anserina] gi|170943932|emb|CAP69584.1| protein product [Podospora anserina]
  misc_feature (14)..(641): NCBI GI: 119496765 Blast Desc: mRNA export factor mex67 [Neosartorya fischeri NRRL 181] gi|119413318|gb|EAW23259.1| mRNA export factor mex67 [Neosartorya fischeri NRRL 181]
  misc_feature: Useful for introducing or modulating the production of volatile compounds
MAPTGPKKGSAPNGRGPRSTSNNTAGGKASTRSGVSKRRNGPPVKADRDGDLDMDASTTANGTSTKRSRNHTTSSGSSARPSGRHSKPTAKTQKAIERHINGNSRSPPVTLQVEGLKDSKAASNEGGGLKELLTFLERKAQSVGHVTRPIRIKKSQIKGKFVYVTATREDADEILKLNNFMFANANLLITEAPDGANSALSETALELKEKLRSVLSTRYDQQAKLLNLSALGEDPNLNQLGAFSGEATPEKLFKGLMAVCNGLFETAQHKREAVISISLAGNNVDDVSQVFALADTFPDLINLDLSLNQFKDLKGLQKWKLRLRNLETLLLNDNPIETALPGYKTELTTWFPKLMNLSGTQVRTPEEIAAAEAATKPNPIPQYGADFRDINRVGEGFITEFMQLYDMDRDGLAAKYYDEQSSFSIAVTTDGPRAPDVPNLPWTAYIKFSRNHTRITYTEPRQQRLFTGPSQVRGVWQQLPRTQHPNLATQFDKYIVDCHPIQGLADPSGQSPLGVDGMIMTIHGEFEDQHPDTGKTAKRSFTRTFLLGPGAPGRNPIRVVSDMLSVRPFNVLPTITTPPVAQTTTTGEPQKEQMLSELCKQTGMTVEYSRFCLDHANWNFELALATFNEKKGTLPPEAFAPQI

SEQ ID NO: 1417 - DNA, 2823 bp, Muscodor strobelii
  misc_feature: SGI EST ID NO. CUFF.3897.2
  misc_feature: Variant of the nucleotide sequence at SEQ ID NO 1415
gggaagggcgccctgcacgcttgcaatccatcttcacctgcagccttttgttcgacgtcacttttctttctcccgcaaaacccttatccttctcgcccatcctttcaccttcaccaacaacacctgcgcccacggttcaccacctccagtgtccggtgcagctcacctcattctgcagtccgcgcctgcctcgtcagaggccatttccattctttccacaccatcgacattgcaagcattcggctgtcaccatcatttcccccccagcgcgccgacctactccatcccggcgaagggtcgcttgacctgcgacaccaccgctcactccttcttgccgcttctaacctgtcccgtcgctcgactatcatcacttgcccgcgcctcaaactaccaaggcgacagctgcaccgcactctttatcatccatctccgctgccgcaatggcacccactggtcccaagaagggctctgccccaaatggtcgtggcccgcgcagcacatctaacaacacggctggtggcaaggcgagcacccgcagcggcgtttccaagcgtcggaatggccctcccgtcaaggccgatcgagatggcgacctcgacatggacgcctcgactaccgccaacggcacctccacaaagcgctccagaaaccacaccacatcttctggttcctcggctcggccctctgggcgacactccaaacccaccgcaaagacccagaaggcgatagagcgccacatcaacggcaactctcgatcgccgcccgtcacgctccaggtcgagggcctcaaagacagcaaggctgcctccaacgaaggcggcgggctgaaggagctactgaccttcctcgagcgaaaagcccagagcgtcggccacgtcacacgacccatcaggatcaagaagtcgcaaatcaagggcaaatttgtttacgtcacagctaccagggaagacgcagatgagattttaaagctcaacaacttcatgttcgccaatgccaatctgctcatcacagaggcaccagacggcgctaacagcgctttgtccgagactgctttggagctcaaagaaaaactccgtagcgttcttagtacccgctatgatcaacaagccaagctactaaacctgtctgcactcggcgaagaccccaacctcaatcagctgggagccttcagcggcgaggcaacgcccgaaaaactattcaagggtttaatggcagtctgcaatggactcttcgagactgcccaacacaagcgcgaagcggtcatcagtatcagtctcgcaggcaacaacgtcgatgatgtctctcaagtctttgctctcgccgacacgtttcccgacttgatcaacttggacctaagtcttaatcaattcaaagatctcaaaggtctgcaaaaatggaagctccggctgcgtaacttagagactcttctactcaatgacaaccccatcgagaccgctctgccaggctacaaaacagaattgaccacttggttccccaagctcatgaacctcagtggtacacaggtccggacgcccgaagagatagcagccgcagaggctgcgaccaaacccaatcctatcccacagtatggtgccgattttcgagacattaaccgtgtcggtgaagggttcatcaccgaattcatgcagctgtacgacatggaccgagatggattggcggcaaaatattacgacgaacagagctccttttctattgcagtcactaccgacgggcctcgtgcgccggatgtcccgaacctaccatggactgcctatatcaagttctcgcgtaatcacaccaggatcacgtataccgagcctcgacaacagcggctattcactggccctagccaggtacgaggtgtatggcaacagctaccgcgcacacagcacccgaatcttgcaacacaattcgacaagtacatcgtcgattgccacccaattcaaggattggcagatccatctggccagagtccacttggagtagatggaatgatcatgacaatccatggcgaattcgaagatcaacatcctgataccgggaagacagccaagcgaagcttcacccgcacttttctgctcggccctggtgcacccggtagaaatccgattcgtgtcgttagtgacatgctttctgtcagaccattcaatgtcctacccacaatcacaacaccgccagttgcacagacgacgaccaccggcgagccacagaaagagcaaatgctctcagaactctgcaaacaaacgggcatgaccgtcgaatactcgcgtttctgcctcgatcacgcgaactggaacttcgagcttgctttggccacattcaacgagaagaagggaacacttcccccggaggcattcgctccacagatataacgactgagtcatatgaggcgaggaatgatcagatttatggccgcaattgtttcttctcgcataggttgcggagtatggcggcggtgcaatgggtttttacaagcgattttgtttttgggactccgataaaaaggcatacaatgtgtgcataagtgtatacaacatgatacatatgggcatgcgcaatggatgaaaggtccaaggtggccggaaatgcgcaaagcccacgggcatgaagaaatgcgatatttgaaggaaaggggtactgaaagtgtttgcgacttcgcaatcaagatgggccctttttcagaagagcttccctcgatagtggcaatgagttcatactacgccttcatcaaactcttcagtaagattgcgagaatactagtagtgtttgtcagtactgtaactagatcaattgaatcgatcgccacaacttggatgagtcgct

SEQ ID NO: 1418 - DNA, 1920 bp, Muscodor strobelii
  misc_feature: SGI cDNA ID NO. 560074
  misc_feature: Reduced expression when VOC is produced
  misc_feature: Encodes the peptide sequence at SEQ ID NO 1419
atggcacccactggtcccaagaagggctctgccccaaatggtcgtggcccgcgcagcacatctaacaacacggctggtggcaaggcgagcacccgcagcggcgtttccaagcgtcggaatggccctcccgtcaaggccgatcgagatggcgacctcgacatggacgcctcgactaccgccaacggcacctccacaaagcgctccagaaaccacaccacatcttctggttcctcggctcggccctctgggcgacactccaaacccaccgcaaagacccagaaggcgatagagcgccacatcaacggcaactctcgatcgccgcccgtcacgctccaggtcgagggcctcaaagacagcaaggctgcctccaacgaaggcggcgggctgaaggagctactgaccttcctcgagcgaaaagcccagagcgtcggccacgtcacacgacccatcaggatcaagaagtcgcaaatcaagggcaaatttgtttacgtcacagctaccagggaagacgcagatgagattttaaagctcaacaacttcatgttcgccaatgccaatctgctcatcacagaggcaccagacggcgctaacagcgctttgtccgagactgctttggagctcaaagaaaaactccgtagcgttcttagtacccgctatgatcaacaagccaagctactaaacctgtctgcactcggcgaagaccccaacctcaatcagctgggagccttcagcggcgaggcaacgcccgaaaaactattcaagggtttaatggcagtctgcaatggactcttcgagactgcccaacacaagcgcgaagcggtcatcagtatcagtctcgcaggcaacaacgtcgatgatgtctctcaagtctttgctctcgccgacacgtttcccgacttgatcaacttggacctaagtcttaatcaattcaaagatctcaaaggtctgcaaaaatggaagctccggctgcgtaacttagagactcttctactcaatgacaaccccatcgagaccgctctgccaggctacaaaacagaattgaccacttggttccccaagctcatgaacctcagtggtacacaggtccggacgcccgaagagatagcagccgcagaggctgcgaccaaacccaatcctatcccacagtatggtgccgattttcgagacattaaccgtgtcggtgaagggttcatcaccgaattcatgcagctgtacgacatggaccgagatggattggcggcaaaatattacgacgaacagagctccttttctattgcagtcactaccgacgggcctcgtgcgccggatgtcccgaacctaccatggactgcctatatcaagttctcgcgtaatcacaccaggatcacgtataccgagcctcgacaacagcggctattcactggccctagccaggtacgaggtgtatggcaacagctaccgcgcacacagcacccgaatcttgcaacacaattcgacaagtacatcgtcgattgccacccaattcaaggattggcagatccatctggccagagtccacttggagtagatggaatgatcatgacaatccatggcgaattcgaagatcaacatcctgataccgggaagacagccaagcgaagcttcacccgcacttttctgctcggccctggtgcacccggtagaaatccgattcgtgtcgttagtgacatgctttctgtcagaccattcaatgtcctacccacaatcacaacaccgccagttgcacagacgacgaccaccggcgagccacagaaagagcaaatgctctcagaactctgcaaacaaacgggcatgaccgtcgaatactcgcgtttctgcctcgatcacgcgaactggaacttcgagcttgctttggccacattcaacgagaagaaggtacgcatcgaatgtttcttcagctaa

SEQ ID NO: 1419 - protein, 639 aa, Muscodor strobelii
  misc_feature: SGI Peptide ID NO. 560074
  misc_feature (592)..(639): Pfam Id: PF03943 Pfam Desc: TAP C-terminal domain
  misc_feature (11)..(634): NCBI GI: 256734514 Blast Desc: NECHADRAFT_98811 [Nectria haematococca mpVI 77-13-4]
  misc_feature (46)..(639): NCBI GI: 39944896 Blast Desc: MGG_04430 [Magnaporthe grisea 70-15] gi|145021549|gb|EDK05678.1| MGG_04430 [Magnaporthe grisea 70-15]
  misc_feature (11)..(634): NCBI GI: 46107328 Blast Desc: FG00547.1 [Gibberella zeae PH-1]
  misc_feature (15)..(634): NCBI GI: 154297542 Blast Desc: BC1G_12616 [Botryotinia fuckeliana B05.10] gi|150858439|gb|EDN33631.1| BC1G_12616 [Botryotinia fuckeliana B05.10]
  misc_feature (17)..(634): NCBI GI: 261357458 Blast Desc: mRNA export factor mex67 [Verticillium albo-atrum VaMs.102]
  misc_feature (15)..(627): NCBI GI: 156030891 Blast Desc: SS1G_14226 [Sclerotinia sclerotiorum 1980] gi|154700617|gb|EDO00356.1| SS1G_14226 [Sclerotinia sclerotiorum 1980]
  misc_feature (3)..(634): NCBI GI: 85111615 Blast Desc: NCU09317 [Neurospora crassa OR74A] gi|28925780|gb|EAA34785.1| [Neurospora crassa OR74A]
  misc_feature (15)..(633): NCBI GI: 67524559 Blast Desc: AN2737.2 [Aspergillus nidulans FGSC A4] gi|40743849|gb|EAA63035.1| AN2737.2 [Aspergillus nidulans FGSC A4] gi|259486350|tpe|CBF84117.1| TPA: mRNA export factor mex67
  misc_feature (16)..(634): NCBI GI: 171687941 Blast Desc: protein product [Podospora anserina] gi|170943932|emb|CAP69584.1| protein product [Podospora anserina]
  misc_feature (32)..(631): NCBI GI: 238843538 Blast Desc: mRNA export factor mex67 [Microsporum canis CBS 113480]
  misc_feature: Useful for introducing or modulating the production of volatile compounds
MAPTGPKKGSAPNGRGPRSTSNNTAGGKASTRSGVSKRRNGPPVKADRDGDLDMDASTTANGTSTKRSRNHTTSSGSSARPSGRHSKPTAKTQKAIERHINGNSRSPPVTLQVEGLKDSKAASNEGGGLKELLTFLERKAQSVGHVTRPIRIKKSQIKGKFVYVTATREDADEILKLNNFMFANANLLITEAPDGANSALSETALELKEKLRSVLSTRYDQQAKLLNLSALGEDPNLNQLGAFSGEATPEKLFKGLMAVCNGLFETAQHKREAVISISLAGNNVDDVSQVFALADTFPDLINLDLSLNQFKDLKGLQKWKLRLRNLETLLLNDNPIETALPGYKTELTTWFPKLMNLSGTQVRTPEEIAAAEAATKPNPIPQYGADFRDINRVGEGFITEFMQLYDMDRDGLAAKYYDEQSSFSIAVTTDGPRAPDVPNLPWTAYIKFSRNHTRITYTEPRQQRLFTGPSQVRGVWQQLPRTQHPNLATQFDKYIVDCHPIQGLADPSGQSPLGVDGMIMTIHGEFEDQHPDTGKTAKRSFTRTFLLGPGAPGRNPIRVVSDMLSVRPFNVLPTITTPPVAQTTTTGEPQKEQMLSELCKQTGMTVEYSRFCLDHANWNFELALATFNEKKVRIECFFS

SEQ ID NO: 1420 - DNA, 2823 bp, Muscodor strobelii; identical to SEQ ID NO: 1417
  misc_feature: SGI EST ID NO. CUFF.3897.2
  misc_feature: Variant of the nucleotide sequence at SEQ ID NO 1418

SEQ ID NO: 1421 - DNA, 3420 bp, Muscodor strobelii
  misc_feature: SGI cDNA ID NO. 560075
  misc_feature: Encodes the peptide sequence at SEQ ID NO 1422
atggattccgatgagtttgaaggcgacgacatcgccaatgacgactttgtcgtggccgccactgttcaatctcgtacttcaaacttgactgtgtccaatgactctgtacctagacgtccaagcgctctgcaacaaacaagctcgttcaatacaactgagtctacgaatggttcggcaagatttgctgcagagctaaaaaatcaatctcgtccgtctgcttttcggccctcgcccccaattggcagccaggccatctcttacagacaaacgactctcttcggtcaaacggtccagacagaccaagggtcagtagctagtcagtctactggaaatcgtgtcttccgcgtggacaaagcccctgagccacctactcatcatgaactggattcggaggcattgaaaacatgggtctatcctacaaatcttggtccgagtcgtgactatcaatacagcatcgtcaagaatggacttttcaataatactcttgtagccctacccactggattaggcaagactttcatcgccgctacaatcatgttgaactacttccgttggatgaaaactgccaagcttattttcgtggcgccaacaaaacctcttgtatctcaacaaatcgatgcgtgtttctacatcgccggcattccgcggtcccagacaactctcctgactggtgaggttgccccagcaaaacgagctgaagagtgggggacaaaacgggttttctttatgaccccacagaccttggaaaatgatctgtctgctggatatgccgatccaaaggctattgggctccttgttgtagacgaggctcatcgtgccacgggaaactactcctatgtgaaagtcgtatcgtttatacgccgcttctcccaaagcttccgcttgctcgctttgaccgccaccccgggttcttcggtggaagcagttcaagaagtcattgacggactgaaaatttcatgcgtagaagtccgaacagaagtttcaatcgatatcaaaccctacattcaccaaagaaatgaggagatcatcgtgttagacccatcagatgagatgcaacacgtaatggagttattctcaaaagccttgcagcccatcgttgataagctccgtcaacaaaacacctactatcgcagtgatccaatgtctctcaccaccttcggcttaatgaaagcgaagaaggactggatggctcgagctggcagcaacgccaatcaagggctcaaatctatgatgaacgccatatttgcaattctcatgagccttgctcacactattcagctgcttaaattccatggaatcaaaccgttctttgataatctggtggagtttcgagccgaagttgagagcaagggacagaaggggtcaaaatacaaacgacagattgtcgaagacaagagtttccaggacatgatgacaaagatagatcgatggctcaaacgcgacgaatttgttggccatccgaagcttacctacctctcggatactattctcaaccatttcatggacgcaggcgaagggcgcgatggcaatgcttcatctaatacgcgaatcatcgtcttcagtaaataccggagtagtgccgaagagatcgtcagagttttgaacactcataagcctctcgttcgagccgcagtattcgtcggccaggcagattcgaaaagatctgcaggtatgtcgcaagctgagcaaattcaaagaatacaaaaatttaaagagggtgaattcaatgttcttgtcgcgacatccattggagaggaaggtctagatattggtcaggtagatttaatcatctgcaacgacgcatccgcttcacccattcaaacattgcaaagaatgggacgaacagggagaaaacgagctggacgagttgtcttgcttctcatgcgaggaaaagagcaagatgatttcgaaaaatcgaaagacaactacgacaagatgcagcaaatgatatgcgaaggaagtcgggttgaatttcaccatgacctctcgatgaggatcgtacccagagacatccgaccagaagtagacatgagagccgttgaaattccattggagaatacacagcactccggcttaccggagcccagtaaaaacaaaaggacacagaagaaaaagccaccgaaaaaattccacatgcccgatagcgtcgagacagggtttcagaccgtggcggccatgatgggccaaacaacaaagcccaagaaaaatgcacaagcgagagtttcaaaagaacacgatgaagttgcaaatattccgagcttgaatcgtgtcctcctcagtaagcagcaggctcgtcacttcaaggaaacctaccaaaagctctcttatcagcgaaagattggaacagaagatcttgacctagaagatatctcacctatagacttgacagctcatcccacggcgcagaggaaacgacgaaaaaccgtcagtgtgaaacatggagcgtatacaaaacgcataatcaagatgtaccaatctatcgcaaaattggaccccaatgcagacacacccagtcatgaaactctcggcagttatcatcaattgccattgccaccggctggatctgattccgacgatggtcctgtcaatgcagtgccgcgtcgccatcaagaaggaacgagagacgaaatcgatgacgatggcgatgacgatgacgatgacgacgagcttgaggagctctctactgccattgcacgtgcgcaacgtcaaaagctaaagctgagcactaagtctcatcgccaaatctctacaccgaccggagttgatgctgccacagaagcagaactaccgaaatatcctcctcggcggaccgtggggcccaacctagcttcaaagcggaaagctccggtaccgaagaagacaaaggcaaaaccaggccgtgggagtactaagaaagctccaagaggtggtgcctatgatgagagcgcagatgaaggagatgattgtcggcgcaccagcgatcttgagctgacagaggactctgacagtggtgcagaccttgatggattcgtagtgggcgacgacgttgcaacatccagtaacttcgtgacctcgagcatccagaggcgatcgacatcgccgacatcccctatatcagtatcgtcaccaacatccacgatagccagcctcgctgcaaaagccaaatcccgagatcaacgccggtccggcgagctcagctcatccatatccatagataacagcgagggttataacgaaagcgaagacgacatgccccctatgagccaggtcgtgagatctaaagaacggtctgcaatggttggctcgaagaagcacgcaaggctagagatcgaagacgacgaggaagaagaatatgatgatagcgactctgtccggcaagggcaccgaccacagaagcgtaggaggaattttgttgtcgatgacgaggatagtgatgagtga

SEQ ID NO: 1422 - protein, 1139 aa, Muscodor strobelii
  misc_feature: SGI Peptide ID NO. 560075
  misc_feature (146)..(309): Pfam Id: PF00270 Pfam Desc: DEAD/DEAH box helicase
  misc_feature (536)..(619): Pfam Id: PF00271 Pfam Desc: Helicase conserved C-terminal domain
  misc_feature (142)..(304): Pfam Id: PF04851 Pfam Desc: Type III restriction enzyme, res subunit
  misc_feature (556)..(619): Pfam Id: PF00271 Pfam Desc: Helicase conserved C-terminal domain
  misc_feature (88)..(830): NCBI GI: 226279022 Blast Desc: helicase C-terminal domain-containing protein [Paracoccidioides brasiliensis Pb01]
  misc_feature (88)..(830): NCBI GI: 226287424 Blast Desc: helicase C-terminal domain-containing protein [Paracoccidioides brasiliensis Pb18]
  misc_feature (88)..(830): NCBI GI: 225677838 Blast Desc: conserved [Paracoccidioides brasiliensis Pb03]
  misc_feature (85)..(731): NCBI GI: 115387249 Blast Desc: conserved [Aspergillus terreus NIH2624] gi|114195214|gb|EAU36914.1| conserved [Aspergillus terreus NIH2624]
  misc_feature (79)..(827): NCBI GI: 242804208 Blast Desc: DEAD box helicase Mph1, [Talaromyces stipitatus ATCC 10500] gi|218717673|gb|EED17094.1| DEAD box helicase Mph1, [Talaromyces stipitatus ATCC 10500]
  misc_feature (88)..(829): NCBI GI: 154323886 Blast Desc: BC1G_00342 [Botryotinia fuckeliana B05.10] gi|150842571|gb|EDN17764.1| BC1G_00342 [Botryotinia fuckeliana B05.10]
  misc_feature (14)..(835): NCBI GI: 255951308 Blast Desc: Pc22g25350 [Penicillium chrysogenum Wisconsin 54-1255] gi|211593438|emb|CAP99823.1| Pc22g25350 [Penicillium chrysogenum Wisconsin 54-1255]
  misc_feature (88)..(612): NCBI GI: 189203315 Blast Desc: helicase C-terminal domain containing protein [Pyrenophora tritici-repentis Pt-1C-BFP] gi|187985092|gb|EDU50580.1| helicase C-terminal domain containing
  misc_feature (189)..(830): NCBI GI: 154280200 Blast Desc: [Ajellomyces capsulatus NAm1] gi|150412856|gb|EDN08243.1| [Ajellomyces capsulatus NAm1]
  misc_feature (86)..(1138): NCBI GI: 256735229 Blast Desc: NECHADRAFT_31148 [Nectria haematococca mpVI 77-13-4]
MDSDEFEGDDIANDDFVVAATVQSRTSNLTVSNDSVPRRPSALQQTSSFNTTESTNGSARFAAELKNQSRPSAFRPSPPIGSQAISYRQTTLFGQTVQTDQGSVASQSTGNRVFRVDKAPEPPTHHELDSEALKTWVYPTNLGPSRDYQYSIVKNGLFNNTLVALPTGLGKTFIAATIMLNYFRWMKTAKLIFVAPTKPLVSQQIDACFYIAGIPRSQTTLLTGEVAPAKRAEEWGTKRVFFMTPQTLENDLSAGYADPKAIGLLVVDEAHRATGNYSYVKVVSFIRRFSQSFRLLALTATPGSSVEAVQEVIDGLKISCVEVRTEVSIDIKPYIHQRNEEIIVLDPSDEMQHVMELFSKALQPIVDKLRQQNTYYRSDPMSLTTFGLMKAKKDWMARAGSNANQGLKSMMNAIFAILMSLAHTIQLLKFHGIKPFFDNLVEFRAEVESKGQKGSKYKRQIVEDKSFQDMMTKIDRWLKRDEFVGHPKLTYLSDTILNHFMDAGEGRDGNASSNTRIIVFSKYRSSAEEIVRVLNTHKPLVRAAVFVGQADSKRSAGMSQAEQIQRIQKFKEGEFNVLVATSIGEEGLDIGQVDLIICNDASASPIQTLQRMGRTGRKRAGRVVLLLMRGKEQDDFEKSKDNYDKMQQMICEGSRVEFHHDLSMRIVPRDIRPEVDMRAVEIPLENTQHSGLPEPSKNKRTQKKKPPKKFHMPDSVETGFQTVAAMMGQTTKPKKNAQARVSKEHDEVANIPSLNRVLLSKQQARHFKETYQKLSYQRKIGTEDLDLEDISPIDLTAHPTAQRKRRKTVSVKHGAYTKRIIKMYQSIAKLDPNADTPSHETLGSYHQLPLPPAGSDSDDGPVNAVPRRHQEGTRDEIDDDGDDDDDDDELEELSTAIARAQRQKLKLSTKSHRQISTPTGVDAATEAELPKYPPRRTVGPNLASKRKAPVPKKTKAKPGRGSTKKAPRGGAYDESADEGDDCRRTSDLELTEDSDSGADLDGFVVGDDVATSSNFVTSSIQRRSTSPTSPISVSSPTSTIASLAAKAKSRDQRRSGELSSSISIDNSEGYNESEDDMPPMSQVVRSKERSAMVGSKKHARLEIEDDEEEEYDDSDSVRQGHRPQKRRRNFVVDDEDSDE

SEQ ID NO: 1423 - DNA, 2043 bp, Muscodor strobelii
  misc_feature: SGI EST ID NO. CUFF.3803.0
  misc_feature: Variant of the nucleotide sequence at SEQ ID NO 1421
ttatcacaacgtcttagaaaggatttacccgaaggcttgtgcgatatcatttagaacccgaataataatgtcttcgtcatcgtcttctttgcatcagcaaatcttcgaagctatctggtgtcgacatgtctcggtgaccttgtactgtagatagatcacgtgctcacgcgacttccgcgctgctaacctgcacctccatggaggagtgctctctatcaacacggctctagtagcaagcactaaacgcgtccctcacctgcgccactctgtaccaaacccgatgatttcatatatcgcattatctgctttttctcccatgtcaaatctggcaagcctgacatattagaacttcccttttcactctcgttaccatgtaaattccctaccaactgtctccgatggattccgatgagtttgaaggcgacgacatcgccaatgacgactttgtcgtggccgccactgttcaatctcgtacttcaaacttgactgtgtccaatgactctgtacctagacgtccaagcgctctgcaacaaacaagctcgttcaatacaactgagtctacgaatggttcggcaagatttgctgcagagctaaaaaatcaatctcgtccgtctgcttttcggccctcgcccccaattggcagccaggccatctcttacagacaaacgactctcttcggtcaaacggtccagacagaccaagggtcagtagctagtcagtctactggaaatcgtgtcttccgcgtggacaaagcccctgagccacctactcatcatgaactggattcggaggcattgaaaacatgggtctatcctacaaatcttggtccgagtcgtgactatcaatacagcatcgtcaagaatggacttttcaataatactcttgtagccctacccactggattaggcaagactttcatcgccgctacaatcatgttgaactacttccgttggatgaaaactgccaagcttattttcgtggcgccaacaaaacctcttgtatctcaacaaatcgatgcgtgtttctacatcgccggcattccgcggtcccagacaactctcctgactggtgaggttgccccagcaaaacgagctgaagagtgggggacaaaacgggttttctttatgaccccacagaccttggaaaatgatctgtctgctggatatgccgatccaaaggctattgggctccttgttgtagacgaggctcatcgtgccacgggaaactactcctatgtgaaagtcgtatcgtttatacgccgcttctcccaaagcttccgcttgctcgctttgaccgccaccccgggttcttcggtggaagcagttcaagaagtcattgacggactgaaaatttcatgcgtagaagtccgaacagaagtttcaatcgatatcaaaccctacattcaccaaagaaatgaggagatcatcgtgttagacccatcagatgagatgcaacacgtaatggagttattctcaaaagccttgcagcccatcgttgataagctccgtcaacaaaacacctactatcgcagtgatccaatgtctctcaccaccttcggcttaatgaaagcgaagaaggactggatggctcgagctggcagcaacgccaatcaagggctcaaatctatgatgaacgccatatttgcaattctcatgagccttgctcacactattcagctgcttaaattccatggaatcaaaccgttctttgataatctggtggagtttcgagccgaagttgagagcaagggacagaaggggtcaaaatacaaacgacagattgtcgaagacaagagtttccaggacatgatgacaaagatagatcgatggctcaaacgcgacgaatttgttggccatccgaagcttacctacctctcggatactattctcaaccatttcatggacgcaggcgaagggcgcgatggcaatgcttcatctaatacgcgaatcatcgtcttcagtaaataccggagtagtgccgaagagatcgtcagagttttgaacactcataagcctctcgttcgagccgcagtattcgtcggcc

SEQ ID NO: 1424 - DNA, 678 bp, Muscodor strobelii
  misc_feature: SGI cDNA ID NO. 560076
  misc_feature: Encodes the peptide sequence at SEQ ID NO 1425
atggcgtctgccctggagagcgtcaaggccgccatcgagcgcatactcctcgacccagcctaccacgacctcctagcgatcgtcaaaggcgcccgcaatggcgcagtctacggcgccaaagtgcgcttcccgcacgccctcgtcatggtcttcctgttccgctttgggtcctttcggcagaagctcgagctcatcttcaaggcgacccgcacccatgcccgcaacctcgcaaaattcgccactatctacaagaccacgtgttacatactgaagcattacggcgcgacgcccggaaaggagggtaattacgacacgttcctcgcgggcttgataggagggtatttcgtctttggaggacggtcgccgcgcacgggaaagatatcgagcgtcaatcagcagatcgtcgtttacgtcttcgcgcgtgtcgtccttgcgctggctcgtctggctgtgaaacctggttacgggttccccgttgtgtcgcaggacgctcgctcggcgagtattagtcattacgcctggcctgtcttcgctgcggcttcttggggcatggtcatgcatctcttccgctaccaccccgacgatttacagcccagtttgcgttccagtatgaactatatatacctgcagtccaatgattgggacagcttgaggaatttcgcatggcataacaaatag

SEQ ID NO: 1425 - protein, 225 aa, Muscodor strobelii
  misc_feature: SGI Peptide ID NO. 560076
  misc_feature (2)..(225): NCBI GI: 171684319 Blast Desc: protein product [Podospora anserina] gi|170942120|emb|CAP67772.1| protein product [Podospora anserina]
  misc_feature (2)..(225): NCBI GI: 164428633 Blast Desc: NCU00828 [Neurospora crassa OR74A] gi|157072223|gb|EAA35135.2| NCU00828 [Neurospora crassa OR74A]
  misc_feature (1)..(225): NCBI GI: 256735192 Blast Desc: [Nectria haematococca mpVI 77-13-4]
  misc_feature (1)..(225): NCBI GI: 46107478 Blast Desc: FG00622.1 [Gibberella zeae PH-1]
  misc_feature (5)..(225): NCBI GI: 169602555 Blast Desc: SNOG_04281 [Phaeosphaeria nodorum SN15] gi|160706197|gb|EAT88041.2| SNOG_04281 [Phaeosphaeria nodorum SN15]
  misc_feature (5)..(225): NCBI GI: 189203963 Blast Desc: peroxisomal membrane protein 4 [Pyrenophora tritici-repentis Pt-1C-BFP] gi|187985416|gb|EDU50904.1| peroxisomal membrane protein 4 [Pyrenophora tritici-repentis
  misc_feature (5)..(225): NCBI GI: 261198004 Blast Desc: peroxisomal membrane protein [Ajellomyces dermatitidis SLH14081] gi|239595367|gb|EEQ77948.1| peroxisomal membrane protein [Ajellomyces dermatitidis SLH14081] peroxisomal membrane
  misc_feature (5)..(225): NCBI GI: 119484248 Blast Desc: peroxisomal membrane protein (PmpP24), [Neosartorya fischeri NRRL 181] gi|119410183|gb|EAW20130.1| peroxisomal membrane protein (PmpP24), [Neosartorya fischeri NRRL 181]
  misc_feature (8)..(203): NCBI GI: 154295023 Blast Desc: BC1G_13640 [Botryotinia fuckeliana B05.10] gi|150844416|gb|EDN19609.1| BC1G_13640 [Botryotinia fuckeliana B05.10]
  misc_feature (5)..(225): NCBI GI: 145253178 Blast Desc: An16g08040 [Aspergillus niger] gi|134083661|emb|CAK47053.1| protein product [Aspergillus niger]
MASALESVKAAIERILLDPAYHDLLAIVKGARNGAVYGAKVRFPHALVMVFLFRFGSFRQKLELIFKATRTHARNLAKFATIYKTTCYILKHYGATPGKEGNYDTFLAGLIGGYFVFGGRSPRTGKISSVNQQIVVYVFARVVLALARLAVKPGYGFPVVSQDARSASISHYAWPVFAAASWGMVMHLFRYHPDDLQPSLRSSMNYIYLQSNDWDSLRNFAWHNK

SEQ ID NO: 1426 - DNA, 2987 bp, Muscodor strobelii
  misc_feature: SGI EST ID NO. CUFF.3930.0
  misc_feature: Variant of the nucleotide sequence at SEQ ID NO 1424
gcggggctcaggtcatggctccccatacctctaaactggagatggctgtttaagccgagccaaagctcagtgctcacatgctccaaattccacaagccgagcgccgccatggaacctccaccactatggctgattcactgacttgctgttcacactctctcccttctttccattctctattctcctcgagtgcgccaatttagtgcccttagacaatctgttttctagatgatccggtaacgatagttcgtcttcattcctgtccctgcgaacggaaagcgaccggtctgcttgcgccgttgcccagaatagccgaggcaccatggcgtctgccctggagagcgtcaaggccgccatcgagcgcatactcctcgacccagcctaccacgacctcctagcgatcgtcaaaggcgcccgcaatggcgcagtctacggcgccaaagtgcgcttcccgcacgccctcgtcatggtcttcctgttccgctttgggtcctttcggcagaagctcgagctcatcttcaaggcgacccgcacccatgcccgcaacctcgcaaaattcgccactatctacaagaccacgtgttacatactgaagcattacggcgcgacgcccggaaaggagggtaattacgacacgttcctcgcgggcttgataggagggtatttcgtctttggaggacggtcgccgcgcacgggaaagatatcgagcgtcaatcagcagatcgtcgtttacgtcttcgcgcgtgtcgtccttgcgctggctcgtctggctgtgaaacctggttacgggttccccgttgtgtcgcaggacgctcgctcggcgagtattagtcattacgcctggcctgtcttcgctgcggcttcttggggcatggtcatgcatctcttccgctaccaccccgacgatttacagcccagtttgcgttccagtatgaactatatatacctgcagtccaatgattgggacagcttgaggaatttcgcatggcataacaaatagatggtggcgttgggagatttgcaagtgatggtcgagggactgaggatgatggcatatgcccgctggggcccattttcattgtggaacatggcgtttgttgtgcattgtgtgcattgtattttgtttcttgcatacttgagatgaccatcaccttatgtgaaggtggcccgcggcattccatgcacgcatgcatttacgagatagaggaccgcaaaagagctgggagcaagatgagaaacatatctctagctgtttccatagggtatatactgtaacatttttatatatctatcttcaaccattctagcctttttacacgtgcttacaagtgcttccatccattcgcccacatgatctgcatctcgttgatcacacacacggcaccaggctcataccgtagccgctctccagccggcgtctcgctcctccactgctctagtcttttcgcgacaactctggtctccagctgggcttgtatggcggctcgtccgctcacgatccggtttgtccacgcccctattattgtccaaagcggtcctgggaagcgattccgtcggatcttggagtaggcgtcgaccgtgtatcctacgcggacgtttgggttcagccatacgcctttattgacggagaggtagttgtctgcgtggatgagacagcattcggagccctcgagatgaagatctgcgagagtgtcgtcgatgcctcggaatttgaggggcgggtcggcgtagaaggggtcggagtcgaatacgacgattccgttccagcatgaactcacgcgaatcggcgcgtttttctcggctgccgctttggatgtgggggattggaaccagggccagtgtagcgacattgtcttgagacccatgtcgtctcgcagagcaaaggtgtcgtagtagcggggtgacgacttgtagtccattgaacatgcggcggcgtatttaccaccccgcgtgttgaacagtgttgcaatatcttctgtctgcattattgttagcttctggcccgtattagcttgtgtatggcaaacggaatcccgtacatcgaaaacaacatcattgatccacagcactttgtcaaatgtcctaccctcggccgcgagcctttctaatggttccatcgcctgattgcgtacccgggagaggtatggtatccgtctcatctcgaattggctttctgctttgttccagatccagccgggctcccggacagccggccgagtctcaatctcttccaattgctcccataccgtcaatcctagactgattttgttcggaacgcctttcccgtccaaggacctttgaagatcgaggagagcggtcttggagtcgtcctgcgatccagattcgactgccgagaagaacacattctcaggtccaagatagtctatgagattcaagactgcatcgttccacgccgtcgtcaagatgacctcggtatttcggtgtacggaggcgatgaagacggtcgtgttgacgggtgtgccatcagcggatcgtcgttgtaagtgtaattcgtccggatgcgttcggtatgtggcgggccggtgacgcacgagacgccaggcatcgatgagaaagacgaagaacaggaagaggaggataggccgcaggtagctgcgccggaagcggcggtagctgaggagcatcgagacggaagacagtaaagaaaaaagaagaaaaggaaataagttacgaaagagaaaaaggataaggctatgtcatgatagatgtcgagctcaggtctgctctacgatggaacagcgtatgaggaccatgggaagagctgggcagatagaaccaagatgtcaagtgttggacagacgaactaaaatcatggatggatagatcacaggcacaagtaaaaagaagtagctttgagcaagttaggcacaagatttgtagacatggtgagaccaagacaccgactcgtaataagctgaacgtaaagctcccttggcgacttggctcagatgtctgtcgcttttttc

SEQ ID NO: 1427 - DNA, 1263 bp, Muscodor strobelii
  misc_feature: SGI cDNA ID NO. 560077
  misc_feature: Reduced expression when VOC is produced
  misc_feature: Encodes the peptide sequence at SEQ ID NO 1428
atgctcctcagctaccgccgcttccggcgcagctacctgcggcctatcctcctcttcctgttcttcgtctttctcatcgatgcctggcgtctcgtgcgtcaccggcccgccacataccgaacgcatccggacgaattacacttacaacgacgatccgctgatggcacacccgtcaacacgaccgtcttcatcgcctccgtacaccgaaataccgaggtcatcttgacgacggcgtggaacgatgcagtcttgaatctcatagactatcttggacctgagaatgtgttcttctcggcagtcgaatctggatcgcaggacgactccaagaccgctctcctcgatcttcaaaggtccttggacgggaaaggcgttccgaacaaaatcagtctaggattgacggtatgggagcaattggaagagattgagactcggccggctgtccgggagcccggctggatctggaacaaagcagaaagccaattcgagatgagacggataccatacctctcccgggtacgcaatcaggcgatggaaccattagaaaggctcgcggccgagggtaggacatttgacaaagtgctgtggatcaatgatgttgttttcgatacagaagatattgcaacactgttcaacacgcggggtggtaaatacgccgccgcatgttcaatggactacaagtcgtcaccccgctactacgacacctttgctctgcgagacgacatgggtctcaagacaatgtcgctacactggccctggttccaatcccccacatccaaagcggcagccgagaaaaacgcgccgattcgcgtgagttcatgctggaacggaatcgtcgtattcgactccgaccccttctacgccgacccgcccctcaaattccgaggcatcgacgacactctcgcagatcttcatctcgagggctccgaatgctgtctcatccacgcagacaactacctctccgtcaataaaggcgtatggctgaacccaaacgtccgcgtaggatacacggtcgacgcctactccaagatccgacggaatcgcttcccaggaccgctttggacaataataggggcgtggacaaaccggatcgtgagcggacgagccgccatacaagcccagctggagaccagagttgtcgcgaaaagactagagcagtggaggagcgagacgccggctggagagcggctacggtatgagcctggtgccgtgtgtgtgatcaacgagatgcagatcatgtgggcgaatggatggaagcacttgtaa

SEQ ID NO: 1428 - protein, 420 aa, Muscodor strobelii
  misc_feature: SGI Peptide ID NO. 560077
  misc_feature (19)..(420): NCBI GI: 240107438 Blast Desc: CPC735_067230 [Coccidioides posadasii C735 delta SOWgp]
  misc_feature (10)..(420): NCBI GI: 258564859 Blast Desc: conserved [Uncinocarpus reesii 1704] gi|237906875|gb|EEP81276.1| conserved [Uncinocarpus reesii 1704]
  misc_feature (10)..(420): NCBI GI: 171691166 Blast Desc: protein product [Podospora anserina] gi|170945531|emb|CAP71643.1| protein product [Podospora anserina]
  misc_feature (62)..(420): NCBI GI: 119482810 Blast Desc: polysaccharide export protein (CAP59), [Neosartorya fischeri NRRL 181] gi|119409588|gb|EAW19536.1| polysaccharide export protein (CAP59), [Neosartorya fischeri NRRL 181]
  misc_feature (62)..(420): NCBI GI: 146324838 Blast Desc: polysaccharide export protein (CAP59) [Aspergillus fumigatus Af293] gi|129556634|gb|EAL86970.2| polysaccharide export protein (CAP59), [Aspergillus fumigatus Af293]
  misc_feature (55)..(420): NCBI GI: 154318610 Blast Desc: BC1G_02694 [Botryotinia fuckeliana B05.10] gi|150857824|gb|EDN33016.1| BC1G_02694 [Botryotinia fuckeliana B05.10]
  misc_feature (62)..(420): NCBI GI: 159123223 Blast Desc: polysaccharide export protein (CAP59), [Aspergillus fumigatus A1163]
  misc_feature (62)..(419): NCBI GI: 238488775 Blast Desc: polysaccharide export protein (CAP59), [Aspergillus flavus NRRL3357] gi|220698013|gb|EED54353.1| polysaccharide export protein (CAP59), [Aspergillus flavus NRRL3357]
  misc_feature (49)..(419): NCBI GI: 238838538 Blast Desc: conserved [Microsporum canis CBS 113480]
  misc_feature (57)..(420): NCBI GI: 226295009 Blast Desc: conserved [Paracoccidioides brasiliensis Pb18]
  misc_feature: Useful for introducing or modulating the production of volatile compounds
MLLSYRRFRRSYLRPILLFLFFVFLIDAWRLVRHRPATYRTHPDELHLQRRSADGTPVNTTVFIASVHRNTEVILTTAWNDAVLNLIDYLGPENVFFSAVESGSQDDSKTALLDLQRSLDGKGVPNKISLGLTVWEQLEEIETRPAVREPGWIWNKAESQFEMRRIPYLSRVRNQAMEPLERLAAEGRTFDKVLWINDVVFDTEDIATLFNTRGGKYAAACSMDYKSSPRYYDTFALRDDMGLKTMSLHWPWFQSPTSKAAAEKNAPIRVSSCWNGIVVFDSDPFYADPPLKFRGIDDTLADLHLEGSECCLIHADNYLSVNKGVWLNPNVRVGYTVDAYSKIRRNRFPGPLWTIIGAWTNRIVSGRAAIQAQLETRVVAKRLEQWRSETPAGERLRYEPGAVCVINEMQIMWANGWKHL

SEQ ID NO: 1429 - DNA, 3097 bp, Muscodor strobelii
  misc_feature: SGI EST ID NO. CUFF.3931.1
  misc_feature: Variant of the nucleotide sequence at SEQ ID NO 1427
gaaaaaagcgacagacatctgagccaagtcgccaagggagctttacgttcagcttattacgagtcggtgtcttggtctcaccatgtctacaaatcttgtgcctaacttgctcaaagctacttctttttacttgtgcctgtgatctatccatccatgattttagttcgtctgtccaacacttgacatcttggttctatctgcccagctcttcccatggtcctcatacgctgttccatcgtagagcagacctgagctcgacatctatcatgacatagccttatcctttttctctttcgtaacttatttccttttcttcttttttctttactgtcttccgtctcgatgctcctcagctaccgccgcttccggcgcagctacctgcggcctatcctcctcttcctgttcttcgtctttctcatcgatgcctggcgtctcgtgcgtcaccggcccgccacataccgaacgcatccggacgaattacacttacaacgacgatccgctgatggcacacccgtcaacacgaccgtcttcatcgcctccgtacaccgaaataccgaggtcatcttgacgacggcgtggaacgatgcagtcttgaatctcatagactatcttggacctgagaatgtgttcttctcggcagtcgaatctggatcgcaggacgactccaagaccgctctcctcgatcttcaaaggtccttggacgggaaaggcgttccgaacaaaatcagtctaggattgacggtatgggagcaattggaagagattgagactcggccggctgtccgggagcccggctggatctggaacaaagcagaaagccaattcgagatgagacggataccatacctctcccgggtacgcaatcaggcgatggaaccattagaaaggctcgcggccgagggtaggacatttgacaaagtgctgtggatcaatgatgttgttttcgatacagaagatattgcaacactgttcaacacgcggggtggtaaatacgccgccgcatgttcaatggactacaagtcgtcaccccgctactacgacacctttgctctgcgagacgacatgggtctcaagacaatgtcgctacactggccctggttccaatcccccacatccaaagcggcagccgagaaaaacgcgccgattcgcgtgagttcatgctggaacggaatcgtcgtattcgactccgaccccttctacgccgacccgcccctcaaattccgaggcatcgacgacactctcgcagatcttcatctcgagggctccgaatgctgtctcatccacgcagacaactacctctccgtcaataaaggcgtatggctgaacccaaacgtccgcgtaggatacacggtcgacgcctactccaagatccgacggaatcgcttcccaggaccgctttggacaataataggggcgtggacaaaccggatcgtgagcggacgagccgccatacaagcccagctggagaccagagttgtcgcgaaaagactagagcagtggaggagcgagacgccggctggagagcggctacggtatgagcctggtgccgtgtgtgtgatcaacgagatgcagatcatgtgggcgaatggatggaagcacttgtaagcacgtgtaaaaaggctagaatggttgaagatagatatataaaaatgttacagtatataccctatggaaacagctagagatatgtttctcatcttgctcccagctcttttgcggtcctctatctcgtaaatgcatgcgtgcatggaatgccgcgggccaccttcacataaggtgatggtcatctcaagtatgcaagaaacaaaatacaatgcacacaatgcacaacaaacgccatgttccacaatgaaaatgggccccagcgggcatatgccatcatcctcagtccctcgaccatcacttgcaaatctcccaacgccaccatctatttgttatgccatgcgaaattcctcaagctgtcccaatcattggactgcaggtatatatagttcatactggaacgcaaactgggctgtaaatcgtcggggtggtagcggaagagatgcatgaccatgccccaagaagccgcagcgaagacaggccaggcgtaatgactaatactcgccgagcgagcgtcctgcgacacaacggggaacccgtaaccaggtttcacagccagacgagccagcgcaaggacgacacgcgcgaagacgtaaacgacgatctgctgattgacgctcgatatctttcccgtgcgcggcgaccgtcctccaaagacgaaataccctcctatcaagcccgcgaggaacgtgtcgtaattaccctcctttccgggcgtcgcgccgtaatgcttcagtatgtaacacgtggtcttgtagatagtggcgaattttgcgaggttgcgggcatgggtgcgggtcgccttgaagatgagctcgagcttctgccgaaaggacccaaagcggaacaggaagaccatgacgagggcgtgcgggaagcgcactttggcgccgtagactgcgccattgcgggcgcctttgacgatcgctaggaggtcgtggtaggctgggtcgaggagtatgcgctcgatggcggcctgcgcatttgtggtgggtgtgttagctggactgtgtttgtaggagtgattgcggcgagcgcattcactcgctaggtatcattgagtagagattgtgtttccatgtcatattttctttttttctctattcatcatcgttgttgtaagggagaggctctgtcatgacgtaccttgacgctctccagggcagacgccatggtgcctcggctattctgggcaacggcgcaagcagaccggtcgctttccgttcgcagggacaggaatgaagacgaactatcgttaccggatcatctagaaaacagattgtctaagggcactaaattggcgcactcgaggagaatagagaatggaaagaagggagagagtgtgaacagcaagtcagtgaatcagccatagtggtggaggttccatggcggcgctcggcttgtggaatttggagcatgtgagcactgagctttggctcggcttaaacagccatctccagtttagaggtatggggagccatgacctgagccccgc

SEQ ID NO: 1430 - DNA, 870 bp, Muscodor strobelii
  misc_feature: SGI cDNA ID NO. 560078
  misc_feature: Encodes the peptide sequence at SEQ ID NO 1431
atgacgtctcagagcaacctgtccaagtcggccgaagaagggttcaaagacgcatcagcatacgacacacatcggcccaattactcccctgaagctgttgagacatttcttcagaatttgaagatcgccggacaggatgagatcaatattgtcgagatcgcggccggtactggcaaattcaccgaagtcctggccgcacggccggaaagatacgctgtcaaggctatcgaaccgcatggccccatgcgcgacaagatgattgccaaagacttacaagctgttgaggtcctcgatggtaaggcagataagatgcctgttacggatgagtggggagatgtctgcatcgccgctcagtcctttcactggttcgcgaattcagaggcattaacagagattcatcgtgttttgagacctggcgccgtacttggcatgatctggaacattgatgattataacaagccacaaggatggcaggcaactacaaaatgggaacaaagactgaacgagttcctctggcagcatgatgatggattaccaaggtttaggcatcaaaaatggcacgagatttttgagaagcaaccacccgcaacaccgatccaagctatcaagaatacgttttccgaccatcttccaagattcagcctaccgctaggagagaacacgattcgctggaccatatggcttagcgaagatgctttgtgggcacggtttaatactttgagtcaaatcgccgtgctaaagggcgaggaacgcgaggcagctatcaagcttttcaaggagatcctccaaggtgatgacgttgagagaaatgagaagggcgaaattgcaacacatggcgtcacatactctgcatggacggatagaatatag

SEQ ID NO: 1431 - protein, 289 aa, Muscodor strobelii
  misc_feature: SGI Peptide ID NO. 560078
  misc_feature (51)..(144): Pfam Id: PF08241 Pfam Desc: Methyltransferase domain
  misc_feature (6)..(289): NCBI GI: 145615587 Blast Desc: MGG_05702 [Magnaporthe grisea 70-15] gi|145022396|gb|EDK06416.1| MGG_05702 [Magnaporthe grisea 70-15]
  misc_feature (7)..(289): NCBI GI: 171680315 Blast Desc: protein product [Podospora anserina] gi|170939784|emb|CAP65010.1| protein product [Podospora anserina]
  misc_feature (1)..(289): NCBI GI: 256735269 Blast Desc: NECHADRAFT_98833 [Nectria haematococca mpVI 77-13-4]
  misc_feature (1)..(289): NCBI GI: 46107148 Blast Desc: FG00457.1 [Gibberella zeae PH-1]
  misc_feature (44)..(288): NCBI GI: 261357569 Blast Desc: methyltransferase [Verticillium albo-atrum VaMs.102]
  misc_feature (5)..(289): NCBI GI: 154308524 Blast Desc: BC1G_08322 [Botryotinia fuckeliana B05.10] gi|150852863|gb|EDN28055.1| BC1G_08322 [Botryotinia fuckeliana B05.10]
  misc_feature (5)..(289): NCBI GI: 156036424 Blast Desc: SS1G_12901 [Sclerotinia sclerotiorum 1980] gi|154698306|gb|EDN98044.1| SS1G_12901 [Sclerotinia sclerotiorum 1980]
  misc_feature (11)..(286): NCBI GI: 242813197 Blast Desc: 2-heptaprenyl-1,4-naphthoquinone methyltransferase, [Talaromyces stipitatus ATCC 10500] gi|218714457|gb|EED13880.1| 2-heptaprenyl-1,4-naphthoquinone methyltransferase, [Talaromyces
  misc_feature (1)..(191): NCBI GI: 171691214 Blast Desc: protein product [Podospora anserina] gi|170945555|emb|CAP71667.1| protein product [Podospora anserina]
  misc_feature (11)..(198): NCBI GI: 212544698 Blast Desc: conserved [Penicillium marneffei ATCC 18224] gi|210065472|gb|EEA19566.1| conserved [Penicillium marneffei ATCC 18224]
MTSQSNLSKSAEEGFKDASAYDTHRPNYSPEAVETFLQNLKIAGQDEINIVEIAAGTGKFTEVLAARPERYAVKAIEPHGPMRDKMIAKDLQAVEVLDGKADKMPVTDEWGDVCIAAQSFHWFANSEALTEIHRVLRPGAVLGMIWNIDDYNKPQGWQATTKWEQRLNEFLWQHDDGLPRFRHQKWHEIFEKQPPATPIQAIKNTFSDHLPRFSLPLGENTIRWTIWLSEDALWARFNTLSQIAVLKGEEREAAIKLFKEILQGDDVERNEKGEIATHGVTYSAWTDRI

SEQ ID NO: 1432 - DNA, 1608 bp, Muscodor strobelii
  misc_feature: SGI EST ID NO. CUFF.3826.0
  misc_feature: Variant of the nucleotide sequence at SEQ ID NO 1430
cgcttgtaaacagcaaccatatgttctccagctcattttgcccttgtatcacgtacaagtaatgacaagtaacgacagtcatttttcgacaccaattaatcacacattagactgtaaaactgtcttgagtttgatgagcaagttgtaactacagaccacaaatatgacgtctcagagcaacctgtccaagtcggccgaagaagggttcaaagacgcatcagcatacgacacacatcggcccaattactcccctgaagctgttgagacatttcttcagaatttgaagatcgccggacaggatgagatcaatattgtcgagatcgcggccggtactggcaaattcaccgaagtcctggccgcacggccggaaagatacgctgtcaaggctatcgaaccgcatggccccatgcgcgacaagatgattgccaaagacttacaagctgttgaggtcctcgatggtaaggcagataagatgcctgttacggatgagtggggagatgtctgcatcgccgctcagtcctttcactggtacggcttgccatcctagcccagggaaataatcctaagtcttgataacaggttcgcgaattcagaggcattaacagagattcatcgtgttttgagacctggcgccgtacttggcatgatctggaacattgatgattataacaagccacaaggatggcaggcaactacaaaatgggaacaaagactgaacgagttcctctggcagcatgatgatggattaccaaggtttaggcatcaaaaatggcacgagatttttgagaagcaaccacccgcaacaccgatccaagctatcaagaatacgttttccgaccatcttccaagattcagcctaccgctaggagagaacacgattcgctggaccatatggcttagcgaagatgctttgtgggcacggtttaatactttgagtcaaatcgccgtgctaaagggcgaggaacgcgaggcagctatcaagcttttcaaggagatcctccaaggtgatgacgttgagagaaatgagaagggcgaaattgcaacacatggcgtcacatactctgcatggacggatagaatatagagtactcaaggccttttaaagagggtgtggccgtcataatagtatgtagatattagacaaaactgagatctgatatctaaaatcgttcgtacctcagaactctgaccgaatccgcctacgtcatcataaaagcactaatgctcatttctttcgaaatgatgaggccgtgtggcaagtaggaggctgtgaaggaccgtcgccgaatcgattatggtgaaatctgcgttcaacagcgcaatggcggacctccagcgatgcttacttgcgaggtacagatacaaccagtctaaagccctcaagacttcatggtataggacatctcagttagtcggcagaaatgtacataactacataagacagaacggtcaactgagatgaacatgtgctcggctcgaagtagcaaacgcaccattattgcctctcacaaaggcatcaccatacgtcctccgcttgacgccgttgacgaattcttctgttttctcgagggcgatgttcatgtagccatcgacagactgcagctcgcc

SEQ ID NO: 1433 - DNA, 264 bp, Muscodor strobelii
  misc_feature: SGI cDNA ID NO. 560079
  misc_feature: Encodes the peptide sequence at SEQ ID NO 1434
atggagaacggcacgtcaacggagggcaaagacccaagcggcttcctttcagagatcatcggccacgcagtaaccgtcaagctcaactctggcgtcgtctacaaaggcgagctgcagtctgtcgatggctacatgaacatcgccctcgagaaaacagaagaattcgtcaacggcgtcaagcggaggacgtatggtgatgcctttgtgagaggcaataatggtgcgtttgctacttcgagccgagcacatgttcatctcagttga

SEQ ID NO: 1434 - protein, 87 aa, Muscodor strobelii
  misc_feature: SGI Peptide ID NO. 560079
  misc_feature (14)..(79): Pfam Id: PF01423 Pfam Desc: LSM domain
  misc_feature (14)..(73): Pfam Id: PF01423 Pfam Desc: LSM domain
  misc_feature (1)..(75): NCBI GI: 164422788 Blast Desc: NCU10352 [Neurospora crassa OR74A] gi|157069821|gb|EDO64904.1| conserved [Neurospora crassa OR74A]
  misc_feature (1)..(87): NCBI GI: 116206862 Blast Desc: conserved [Chaetomium globosum CBS 148.51] gi|88183321|gb|EAQ90789.1| conserved [Chaetomium globosum CBS 148.51]
  misc_feature (1)..(79): NCBI GI: 189028851 Blast Desc: conserved [Chaetomium globosum CBS 148.51] gi|88183321|gb|EAQ90789.1| conserved [Chaetomium globosum CBS 148.51]
  misc_feature (1)..(73): NCBI GI: 171680313 Blast Desc: protein product [Podospora anserina] gi|170939783|emb|CAP65009.1| protein product [Podospora anserina]
  misc_feature (1)..(73): NCBI GI: 189028863 Blast Desc: protein product [Podospora anserina] gi|170939783|emb|CAP65009.1| protein product [Podospora anserina]
  misc_feature (1)..(80): NCBI GI: 119467878 Blast Desc: LSM domain protein [Neosartorya fischeri NRRL 181] gi|119405897|gb|EAW15848.1| LSM domain protein [Neosartorya fischeri NRRL 181]
  misc_feature (1)..(73): NCBI GI: 154278836 Blast Desc: HCAG_04071 [Ajellomyces capsulatus NAm1] gi|189028837|sp|A6R363.1|LSM6_AJECN RecName: Full=U6 snRNA-associated Sm-like protein LSm6 gi|150412174|gb|EDN07561.1|
  misc_feature (1)..(73): NCBI GI: 240273226 Blast Desc: LSM domain-containing protein [Ajellomyces capsulatus H143]
  misc_feature (1)..(74): NCBI GI: 261201258 Blast Desc: U6 snRNA-associated Sm-like protein LSm6 [Ajellomyces dermatitidis SLH14081] gi|239592088|gb|EEQ74669.1| U6 snRNA-associated Sm-like protein LSm6 [Ajellomyces dermatitidis
  misc_feature (1)..(73): NCBI GI: 212543325 Blast Desc: U6 snRNA-associated Sm-like protein LSm6, [Penicillium marneffei ATCC 18224] gi|210066724|gb|EEA20817.1| U6 snRNA-associated Sm-like protein LSm6, [Penicillium marneffei
MENGTSTEGKDPSGFLSEIIGHAVTVKLNSGVVYKGELQSVDGYMNIALEKTEEFVNGVKRRTYGDAFVRGNNGAFATSSRAHVHLS

SEQ ID NO: 1435 - DNA, 2045 bp, Muscodor strobelii
  misc_feature: SGI EST ID NO. CUFF.3827.2
  misc_feature: Variant of the nucleotide sequence at SEQ ID NO 1433
aaaacatcaaacccctgtcgccgcatctcgttcaaccgtcctaaactcaacatcgccagacaatcgccttcgcaatggagaacggcacgtcaacggagggcaaagacccaagcggcttcctttcagagatcatcggccacgcagtaaccgtcaagctcaactctggcgtcgtctacaaaggcgagctgcagtctgtcgatggctacatgaacatcgccctcgagaaaacagaagaattcgtcaacggcgtcaagcggaggacgtatggtgatgcctttgtgagaggcaataatgttatgtacatttctgccgactaactgagatgtcctataccatgaagtcttgagggctttagactggttgtatctgtacctcgcaagtaagcatcgctggaggtccgccattgcgctgttgaacgcagatttcaccataatcgattcggcgacggtccttcacagcctcctacttgccacacggcctcatcatttcgaaagaaatgagcattagtgcttttatgatgacgtaggcggattcggtcagagttctgaggtacgaacgattttagatatcagatctcagttttgtctaatatctacatactattatgacggccacaccctctttaaaaggccttgagtactctatattctatccgtccatgcagagtatgtgacgccatgtgttgcaatttcgcccttctcatttctctcaacgtcatcaccttggaggatctccttgaactgtcgtgataagtcagcgataaggcatcaaaccaagtgctatacctcttgaatggcaagatttctcagggttacccaactacagagacattgatatgcatcaagatctggctggaaaagagaagatcgcaaatatggacactcacaagcttgatagctgcctcgcgttcctcgccctttagcacggcgatttgactcaaagtattaaaccgtgcccacaaagcatcttcgctaagccatatggtccagcgaatcgtgttctctcctagcggtaggctgaatcttggaagatggtcggaaaacgtattcttgatagcttggatcggtgttgcgggtggttgcttctcaaaaatctcgtgccatttctggggttggtcagtatgagactgcactacgctaaagacatggcgagacgaacttgatgcctaaaccttggtaatccatcatcatgctgccagaggaactcgttcagtctttgttcccattttgtagttgcctgccatccttgtggcttgttatctggtcaaacaataagtataagacaccagatagtcacatagagatacgcacaatcatcaatgttccagatcatgccaagtacggcgccaggtctcaaaacacgatgaatctctgttaatgcctctgaattcgcgaacctgttatcaagacttaggattatttccctgggctaggatggcaagccgtaccagtgaaaggactgtgccaaagtaacgattagctaacgtgacctgacggcttcactgccacgagattagctaataacttacctgagcggcgatgcagacatctccccactcatccgtaacaggcatcttatctgccttaccatcgaggacctcaacagcttgtaagtctttggcaatcatcttgtcgcgcatggggccatgcggttcgatagccttgacagcgtatctttccggccgtgcggccaggacttcggtgaatttgccagtaccggccgcgatctcgacaatattgatctcatcctgtccggcgatcttcaaattctgaagaaatgtctcaacagcttcaggggagtaattgggccgatgtgtgtcgtatgctgatgcgtctttgaacccttcttcggccgacttggacaggttgctctgagacgtcatatttgtggtctgtagttacaacttgctcatcaaactcaagacagttttacagtctaatgtgtgattaattggtgtcgaaaaatgactgtcgttacttgtcattacttgtacgtgatacaagggcaaaatgagctggagaacatatggttgctgtttacaagcg

SEQ ID NO: 1436 - DNA, 1518 bp, Muscodor strobelii
  misc_feature: SGI cDNA ID NO. 560080
  misc_feature: Encodes the peptide sequence at SEQ ID NO 1437
atgtccgaccttcagagacctgcgaaacccaaggctttgcccttcaagcgcaccgtaccccgaaggccatccactgagaaagctcccgaggatgacagtggcctgtcactgttcagcaaatcgaaagactacttctccaacatcgccgaggaccgccggaaacaagcccaagagaaagccgacaaggagcgcaaggacaagatagctctcgaggagcaagagcggagagctgcggagcgtagacacgataagcagagaaagcaagatgaacccgcaagtgccaaaaaacgcaacagaccttcaattccgatagatcaggagagcgacgacgatacttttaccaccagacctaataagacgcggaagccgtcgagcccgaccagcccggacaagacatacaagtcctctgcgacaagcgcttccaggcgccgctcaaatagttcacacgggcagtccaaagctcactctagtctgcctcgagaaactgccactctgtccgacagtagtgataatgaggatcgcctcaacaggcatgcttcaataccgaaaacagcatctatactgtcagctagcaggggggcatacacttcgcccaagagttcaagtaatgagaggggcaacgccatcgctctagacgatagtgattcggacgatgagcttgtcggtgctgacccagatcccagcaacgacaaagaggatgtgtcagcgcgatacattcaagcgactctcgagcgcatggcgaaggctaaagccgctcgcttggcacgtgaagcctcggcgaccggtgctggtggagaagcggatggcgatgatgtagaccgtggtattccagtatccattatgatcgccgccccgtccctgccagacgcaaagacgctgatgtgcaaagtacgcactgcccagccactgcaaatcgccttcaataccttccaagagcgtgtcaaagcccaaaccaattacccgcatcaagtggtctcggatctcgttttcacctggcgcggagaccgtatatatggctcgacaaaactcgagaccctcggaatccgaccacgaggcccagagggccgtctacatgattccatacgaggaggggatgcacctgagggttactacggtcatgacaatgtttattttgaggcacagtcaccagaagaatatgaacaatcacagaaaaagcgtgagcgcgagcggaagcgtcgagaggccggcgagtggtgggaagacgaagaggcggaagaggccgcgaaagcagaggctattgccgctgcagaggcgcaagacgcagccgatcgtgtcagagtgtcgttccaagcccttaacatgcccaaaaagagtgtgacgctccgcaaatacagcaccgtcgcgcacatgatcaaggcttttcgcaggctcgcgaacctgcctgaagataaacatgttgagatagtctgggacggagaggttctcgatctcgagacaacggtcgaagaagccgacatcggtgatatggacatggttgaagtacacatcaaatcgtga

SEQ ID NO: 1437 - protein, 505 aa, Muscodor strobelii
  misc_feature: SGI Peptide ID NO. 560080
  misc_feature (30)..(504): NCBI GI: 39940206 Blast Desc: MGG_05137 [Magnaporthe grisea 70-15] gi|145010606|gb|EDJ95262.1| MGG_05137 [Magnaporthe grisea 70-15]
  misc_feature (261)..(504): NCBI GI: 256735268 Blast Desc: NECHADRAFT_98832 [Nectria haematococca mpVI 77-13-4]
  misc_feature (238)..(504): NCBI GI: 261357571 Blast Desc: conserved [Verticillium albo-atrum VaMs.102]
  misc_feature (229)..(501): NCBI GI: 189194005 Blast Desc: conserved [Pyrenophora tritici-repentis Pt-1C-BFP] gi|187978905|gb|EDU45531.1| conserved [Pyrenophora tritici-repentis Pt-1C-BFP]
  misc_feature (9)..(504): NCBI GI: 116196640 Blast Desc: CHGG_04918 [Chaetomium globosum CBS 148.51] gi|88180831|gb|EAQ88299.1| CHGG_04918 [Chaetomium globosum CBS 148.51]
  misc_feature (273)..(504): NCBI GI: 226282359 Blast Desc: conserved [Paracoccidioides brasiliensis Pb01]
  misc_feature (273)..(504): NCBI GI: 226292483 Blast Desc: conserved [Paracoccidioides brasiliensis Pb18]
  misc_feature (273)..(504): NCBI GI: 225680788 Blast Desc: [Paracoccidioides brasiliensis Pb03]
  misc_feature (320)..(504): NCBI GI: 238844802 Blast Desc: conserved [Microsporum canis CBS 113480]
  misc_feature (274)..(504): NCBI GI: 156036428 Blast Desc: SS1G_12903 [Sclerotinia sclerotiorum 1980] gi|154698308|gb|EDN98046.1| SS1G_12903 [Sclerotinia sclerotiorum 1980]
MSDLQRPAKPKALPFKRTVPRRPSTEKAPEDDSGLSLFSKSKDYFSNIAEDRRKQAQEKADKERKDKIALEEQERRAAERRHDKQRKQDEPASAKKRNRPSIPIDQESDDDTFTTRPNKTRKPSSPTSPDKTYKSSATSASRRRSNSSHGQSKAHSSLPRETATLSDSSDNEDRLNRHASIPKTASILSASRGAYTSPKSSSNERGNAIALDDSDSDDELVGADPDPSNDKEDVSARYIQATLERMAKAKAARLAREASATGAGGEADGDDVDRGIPVSIMIAAPSLPDAKTLMCKVRTAQPLQIAFNTFQERVKAQTNYPHQVVSDLVFTWRGDRIYGSTKLETLGIRPRGPEGRLHDSIRGGDAPEGYYGHDNVYFEAQSPEEYEQSQKKRERERKRREAGEWWEDEEAEEAAKAEAIAAAEAQDAADRVRVSFQALNMPKKSVTLRKYSTVAHMIKAFRRLANLPEDKHVEIVWDGEVLDLETTVEEADIGDMDMVEVHIKS

SEQ ID NO: 1438 - DNA, 372 bp, Muscodor strobelii
  misc_feature: SGI cDNA ID NO. 560081
  misc_feature: Encodes the peptide sequence at SEQ ID NO 1439
atgcctcagtctagccgccacggagcccgtcaagcccgccgctctctcattgactacctcgatgacgacgacaacgatgctgactttgtgtttgatgccgcacagcctcccacacaaacccccctgaacgctatcacgacccaggtggacaccttgcagactggacttgaggcccaaatggcagaggatcgaaagcagaacttgaagatgatgaacgctgcggaggacagaatgctggctcgtcacaaggaggctaaggctgaccgccagcaaatcatcagcaatcagaagaaccagtctaagatcctctacatcatgctggcgctgtttgtcgttggtctggcggtctatctctataacgttttcgcatag

SEQ ID NO: 1439 - protein, 123 aa, Muscodor strobelii
  misc_feature: SGI Peptide ID NO. 560081
MPQSSRHGARQARRSLIDYLDDDDNDADFVFDAAQPPTQTPLNAITTQVDTLQTGLEAQMAEDRKQNLKMMNAAEDRMLARHKEAKADRQQIISNQKNQSKILYIMLALFVVGLAVYLYNVFA

SEQ ID NO: 1440 - DNA, 3054 bp, Muscodor strobelii
  misc_feature: SGI EST ID NO. CUFF.3818.0
  misc_feature: Variant of the nucleotide sequence at SEQ ID NO 1438
cattcgtctccaatctctcgtctgcgcctgtcatcaccaagacacgagtaaaactgtcgacatggcgccgttggcctcggggcatgtgtgcttgccaccccaaacctccctactctgggcaggagcggcaccctccttggtccagcggcgatcgatctcctcaccgccctagatgggtaagggcagtgacgcctccgcgcgtcacaggtcgggtttcgtgtcttgatatcagtcaatcattccgtgaaatctttttaagattgtcatgtcgccggccgacctgtacgcgtctttgccttgaggcgccagggtatagattgttgacggtaaaaactctccaataagacaatagtatcccactcactattgcatgggagcccccgaattaatcaagcattgttttatggcgctcgggcctttgactggtggtgatgccggagtgattggagacacctatggatcatctcgatgacctgacttacttggtgaaaatcttcgctaatgggggacaggccaagcaccaataaagctgcaagatgcctcagtctagccgccacggagcccgtcaagcccgccgctctctcattgactacctcgatgacgacgacaacgatgctgactttgtgtttgatgccgcacagcctcccacacaaacccccctgaacgctatcacgacccaggtggacaccttgcagactggacttgaggcccaaatggcagaggatcgaaagcagaacttgaagatgatgaacgctgcggaggacagaatgctggctcgtcacaaggaggctaaggctgaccgccagcaaatcatcagcaatcagaagaaccagtctaagatcctctacatcatgctggcgctgtttgtcgttggtctggcggtctatctctataacgttttcgcatagccgtgaaccgatcattaaggaatcaacacggcaagcggttgacccactgatctggcggatttgaacgtcgacatgtatatatatacatgaatcctgtgtgcctaagcacatgcgttgcgtacctgcgttgcattctcccttacttgataaatacagtcatcgcaaggcaaaataaacgttttcagatcaatagacggtatcatcatcatacgtgacatggtcgtagtagcattcatccatcgcactatcatgaatatcagcctgacctggcgattcgtttcttcctttctttgaaccatgcgccgtgttccctactgccgagtgtttcttcctttgactcctcgcatacaaaaagatacctaatccttaaaaaatcaatataaagctattcaccctgactccgttctgattgacttcttcacgatttgatgtgtacttcaaccatgtccatatcaccgatgtcggcttcttcgaccgttgtctcgagatcgagaacctctccgtcccagactatctcaacatgtttatcttcaggcaggttcgcgagcctgcgaaaagccttgatcatgtgcgcgacggtgctgtatttgcggagcgtcacactctttttgggcatgttaagggcttggaacgacactctgacacgatcggctgcgtcttgcgcctctgcagcggcaatagcctctgctttcgcggcctcttccgcctcttcgtcttcccaccactcgccggcctctcgacgcttccgctcgcgctcacgctttttctgtgattgttcatattcttctggtgactgtgcctcaaaataaacattgtcatgaccgtagtaaccctcaggtgcatcccctcctcgtatggaatcatgtagacggccctctgggcctcgtggtcggattccgagggtctcgagttttgtcgagccatatatacggtctccgcgccaggtgaaaacgagatccgagaccacttgatgcgggtaattggtttgggctttgacacgctcttggaaggtattgaaggcgatttgcagtggctgggcagtgcgtactttgcacatcagcgtctttgcgtctggcagggacggggcggcgatcataatggatactggaataccacggtctacatcatcgccatccgcttctccaccagcaccggtcgccgaggcttcacgtgccaagcgagcggctttagccttcgccatgcgctcgagagtcgcttgaatgtatcgcgctgacacatcctctttgtcgttgctgggatctgggtcagcaccgacaagctcatcgtccgaatcactatcgtctagagcgatggcgttgcccctctcattacttgaactcttgggcgaagtgtatgcccccctgctagctgacagtatagatgctgttttcggtattgaagcatgcctgttgaggcgatcctcattatcactactgtcggacagagtggcagtttctcgaggcagactagagtgagctttggactgcccgtgtgaactatttgagcggcgcctggaagcgcttgtcgcagaggacttgtatgtcttgtccgggctggtcgggctcgacggcttccgcgtcttattaggtctggtggtaaaagtatcgtcgtcgctctcctgatctatcggaattgaaggtctgttgcgttttttggcacttgcgggttcatcttgctttctctgcttatcgtgtctacgctccgcagctctccgctcttgctcctcgagagctatcttgtccttgcgctccttgtcggctttctcttgggcttgtttccggcggtcctcggcgatgttggagaagtagtctttcgatttgctgaacagtgacaggccactgtcatcctcgggagctttctcagtggatggccttcggggtacggtgcgcttgaagggcaaagccttgggtttcgcaggtctctgaaggtcggacatgactactgacaataacgtgggcgagtggtacgtgggacaggatgtaggtacaatcgaagagtctcgagtatgaatctggctacctgttcagccacgcgcggaagatctattttggagagcgtctaagaggaggatttctgcaggtgctctcggtataagattgcttgcgacgaggctgcaggcgcatatccatggctaacacgtctaaag

SEQ ID NO: 1441 - DNA, 1260 bp, Muscodor strobelii
  misc_feature: SGI cDNA ID NO. 560082
  misc_feature: Encodes the peptide sequence at SEQ ID NO 1442
atgtttcaatcggtgctcattggatttctgattattgggggcttcgttagttatctctggaaagccgaagcggcactcaagcgtccgtgggtacctgacgccggggctgagctattcagtcaacgaccattgcctccgttcaacgaagactcaagtctcacaaattattctctaccgctccggacacaggggcgcgatattgttgacacagcgggtcgccgcttcaagctatctagtgttaactggtatggcgggagcgacgagctgttcatacccggaggactcgaggtgcaacaccgttccgtgcttgccgcgaccatccggaggctagggtttaatagcgtgcgcttgccatactcggatgaaatggtcatcaaaaatccgccgattctacctcatcttgtagcagcaaatccggatctcgtcggtctgcgcgctcttgacatatttaaagcctgtgttgaggctctgacggacgctggtatcgccgtcatcgtgaacaatcatattacaaccgcaacctggtgctgcggtgccgacccgtgcgatgcgggctgggcaaacgaccaccttgggcctttgtgccgtgtatcgcagtctgaagaaggatggatacagcactgggaaaccatcatggagcccctcatagacaacccactcgtcattggggcagacttgaggaatgaggttcgaggtgtttggggcacgatgccctgggatcgctgggcaaccgcggctgagaaatgcggcaatcgacttctgaaattaaacaaagattggctcatcattgtcggaggaacagagtcaggtaatgacttgacgggcgtgcgggctcggccggtcttacttgacctcccagaacgagtggtctactccgcgcatgtgtattcatggtctggctggggcagccgtgaaggacgatacgcgaaacgcagctatgcatctttcatacaagctatgcgaaaaaactgggcatatctagttgaaggggatatagcgccggtctgggttggtgagtttggggcgccactgcatccaggtgaaggagacgccaactactggtcaaatctgctgcgttatctcaagcgtatcgatgctgactttggatactgggcgattaatccacgcaaaccacacgataatatcagagaaggatactctatcatagaggatgattgggtgacaccaatcctcgactatcgtttacgggatatgacggagctcatcgcaggatcggagcatgccaatgattcttcatga

SEQ ID NO: 1442 - protein, 419 aa, Muscodor strobelii
  misc_feature: SGI Peptide ID NO. 560082
  misc_feature (66)..(381): Pfam Id: PF00150 Pfam Desc: Cellulase (glycosyl hydrolase family 5)
  misc_feature (111)..(381): Pfam Id: PF00150 Pfam Desc: Cellulase (glycosyl hydrolase family 5)
  misc_feature (1)..(409): NCBI GI: 39974647 Blast Desc: MGG_00530 [Magnaporthe grisea 70-15] gi|145018570|gb|EDK02849.1| MGG_00530 [Magnaporthe grisea 70-15]
  misc_feature (5)..(409): NCBI GI: 171695112 Blast Desc: protein product [Podospora anserina] gi|170947798|emb|CAP59961.1| protein product [Podospora anserina]
  misc_feature (18)..(409): NCBI GI: 164427183 Blast Desc: NCU03254 [Neurospora crassa OR74A] gi|157071641|gb|EAA35171.2| conserved [Neurospora crassa OR74A]
  misc_feature (5)..(411): NCBI GI: 256735237 Blast Desc: NECHADRAFT_90120 [Nectria haematococca mpVI 77-13-4]
  misc_feature (114)..(418): NCBI GI: 261357464 Blast Desc: endoglucanase [Verticillium albo-atrum VaMs.102]
  misc_feature (18)..(349): NCBI GI: 116182470 Blast Desc: CHGG_01863 [Chaetomium globosum CBS 148.51] gi|88186160|gb|EAQ93628.1| CHGG_01863 [Chaetomium globosum CBS 148.51]
  misc_feature (24)..(383): NCBI GI: 19572317 Blast Desc: cellulase [Stigmatella aurantiaca]
  misc_feature (56)..(373): NCBI GI: 239944349 Blast Desc: cellulase CelA [Streptomyces roseosporus NRRL 15998] gi|239990802|ref|ZP_04711466.1| cellulase CelA [Streptomyces roseosporus NRRL 11379]
  misc_feature (51)..(383): NCBI GI: 115377032 Blast Desc: cellulase (glycosyl hydrolase family 5), [Stigmatella aurantiaca DW4/3-1] gi|115365940|gb|EAU64958.1| cellulase (glycosyl hydrolase family 5), [Stigmatella aurantiaca DW4/3-1]
  misc_feature (55)..(390): NCBI GI: 239934242 Blast Desc: cellulase [Streptomyces ghanaensis ATCC 14672]
  misc_feature (61)..(410): SWISSPROT Homolog: EC 3.2.1.4 Cellulase
MFQSVLIGFLIIGGFVSYLWKAEAALKRPWVPDAGAELFSQRPLPPFNEDSSLTNYSLPLRTQGRDIVDTAGRRFKLSSVNWYGGSDELFIPGGLEVQHRSVLAATIRRLGFNSVRLPYSDEMVIKNPPILPHLVAANPDLVGLRALDIFKACVEALTDAGIAVIVNNHITTATWCCGADPCDAGWANDHLGPLCRVSQSEEGWIQHWETIMEPLIDNPLVIGADLRNEVRGVWGTMPWDRWATAAEKCGNRLLKLNKDWLIIVGGTESGNDLTGVRARPVLLDLPERVVYSAHVYSWSGWGSREGRYAKRSYASFIQAMRKNWAYLVEGDIAPVWVGEFGAPLHPGEGDANYWSNLLRYLKRIDADFGYWAINPRKPHDNIREGYSIIEDDWVTPILDYRLRDMTELIAGSEHANDSS

SEQ ID NO: 1443 - DNA, 2058 bp, Muscodor strobelii
  misc_feature: SGI EST ID NO. CUFF.3823.0
  misc_feature: Variant of the nucleotide sequence at SEQ ID NO 1441
cccaagtgcgatgaggcgaaactgcaatctacgccactcagcttacagagctggggtttttatgaacagctgacgcagctgacaacgaacaaggcgaatgtctcagatacgcgaataactcaataactctctacatcgttgccatcctcatctttttgacgatcaggtctctccgcgagttcggcgatggctttaagctccttgtaacaacttgctgtgctatgtactaagaagagcattgaagttgccactgggatatgtgaaagagggcatcctaccctctaaccacctggtcttcgccatgtttcaatcggtgctcattggatttctgattattgggggcttcgttagttatctctggaaagccgaagcggcactcaagcgtccgtgggtacctgacgccggggctgagctattcagtcaacgaccattgcctccgttcaacgaagactcaagtctcacaaattattctctaccgctccggacacaggggcgcgatattgttgacacagcgggtcgccgcttcaagctatctagtgttaactggtatggcgggagcgacgagctgttcatacccggaggactcgaggtgcaacaccgttccgtgcttgccgcgaccatccggaggctagggtttaatagcgtgcgcttgccatactcggatgaaatggtcatcaaaaatccgccgattctacctcatcttgtagcagcaaatccggatctcgtcggtctgcgcgctcttgacatatttaaagcctgtgttgaggctctgacggacgctggtatcgccgtcatcgtgaacaatcatattacaaccgcaacctggtgctgcggtgccgacccgtgcgatgcgggctgggcaaacgaccaccttgggcctttgtgccgtgtatcgcagtctgaagaaggatggatacagcactgggaaaccatcatggagcccctcatagacaacccactcgtcattggggcagacttgaggaatgaggttcgaggtgtttggggcacgatgccctgggatcgctgggcaaccgcggctgagaaatgcggcaatcgacttctgaaattaaacaaagattggctcatcattgtcggaggaacagagtcaggtaatgacttgacgggcgtgcgggctcggccggtcttacttgacctcccagaacgagtggtctactccgcgcatgtgtattcatggtctggctggggcagccgtgaaggacgatacgcgaaacgcagctatgcatctttcatacaagctatgcgaaaaaactgggcatatctagttgaaggggatatagcgccggtctgggttggtgagtttggggcgccactgcatccaggtgaaggagacgccaactactggtcaaatctgctgcgttatctcaagcgtatcgatgctgactttggatactgggcgattaatccacgcaaaccacacgataatatcagagaaggatactctatcatagaggatgattgggtgacaccaatcctcgactatcgtttacgggatatgacggagctcatcgcaggatcggagcatgccaatgattcttcatgaataagtgtgtcgttccaatattattggctgcgatagatataaggactaccatccgaatagacctgtcttcactcaaaggacctgagaagttggccggggaaggagcagcagcaggctctgtagcaatgaacatgacttcaatgggaccacccaagtatataaccacataacgtacctgccagtgaagctagcggcgctgcagcattgaatttctcttactatatgagctcacctagagggtaggatacagcgctccgtcggttcgcgccatcttacccagtaggtgccgtcttccctcatccccaaaaagatcaacttgtcaccttcaaactcccgtccacaaaatctatcatccgccggccaacatcacactacgcatcgctcaggaactagtgcctccccgcctcagatccagagcgttgctcttcttctctcttactttgtctcatctacagtctaagtgctcgctcctttacgagtattctgcagtcgccgtg

SEQ ID NO: 1444 - DNA, 1611 bp, Muscodor strobelii
  misc_feature: SGI cDNA ID NO. 560083
  misc_feature: Reduced expression when VOC is produced
  misc_feature: Encodes the peptide sequence at SEQ ID NO 1445
atgctatccaaccagacaatcgatgacttgcgcgatgggtgcttcgcgcctttcttcaacgaagcagcattcccagctactggtggatatattccaggacgactctgttcgaaccttacaggatcaacatgttgcttaccatgccccttaaccgagtgggtttatccagacaattttggcgcagcgacaggatccgcggactgggtgaacgttgcgggaatgatcgggtgcgctttcttgttattatcttgggctgtcttaccggtagagaggacgcatagacactacttaagtatctgtcttacacttgcagtcgtgttaatgaatttcggatttattatccccttggccgcgaaaccagaccaatgtttcaacgaaatcacgcccaacggacaagaatcaagctccgtctgcgcagcatctggagccttccttctttttggtggttggggcggtgtactatgggtgtttcttagagctctttctttacatctgcagatatgttggcaactggtcgttggtcgcaactacatgtggttttcccaggcactgggttggggggtacccatcattggccttgtattgctcctcatcttcagcggcgtctcctttcggtttggcacaacgtgccatatcaaccacgaaaacagcttggccgatttctggatccctctactcattttcgccggtctaacagttatcatccaatttgcaacgtttggctactgtatcaaagtttatcttgcgtcgcttgcggacaacgctgtttctacgcagacttcgggaatgcgatcttactcgaacagcattcggaccatgacgcctcgacaggcgtaccgtcgagttcggcgagtcatccagcttcagtggcgcggtatcgtgatcgttttgattatcgctgccgatgttattttctttgcgattatatttgtgttcctcgataatacggaacagcgactaaagaatgatcctgaaaaggctcttaattggatagcttgcctggtgaagactcaaggcgacaagaacgcgtgtctcgatgaagccagtgagctggtgattggcctcccaaccgtgacagcagtacttattctactagcgatgaacggactgtggcttttactcatcctcggaagatggtctatggttacgggctgggttgaattgtttagctcgatcggtcgtcgaaatcaaaatgagtttttgtcggtcgatgctcgaaccgatttgaaaaatgacccccggtcatatgaaatgttggaccgcgactcgaccacgaaggaacaaatactaacgccacctagcgcgacgaaatcacctacacaaaccggccgccgaactcccgactatttcggccgaccgcgatatcaaccaagtcaaggatcatattcatcacctcgaagcccgaagaacgtcgaattcgaaatgatgaacgcatataacaactatccatcctctcctttaccaacccatgagccggcacagtcccattcatattcccaaggatataatgggattaacccgttgggaatgaacagaatagagaagcaagaagaggcaggctacggctcgaactatagttcaacaaaagggccagaacatgctttcatatga

SEQ ID NO: 1445 - protein, 536 aa, Muscodor strobelii
  misc_feature: SGI Peptide ID NO. 560083
  misc_feature (53)..(513): NCBI GI: 116182472 Blast Desc: CHGG_01864 [Chaetomium globosum CBS 148.51] gi|88186161|gb|EAQ93629.1| CHGG_01864 [Chaetomium globosum CBS 148.51]
  misc_feature (14)..(512): NCBI GI: 256735238 Blast Desc: NECHADRAFT_74875 [Nectria haematococca mpVI 77-13-4]
  misc_feature (14)..(513): NCBI GI: 171695114 Blast Desc: protein product [Podospora anserina] gi|170947799|emb|CAP59962.1| protein product [Podospora anserina]
  misc_feature (111)..(513): NCBI GI: 261357463 Blast Desc: conserved [Verticillium albo-atrum VaMs.102]
  misc_feature (102)..(513): NCBI GI: 145611268 Blast Desc: MGG_00532 [Magnaporthe grisea 70-15] gi|145018568|gb|EDK02847.1| MGG_00532 [Magnaporthe grisea 70-15]
  misc_feature (110)..(513): NCBI GI: 164427185 Blast Desc: NCU03253 [Neurospora crassa OR74A] gi|157071642|gb|EAA35170.2| conserved [Neurospora crassa OR74A]
  misc_feature (14)..(469): NCBI GI: 121711503 Blast Desc: conserved [Aspergillus clavatus NRRL 1] gi|119401518|gb|EAW11941.1| conserved [Aspergillus clavatus NRRL 1]
  misc_feature (2)..(468): NCBI GI: 119482892 Blast Desc: NFIA_026510 [Neosartorya fischeri NRRL 181] gi|119409629|gb|EAW19577.1| conserved [Neosartorya fischeri NRRL 181]
  misc_feature (2)..(472): NCBI GI: 115400097 Blast Desc: conserved [Aspergillus terreus NIH2624] gi|114191303|gb|EAU33003.1| conserved [Aspergillus terreus NIH2624]
  misc_feature (2)..(469): NCBI GI: 146324844 Blast Desc: conserved [Aspergillus fumigatus Af293] gi|129556631|gb|EAL86941.2| conserved [Aspergillus fumigatus Af293]
  misc_feature: Useful for introducing or modulating the production of volatile compounds
MLSNQTIDDLRDGCFAPFFNEAAFPATGGYIPGRLCSNLTGSTCCLPCPLTEWVYPDNFGAATGSADWVNVAGMIGCAFLLLSWAVLPVERTHRHYLSICLTLAVVLMNFGFIIPLAAKPDQCFNEITPNGQESSSVCAASGAFLLFGGWGGVLWVFLRALSLHLQICWQLVVGRNYMWFSQALGWGVPIIGLVLLLIFSGVSFRFGTTCHINHENSLADFWIPLLIFAGLTVIIQFATFGYCIKVYLASLADNAVSTQTSGMRSYSNSIRTMTPRQAYRRVRRVIQLQWRGIVIVLIIAADVIFFAIIFVFLDNTEQRLKNDPEKALNWIACLVKTQGDKNACLDEASELVIGLPTVTAVLILLAMNGLWLLLILGRWSMVTGWVELFSSIGRRNQNEFLSVDARTDLKNDPRSYEMLDRDSTTKEQILTPPSATKSPTQTGRRTPDYFGRPRYQPSQGSYSSPRSPKNVEFEMMNAYNNYPSSPLPTHEPAQSHSYSQGYNGINPLGMNRIEKQEEAGYGSNYSSTKGPEHAFI

SEQ ID NO: 1446 - DNA, 2562 bp, Muscodor strobelii
  misc_feature: SGI EST ID NO. CUFF.3974.2
  misc_feature: Variant of the nucleotide sequence at SEQ ID NO 1444
ccggtctcttctatcgcgtctaagaactctgcattgttgtgcctaattgggcatgtccactttctctctgtacatacatatgctaggctcgccaggcgagcaggtaggtgtcctagcaatacctacttacgcatacacgtcccacctacttttgccaacgcctcgtcagaagatctggcttcattcatcacgtcgctctcgatcacaatagtatttttttttttgggcaggcttaaacgttttgcttctcgtgtgtggcaggcaagaggttaacccatgtgcaacattggagccatggtctacgcaacctaacctcgccacataatctgcttatcacgaaaatccacattggacatcttgaagaaccaccgagcaatccagctgaatgaacttggcgacacagaagttgcaggcaatcaatcaacatagacacaatctttgccgccgagtccgcgaggaggaaacaaaaaattaagccatcgaagccatgctatccaaccagacaatcgatgacttgcgcgatgggtgcttcgcgcctttcttcaacgaagcagcattcccagctactggtggatatattccaggacgactctgttcgaaccttacaggatcaacatgttgcttaccatgccccttaaccgagtgggtttatccagacaattttggcgcagcgacaggatccgcggactgggtgaacgttgcgggaatgatcgggtgcgctttcttgttattatcttgggctgtcttaccggtagagaggacgcatagacactacttaagtatctgtcttacacttgcagtcgtgttaatgaatttcggatttattatccccttggccgcgaaaccagaccaatgtttcaacgaaatcacgcccaacggacaagaatcaagctccgtctgcgcagcatctggagccttccttctttttggtggttggggcggtgtactatgggtgtttcttagagctctttctttacatctgcagatatgttggcaactggtcgttggtcgcaactacatgtggttttcccaggcactgggttggggggtacccatcattggccttgtattgctcctcatcttcagcggcgtctcctttcggtttggcacaacgtgccatatcaaccacgaaaacagcttggccgatttctggatccctctactcattttcgccggtctaacagttatcatccaatttgcaacgtttggctactgtatcaaagtttatcttgcgtcgcttgcggacaacgctgtttctacgcagacttcgggaatgcgatcttactcgaacagcattcggaccatgacgcctcgacaggcgtaccgtcgagttcggcgagtcatccagcttcagtggcgcggtatcgtgatcgttttgattatcgctgccgatgttattttctttgcgattatatttgtgttcctcgataatacggaacagcgactaaagaatgatcctgaaaaggctcttaattggatagcttgcctggtgaagactcaaggcgacaagaacgcgtgtctcgatgaagccagtgagctggtgattggcctcccaaccgtgacagcagtacttattctactagcgatgaacggactgtggcttttactcatcctcggaagatggtctatggttacgggctgggttgaattgtttagctcgatcggtcgtcgaaatcaaaatgagtttttgtcggtcgatgctcgaaccgatttgaaaaatgacccccggtcatatgaaatcgcgacgaaatcacctacacaaaccggccgccgaactcccgactatttcggccgaccgcgatatcaaccaagtcaaggatcatattcatcacctcgaagcccgaagaacgtcgaattcgaaatgatgaacgcatataacaactatccatcctctcctttaccaacccatgagccggcacagtcccattcatattcccaaggatataatgggattaacccgttgggaatgaacagaatagagaagcaagaagaggcaggctacggctcgaactatagttcaacaaaagggccagaacatgctttcatatgaagacactgacttgccgcatcacatctatcagataatgaagcagccacatacttctgtttgagtaatgggtgagggcgaatctttttttaccttgagcgcggcgtccggaacgggtttttgtctctgtgcgatctggtgttaaatgatgaaggtggtcatgtacaaatcccaatgacttaatgcataaaagcatgcaaatacttggggggaaacatgggtgaaacatgctgaggccagtgtggcagggaacttttatccgacgctagtatttagagtcccgttcagcttttattttgtaaatatgggtgaaatgatcattggtaggatgaatgttctcgagctagcgacttagggctttcgaaggacattagcgttgaaaacgcgttatattgaagaatttcaagactacatggagtgacaaactgtcaacaatattgtgtccaaaacataccggcctcgttagagtccgtccatgttctaattgtataatctacgtgtatgtagaattcaac

SEQ ID NO: 1447 - DNA, 1563 bp, Muscodor strobelii
  misc_feature: SGI cDNA ID NO. 560084
  misc_feature: Reduced expression when VOC is produced
  misc_feature: Encodes the peptide sequence at SEQ ID NO 1448
atgctatccaaccagacaatcgatgacttgcgcgatgggtgcttcgcgcctttcttcaacgaagcagcattcccagctactggtggatatattccaggacgactctgttcgaaccttacaggatcaacatgttgcttaccatgccccttaaccgagtgggtttatccagacaattttggcgcagcgacaggatccgcggactgggtgaacgttgcgggaatgatcgggtgcgctttcttgttattatcttgggctgtcttaccggtagagaggacgcatagacactacttaagtatctgtcttacacttgcagtcgtgttaatgaatttcggatttattatccccttggccgcgaaaccagaccaatgtttcaacgaaatcacgcccaacggacaagaatcaagctccgtctgcgcagcatctggagccttccttctttttggtggttggggcggtgtactatgggtgtttcttagagctctttctttacatctgcagatatgttggcaactggtcgttggtcgcaactacatgtggttttcccaggcactgggttggggggtacccatcattggccttgtattgctcctcatcttcagcggcgtctcctttcggtttggcacaacgtgccatatcaaccacgaaaacagcttggccgatttctggatccctctactcattttcgccggtctaacagttatcatccaatttgcaacgtttggctactgtatcaaagtttatcttgcgtcgcttgcggacaacgctgtttctacgcagacttcgggaatgcgatcttactcgaacagcattcggaccatgacgcctcgacaggcgtaccgtcgagttcggcgagtcatccagcttcagtggcgcggtatcgtgatcgttttgattatcgctgccgatgttattttctttgcgattatatttgtgttcctcgataatacggaacagcgactaaagaatgatcctgaaaaggctcttaattggatagcttgcctggtgaagactcaaggcgacaagaacgcgtgtctcgatgaagccagtgagctggtgattggcctcccaaccgtgacagcagtacttattctactagcgatgaacggactgtggcttttactcatcctcggaagatggtctatggttacgggctgggttgaattgtttagctcgatcggtcgtcgaaatcaaaatgagtttttgtcggtcgatgctcgaaccgatttgaaaaatgacccccggtcatatgaaatcgcgacgaaatcacctacacaaaccggccgccgaactcccgactatttcggccgaccgcgatatcaaccaagtcaaggatcatattcatcacctcgaagcccgaagaacgtcgaattcgaaatgatgaacgcatataacaactatccatcctctcctttaccaacccatgagccggcacagtcccattcatattcccaaggatataatgggattaacccgttgggaatgaacagaatagagaagcaagaagaggcaggctacggctcgaactatagttcaacaaaagggccagaacatgctttcatatga

SEQ ID NO: 1448 - protein, 520 aa, Muscodor strobelii
  misc_feature: SGI Peptide ID NO. 560084
  misc_feature (53)..(497): NCBI GI: 116182472 Blast Desc: CHGG_01864 [Chaetomium globosum CBS 148.51] gi|88186161|gb|EAQ93629.1| CHGG_01864 [Chaetomium globosum CBS 148.51]
  misc_feature (14)..(496): NCBI GI: 256735238 Blast Desc: NECHADRAFT_74875 [Nectria haematococca mpVI 77-13-4]
  misc_feature (14)..(497): NCBI GI: 171695114 Blast Desc: protein product [Podospora anserina] gi|170947799|emb|CAP59962.1| protein product [Podospora anserina]
  misc_feature (110)..(497): NCBI GI: 261357463 Blast Desc: conserved [Verticillium albo-atrum VaMs.102]
  misc_feature (102)..(497): NCBI GI: 145611268 Blast Desc: MGG_00532 [Magnaporthe grisea 70-15] gi|145018568|gb|EDK02847.1| MGG_00532 [Magnaporthe grisea 70-15]
  misc_feature (110)..(454): NCBI GI: 164427185 Blast Desc: NCU03253 [Neurospora crassa OR74A] gi|157071642|gb|EAA35170.2| conserved [Neurospora crassa OR74A]
  misc_feature (14)..(453): NCBI GI: 121711503 Blast Desc: conserved [Aspergillus clavatus NRRL 1] gi|119401518|gb|EAW11941.1| conserved [Aspergillus clavatus NRRL 1]
  misc_feature (2)..(456): NCBI GI: 115400097 Blast Desc: conserved [Aspergillus terreus NIH2624] gi|114191303|gb|EAU33003.1| conserved [Aspergillus terreus NIH2624]
  misc_feature (2)..(452): NCBI GI: 119482892 Blast Desc: NFIA_026510 [Neosartorya fischeri NRRL 181] gi|119409629|gb|EAW19577.1| conserved [Neosartorya fischeri NRRL 181]
  misc_feature (2)..(453): NCBI GI: 146324844 Blast Desc: conserved [Aspergillus fumigatus Af293] gi|129556631|gb|EAL86941.2| conserved [Aspergillus fumigatus Af293]
  misc_feature: Useful for introducing or modulating the production of volatile compounds
MLSNQTIDDLRDGCFAPFFNEAAFPATGGYIPGRLCSNLTGSTCCLPCPLTEWVYPDNFGAATGSADWVNVAGMIGCAFLLLSWAVLPVERTHRHYLSICLTLAVVLMNFGFIIPLAAKPDQCFNEITPNGQESSSVCAASGAFLLFGGWGGVLWVFLRALSLHLQICWQLVVGRNYMWFSQALGWGVPIIGLVLLLIFSGVSFRFGTTCHINHENSLADFWIPLLIFAGLTVIIQFATFGYCIKVYLASLADNAVSTQTSGMRSYSNSIRTMTPRQAYRRVRRVIQLQWRGIVIVLIIAADVIFFAIIFVFLDNTEQRLKNDPEKALNWIACLVKTQGDKNACLDEASELVIGLPTVTAVLILLAMNGLWLLLILGRWSMVTGWVELFSSIGRRNQNEFLSVDARTDLKNDPRSYEIATKSPTQTGRRTPDYFGRPRYQPSQGSYSSPRSPKNVEFEMMNAYNNYPSSPLPTHEPAQSHSYSQGYNGINPLGMNRIEKQEEAGYGSNYSSTKGPEHAFI

SEQ ID NO: 1449 - DNA, 2562 bp, Muscodor strobelii; identical to SEQ ID NO: 1446
  misc_feature: SGI EST ID NO. CUFF.3974.2
  misc_feature: Variant of the nucleotide sequence at SEQ ID NO 1447

SEQ ID NO: 1450 - DNA, 2076 bp, Muscodor strobelii
  misc_feature: SGI cDNA ID NO. 560085
  misc_feature: Encodes the peptide sequence at SEQ ID NO 1451
atggcgagcatgtcaaagaggaacaatgtcgttcaggacactgcgcagtcgctcggccaagtccgagacagccatgcttctggtggcacaatcgtgtctgccgttttagacatacagagacacgtgatcacccgccgagacaattggatcaaatcccttgaatgcctatcgctggccgctgaccgcgagaacgaacctgctagcaagcgtcaaaggctggccaacggtgatagtgtctctccgtcctacgctcctagtcttctgcggcggacatacttggatccagtgacggattcagaaggcggaagagagtatgtcgccgtttcctatacgtgggacgtttctgaagaagaggaagagggagaaaacgggtacacctctggtgcttatctagtcgaatcacgtaaaacaggtgaactgtcacgtcccagcgatgtgagagacatggtttggatgcgtgcattaaaattcgctcaacatgtgaagtgcgagaacatctggattgatcgacactgcattgaccaaaccaacgagtctgaaaagcacatggcgattcaaaacatgcatcttgtctacagtctcgcgagatggcccattgccttgttgacgcgccctattcagacggccgaagagctagatgcactcgtaagcttgctcgtcggtgacgtaagagcggaagaggaagctcttgctctagagcttctcgacgatatcacctcagatcgttggtggcaaagagcctggacattccaggaagactacagagccgcgacacgtatgactttaatgataccacacgataacagccttgagtattcaaagcagtctgcccgggatttctcaaaccgaccactattcgggacaattccaggggagatatgtgtgaaatcagtcgatttccggagacaggccaccgaattttgtttgctgcgccgaaagaaacacccgcagagcgagaacacttgcaataggattctcatgactgccgggaaatacaatgtgctcctacgagaagaggactggcctcatccacatgcgcccatttcacgctccatgtcacctaccattttcaaggatatagggcgccgtggaatctccacagagtcagatcggctcgctatcgcggctaactgctgcaactacaccgctcgactcgacacagtagccctaaataaatgtggcagtagccttagtctctctcttctctcactcttcctattgaacggcgagataatgcaaaataagtcgcctcgttctcgtggagcactaaacaacacaatatatgagtatttggcaaagcagtctcttcgcagctttcgcccacccgtcgatgacgaactcacattcattaagagttgccgattcttgaacccgatcctcacacctgaagggacgcagactcatggacacttatggcgtcttggtaaggtgatccgacgtcacgcaccctacaagtattgtacactttcacccctcgaaaccttagccacagagctgcaatataagacttatggtgcttcctacgcggagcttgcactagatgtttatgcgaagtctcaagagtcttccggaatcaaagctgcgtcaaaacaacatcgacatcgcggccgtaatccattaaatcatgatcgaccctctgagtggcatgaatggatggtagacgaaattgaacgagcactactggaaggcaaagctctccgtttggcaagtttagttaaaactaaacatggcgatcattacgagccttacggtgctatctttgttggcgacgacagtgatgattggcaagacgaggaaattgaacaaggggctcgtcgcccgccaccccgatacgctttcacgtccgtggcatcgagcaggaaaccacgcattggagatcttcaaaagcacgtatctcttgaagtcgaaatagagtggccaagtactcacttggaccaaagctctgcagatgatcacgaagacgccgcgcctccaaagctatatatcaaacgatggctcaatggcctctgttttgcaaaagacgagcctcagcgagccgtaatattcccctggccagcagaccttctagaattatga

SEQ ID NO: 1451 - protein, 691 aa, Muscodor strobelii
  misc_feature: SGI Peptide ID NO. 560085
  misc_feature (105)..(252): Pfam Id: PF06985 Pfam Desc: Heterokaryon incompatibility protein (HET)
  misc_feature (166)..(193): Pfam Id: PF06985 Pfam Desc: Heterokaryon incompatibility protein (HET)
  misc_feature (13)..(689): NCBI GI: 238507972 Blast Desc: conserved [Aspergillus flavus NRRL3357] gi|220688706|gb|EED45058.1| conserved [Aspergillus flavus NRRL3357]
  misc_feature (32)..(685): NCBI GI: 46113901 Blast Desc: FG02946.1 [Gibberella zeae PH-1]
  misc_feature (31)..(690): NCBI GI: 256722257 Blast Desc: NECHADRAFT_86861 [Nectria haematococca mpVI 77-13-4]
  misc_feature (13)..(684): NCBI GI: 28950026 Blast Desc: [Neurospora crassa]
  misc_feature (289)..(603): NCBI GI: 169784806 Blast Desc: [Aspergillus oryzae RIB40] gi|83775611|dbj|BAE65731.1| protein product [Aspergillus oryzae]
  misc_feature (148)..(688): NCBI GI: 189197077 Blast Desc: conserved [Pyrenophora tritici-repentis Pt-1C-BFP] gi|187980824|gb|EDU47450.1| conserved [Pyrenophora tritici-repentis Pt-1C-BFP]
  misc_feature (157)..(474): NCBI GI: 169621859 Blast Desc: SNOG_14142 [Phaeosphaeria nodorum SN15] gi|160704638|gb|EAT78379.2| SNOG_14142 [Phaeosphaeria nodorum SN15]
  misc_feature (13)..(478): NCBI GI: 115387685 Blast Desc: [Aspergillus terreus NIH2624] gi|114195432|gb|EAU37132.1| [Aspergillus terreus NIH2624]
  misc_feature (59)..(478): NCBI GI: 225682264 Blast Desc: [Paracoccidioides brasiliensis Pb03]
  misc_feature (59)..(478): NCBI GI: 226289638 Blast Desc: [Paracoccidioides brasiliensis Pb18]
MASMSKRNNVVQDTAQSLGQVRDSHASGGTIVSAVLDIQRHVITRRDNWIKSLECLSLAADRENEPASKRQRLANGDSVSPSYAPSLLRRTYLDPVTDSEGGREYVAVSYTWDVSEEEEEGENGYTSGAYLVESRKTGELSRPSDVRDMVWMRALKFAQHVKCENIWIDRHCIDQTNESEKHMAIQNMHLVYSLARWPIALLTRPIQTAEELDALVSLLVGDVRAEEEALALELLDDITSDRWWQRAWTFQEDYRAATRMTLMIPHDNSLEYSKQSARDFSNRPLFGTIPGEICVKSVDFRRQATEFCLLRRKKHPQSENTCNRILMTAGKYNVLLREEDWPHPHAPISRSMSPTIFKDIGRRGISTESDRLAIAANCCNYTARLDTVALNKCGSSLSLSLLSLFLLNGEIMQNKSPRSRGALNNTIYEYLAKQSLRSFRPPVDDELTFIKSCRFLNPILTPEGTQTHGHLWRLGKVIRRHAPYKYCTLSPLETLATELQYKTYGASYAELALDVYAKSQESSGIKAASKQHRHRGRNPLNHDRPSEWHEWMVDEIERALLEGKALRLASLVKTKHGDHYEPYGAIFVGDDSDDWQDEEIEQGARRPPPRYAFTSVASSRKPRIGDLQKHVSLEVEIEWPSTHLDQSSADDHEDAAPPKLYIKRWLNGLCFAKDEPQRAVIFPWPADLLEL

SEQ ID NO: 1452 - DNA, 2838 bp, Muscodor strobelii
  misc_feature: SGI EST ID NO. CUFF.3848.0
  misc_feature: Variant of the nucleotide sequence at SEQ ID NO 1450
acccagtaagacattcgccccaaggaagttcaagacctgcctatgacgaatgtttacttgtcatgtcttgttcttatcggtattttctaggatcattggctagagaccagaacgagggtttggtcgcatcaagctctacttacctattctcttgtctctacttgctcgcccgtcttcagcattattggcttagataaaactaccgtctgcacatgttgtcagggttgattgcaggtgtcgttggttgcagtccgagactgaacaatgtcaccttgccacactcggcgcatcacttgatgacctcgttcgtaaaaaggcagcatcataatatgaaaataacaagacgccctcaggatagagttatgatcccatgagcgaaacgtggtgacaatttttaatcttaaattgaagaatgttggttgaagttaccctgtatcacctggtcagagagtggtcctagcacacacagatcgcttgtttcaggagttccctaacccttcaattgcaaatctgagcgcccgccgatcaaatcaatacaccgccgcgaccgtaacacgtaggcagtgcatggcgagcatgtcaaagaggaacaatgtcgttcaggacactgcgcagtcgctcggccaagtccgagacagccatgcttctggtggcacaatcgtgtctgccgttttagacatacagagacacgtgatcacccgccgagacaattggatcaaatcccttgaatgcctatcgctggccgctgaccgcgagaacgaacctgctagcaagcgtcaaaggctggccaacggtgatagtgtctctccgtcctacgctcctagtcttctgcggcggacatacttggatccagtgacggattcagaaggcggaagagagtatgtcgccgtttcctatacgtgggacgtttctgaagaagaggaagagggagaaaacgggtacacctctggtgcttatctagtcgaatcacgtaaaacaggtgaactgtcacgtcccagcgatgtgagagacatggtttggatgcgtgcattaaaattcgctcaacatgtgaagtgcgagaacatctggattgatcgacactgcattgaccaaaccaacgagtctgaaaagcacatggcgattcaaaacatgcatcttgtctacagtctcgcgagatggcccattgccttgttgacgcgccctattcagacggccgaagagctagatgcactcgtaagcttgctcgtcggtgacgtaagagcggaagaggaagctcttgctctagagcttctcgacgatatcacctcagatcgttggtggcaaagagcctggacattccaggaagactacagagccgcgacacgtatgactttaatgataccacacgataacagccttgagtattcaaagcagtctgcccgggatttctcaaaccgaccactattcgggacaattccaggggagatatgtgtgaaatcagtcgatttccggagacaggccaccgaattttgtttgctgcgccgaaagaaacacccgcagagcgagaacacttgcaataggattctcatgactgccgggaaatacaatgtgctcctacgagaagaggactggcctcatccacatgcgcccatttcacgctccatgtcacctaccattttcaaggatatagggcgccgtggaatctccacagagtcagatcggctcgctatcgcggctaactgctgcaactacaccgctcgactcgacacagtagccctaaataaatgtggcagtagccttagtctctctcttctctcactcttcctattgaacggcgagataatgcaaaataagtcgcctcgttctcgtggagcactaaacaacacaatatatgagtatttggcaaagcagtctcttcgcagctttcgcccacccgtcgatgacgaactcacattcattaagagttgccgattcttgaacccgatcctcacacctgaagggacgcagactcatggacacttatggcgtcttggtaaggtgatccgacgtcacgcaccctacaagtattgtacactttcacccctcgaaaccttagccacagagctgcaatataagacttatggtgcttcctacgcggagcttgcactagatgtttatgcgaagtctcaagagtcttccggaatcaaagctgcgtcaaaacaacatcgacatcgcggccgtaatccattaaatcatgatcgaccctctgagtggcatgaatggatggtagacgaaattgaacgagcactactggaaggcaaagctctccgtttggcaagtttagttaaaactaaacatggcgatcattacgagccttacggtgctatctttgttggcgacgacagtgatgattggcaagacgaggaaattgaacaaggggctcgtcgcccgccaccccgatacgctttcacgtccgtggcatcgagcaggaaaccacgcattggagatcttcaaaagcacgtatctcttgaagtcgaaatagagtggccaagtactcacttggaccaaagctctgcagatgatcacgaagacgccgcgcctccaaagctatatatcaaacgatggctcaatggcctctgttttgcaaaagacgagcctcagcgagccgtaatattcccctggccagcagaccttctagaattatgaaaagaacatagagcaatatttccctgatccgtcggggccttgtatatcagaatgtaacagagcacaaccgttggagtttgtaaatatagctcaatataattagtcttcccaattggaaaacaagatcgtgtattatttttaccacaatttcaagggtttaccatccatcaggattggcgtcagcaaatacggttc

SEQ ID NO: 1453 - DNA, 798 bp, Muscodor strobelii
  misc_feature: SGI cDNA ID NO. 560086
  misc_feature: Encodes the peptide sequence at SEQ ID NO 1454
atgctgtctcacactattgcttatttgctggctgggtctgctgccgttcgtgcgacccagatcttcagcaacactggcactacagcgggatgggataccttcacgcatgaaaataaaggcacggtgcaagaggtttccaacgtagtttacaaagggacgacggcgctgaagatgactcaaatacacgattccagctataatggccgatatcattctgaagcggtgaagtacaacgtttataaaaagggcgacatgggcttctacggcttcgccttccgactccaacaagactggcaattctccccagcgcaatcgtttaatcttgctcagtttattgctgactttaccgaccttggttatgggaaaggtgaaagagaactgatgcagtatttctctgacattagcatgccgagcacgatgatttggctagagggcgaccaactctacacaagagtgaagtacggcgaggtatgcccgaccagctctcaactcacgcgaactttcaaggatttgacgacagtgacgccaggcgaatggcacagggttgagctgcaggtaaactggcaaagcgatagtacaggatatttcaaggtctggtacgatggagaaaagttaagcgagacttataatatcccaacgaatgtcggggatggacggccgttccagttccgtgttggcctctatgcgaacggctggtatgacgatggatatgaagggagtcaaggaactagacaggtctggtatgacaacgtaagtgaccgaacctttcaattatcagaaactagccctctgtcttag

SEQ ID NO: 1454 - protein, 265 aa, Muscodor strobelii
  misc_feature: SGI Peptide ID NO. 560086
  misc_feature (9)..(255): NCBI GI: 159126714 Blast Desc: conserved [Aspergillus fumigatus A1163]
  misc_feature (9)..(255): NCBI GI: 70997627 Blast Desc: conserved [Aspergillus fumigatus Af293] gi|66851190|gb|EAL91516.1| conserved [Aspergillus fumigatus Af293]
  misc_feature (9)..(255): NCBI GI: 119479139 Blast Desc: NFIA_076310 [Neosartorya fischeri NRRL 181] gi|119407752|gb|EAW17701.1| conserved [Neosartorya fischeri NRRL 181]
  misc_feature (3)..(251): NCBI GI: 238494980 Blast Desc: conserved [Aspergillus flavus NRRL3357] gi|220695376|gb|EED51719.1| conserved [Aspergillus flavus NRRL3357]
  misc_feature (3)..(251): NCBI GI: 169777759 Blast Desc: [Aspergillus oryzae RIB40] gi|83772082|dbj|BAE62212.1| protein product [Aspergillus oryzae]
  misc_feature (7)..(252): NCBI GI: 121713546 Blast Desc: conserved [Aspergillus clavatus NRRL 1] gi|119402537|gb|EAW12958.1| conserved [Aspergillus clavatus NRRL 1]
  misc_feature (16)..(265): NCBI GI: 212538173 Blast Desc: conserved [Penicillium marneffei ATCC 18224] gi|210068984|gb|EEA23075.1| conserved [Penicillium marneffei ATCC 18224]
  misc_feature (1)..(251): NCBI GI: 67515461 Blast Desc: AN0012.2 [Aspergillus nidulans FGSC A4] gi|40746175|gb|EAA65331.1| AN0012.2 [Aspergillus nidulans FGSC A4] gi|259489806|tpe|CBF90385.1| TPA: conserved [Aspergillus FGSC
  misc_feature (21)..(251): NCBI GI: 115378110 Blast Desc: STIAU_2222 [Stigmatella aurantiaca DW4/3-1] gi|115364897|gb|EAU63955.1| STIAU_2222 [Stigmatella aurantiaca DW4/3-1]
  misc_feature (1)..(251): NCBI GI: 242804677 Blast Desc: integral membrane protein [Talaromyces stipitatus ATCC 10500] gi|218717768|gb|EED17189.1| integral membrane protein [Talaromyces stipitatus ATCC 10500]
MLSHTIAYLLAGSAAVRATQIFSNTGTTAGWDTFTHENKGTVQEVSNVVYKGTTALKMTQIHDSSYNGRYHSEAVKYNVYKKGDMGFYGFAFRLQQDWQFSPAQSFNLAQFIADFTDLGYGKGERELMQYFSDISMPSTMIWLEGDQLYTRVKYGEVCPTSSQLTRTFKDLTTVTPGEWHRVELQVNWQSDSTGYFKVWYDGEKLSETYNIPTNVGDGRPFQFRVGLYANGWYDDGYEGSQGTRQVWYDNVSDRTFQLSETSPLS

SEQ ID NO: 1455 - DNA, 2775 bp, Muscodor strobelii
  misc_feature: SGI cDNA ID NO. 560087
  misc_feature: Encodes the peptide sequence at SEQ ID NO 1456
atggctaaagctgaccaccgactgtgtgtgattgctttggtgtccggaggcaaggatagcttttactcaatcctccactgcttggctaatgaccatcgtgttgttgcgcttgcgaatctttaccccgctgagggatcgcaacacacctcaccgttaggcgcggacgacggcaagcaagctggtgacaatgacaccgacctgaatagcttcatgtaccaaactgttggtcaccaagtcattccgttatatgcgcaggcaacgggcattccactttaccggcagcccatcgtggggactgctgtcgaccaagggttgagctaccagaatcctcgtctagcttcggcgactagtctggggctcggacctcaggctgatcatctatcgacattgtcgacaccactcacagatgatgcgcacagacacgaactattgccacgccgaggagaagagcagctccagaactcagaagaggacgaaaccgaatcgttagtgcccttattacggaccattctcaaggcacacccggaagccaatgcgctttgtaccggtgccatattatcgacgtaccagcgcacaagagttgagtctgttgccttacgcctcggtttaacaccattatcgttcctgtggcagtacacagagctaccacggcctcctggtcgatgcgggatgactaagcatggtggcatcatccgtgatgatgctcagctgttacgggatatggctgccacgggccttgaagctcgtatggtaaaagttgcaagtgcgggtctcgacgaggacttcctatgggagaacgtaacaagcgaaggaggagtgcaccgcattgagcatgccatgcgtcggtttgggggtcttggaggtcgtggttcaattctcggcgagggtggtgagtttgagacacttgtcattgatggtccttctgtccttttcaaggggcgtgtgattgtatcagagaatgataagtgcattgtgcgcgagggcggcggatgtgcctggctgcgcttcgttcaggcgaatgttgagatgaagatggaatcagaatgggccgccaagaaggaattagatgatctcaaggtacgaattccagacctcttcgacgcaagattcgacaaagcgatgcaaactttgatcacaagcacaagctcttccaattatacgcagaacctggggttcgattaccccttaccctttgatacgaaaccctgtgttcccatcaatttcattcctcaacgcaagggcacaattccatcagacttattagaagtccgtccgggacaatcatctactcgagaatggcgattcattggcgactctgggggctcgttagcgggcattgaggagcagactatcggtatcgtggatgagattcgccgccgtctagatgcacaagcacttcctacgactgttataacaaactcactcattatcttacgacatatgtccgacttcccacgtgttaatgaacactatggctcacttttcccttatcctaacccgccagcgagggtcacgatctcttgcggcgaactcttaccccagcatgcagctatcgcgatatctttgacaatacaacctcatctacactcgagcgagatacgagggcttcacgtacagtctcgctcctactgggccccggccaacattgggccatatagtcaggctatttccttcccactttggtcatcgttgtccagagaatcaggatatgagaacactgatgagatatacgaaaaccctgacgatgaattcgagcagccctttgagccttccccttctgccgtgtgcatagctggccagataccactcattcctgcgctcatgacacttccgccacattctgagtcatatgatgagctacaaattactctggcattgcaacatctctggcgtgtagccattgaaatgcaagttcgctggtggacgagtgctgtcgcctactttcccgtcacgccatcccctgatatgatgcgccgccgcgcattgctagcagcaactgcgtggaaagccgcccatatctggccacaagacaacactggctcctctgatgtctaccgtgccgagagcgacttgagtgaagacgaagaagatgtttgggatcgtagatataatcttcaatctatggtgtaccacggtggcgaagaagaaaagtcattccccttgccactcccagactggagtgtcctgaaagggtatgcggacgaagacattacttcacctaacttagaagccaagattggttatatcccgttcatgttcgccgcagaagtcgaagagcttccgcgtcaagctggtgtcgaatggcaagctcacttaggtcttgccgagctaggatctgagtcggtggtcgtgcatcgtattcgacatcagaagatttccatatcggaggctttacatttaaatttagagatacaccataccatcgttgactctagtcatggcatcttcatacagacggtaacctgtttactgtaccctgaggcctataaatacgacgaaaggattcaattacccccgaaagtgctttatgaaatgagtgctactatcggtccctcgtttcaagatttaggatttccaatgatcaatcaaggcgagcccaagatcacttatactgactctttggagttgcaaacgagcaatgacggacagcttgcactaggagctcacatcccatgtcgctcgctctgggattttcaagggcgccgtcttagtgtcgtctgcgtgtttgaaacgcggctcaatattttgaagaaaaagcccaccaagcagacttga

SEQ ID NO: 1456 - protein, 924 aa, Muscodor strobelii
  misc_feature: SGI Peptide ID NO. 560087
  misc_feature (10)..(341): Pfam Id: PF01902 Pfam Desc: ATP-binding region
  misc_feature (177)..(210): Pfam Id: PF01902 Pfam Desc: ATP-binding region
  misc_feature (292)..(322): Pfam Id: PF01902 Pfam Desc: ATP-binding region
  misc_feature (7)..(811): NCBI GI: 38567186 Blast Desc: conserved [Neurospora crassa]
  misc_feature (4)..(913): NCBI GI: 46124985 Blast Desc: FG06870.1 [Gibberella zeae PH-1]
  misc_feature (8)..(914): NCBI GI: 256733118 Blast Desc: NECHADRAFT_38099 [Nectria haematococca mpVI 77-13-4]
  misc_feature (4)..(782): NCBI GI: 224492466 Blast Desc: ATP-binding endoribonuclease [Colletotrichum higginsianum]
  misc_feature (8)..(823): NCBI GI: 145611304 Blast Desc: MGG_00500 [Magnaporthe grisea 70-15] gi|145018603|gb|EDK02882.1| MGG_00500 [Magnaporthe grisea 70-15]
  misc_feature (71)..(811): NCBI GI: 164427808 Blast Desc: NCU02670 [Neurospora crassa OR74A] gi|157071892|gb|EAA36207.2| conserved [Neurospora crassa OR74A]
  misc_feature (8)..(769): NCBI GI: 119500718 Blast Desc: ATP binding L-PSP endoribonuclease family protein, [Neosartorya fischeri NRRL 181] gi|119415281|gb|EAW25219.1| ATP binding L-PSP endoribonuclease family protein, [Neosartorya NRRL
  misc_feature (8)..(911): NCBI GI: 159125167 Blast Desc: ATP binding L-PSP endoribonuclease family protein, [Aspergillus fumigatus A1163]
  misc_feature (8)..(911): NCBI GI: 70994142 Blast Desc: ATP binding L-PSP endoribonuclease family protein [Aspergillus fumigatus Af293] gi|66849552|gb|EAL89880.1| ATP binding L-PSP endoribonuclease family protein, [Aspergillus
  misc_feature (6)..(770): NCBI GI: 258577531 Blast Desc: UREG_02463 [Uncinocarpus reesii 1704] gi|237903213|gb|EEP77614.1| UREG_02463 [Uncinocarpus reesii 1704]
MAKADHRLCVIALVSGGKDSFYSILHCLANDHRVVALANLYPAEGSQHTSPLGADDGKQAGDNDTDLNSFMYQTVGHQVIPLYAQATGIPLYRQPIVGTAVDQGLSYQNPRLASATSLGLGPQADHLSTLSTPLTDDAHRHELLPRRGEEQLQNSEEDETESLVPLLRTILKAHPEANALCTGAILSTYQRTRVESVALRLGLTPLSFLWQYTELPRPPGRCGMTKHGGIIRDDAQLLRDMAATGLEARMVKVASAGLDEDFLWENVTSEGGVHRIEHAMRRFGGLGGRGSILGEGGEFETLVIDGPSVLFKGRVIVSENDKCIVREGGGCAWLRFVQANVEMKMESEWAAKKELDDLKVRIPDLFDARFDKAMQTLITSTSSSNYTQNLGFDYPLPFDTKPCVPINFIPQRKGTIPSDLLEVRPGQSSTREWRFIGDSGGSLAGIEEQTIGIVDEIRRRLDAQALPTTVITNSLIILRHMSDFPRVNEHYGSLFPYPNPPARVTISCGELLPQHAAIAISLTIQPHLHSSEIRGLHVQSRSYWAPANIGPYSQAISFPLWSSLSRESGYENTDEIYENPDDEFEQPFEPSPSAVCIAGQIPLIPALMTLPPHSESYDELQITLALQHLWRVAIEMQVRWWTSAVAYFPVTPSPDMMRRRALLAATAWKAAHIWPQDNTGSSDVYRAESDLSEDEEDVWDRRYNLQSMVYHGGEEEKSFPLPLPDWSVLKGYADEDITSPNLEAKIGYIPFMFAAEVEELPRQAGVEWQAHLGLAELGSESVVVHRIRHQKISISEALHLNLEIHHTIVDSSHGIFIQTVTCLLYPEAYKYDERIQLPPKVLYEMSATIGPSFQDLGFPMINQGEPKITYTDSLELQTSNDGQLALGAHIPCRSLWDFQGRRLSVVCVFETRLNILKKKPTKQT

SEQ ID NO: 1457 - DNA, 122 bp, Muscodor strobelii
  misc_feature: SGI EST ID NO. CUFF.3890.0
  misc_feature: Variant of the nucleotide sequence at SEQ ID NO 1455
gggtatgcggacgaagacattacttcacctaacttagaagccaagattggttatatcccgttcatgttcgccgcagaagtcgaagagcttccgcgtcaagctggtgtcgaatggcaagctca

SEQ ID NO: 1458 - DNA, 1764 bp, Muscodor strobelii
  misc_feature: SGI cDNA ID NO. 560088
  misc_feature: Encodes the peptide sequence at SEQ ID NO 1459
atgaagcaagcacgcagcatggataccaacatgatgaacacccagatgggcccagcggcattcttctattacacaccagatcccaacccagagaatcgccagcacggtcatttcagtcagcatcccgggtttcagcaaatacaacctcacatgtatcccgtagtgccgacgctcccgtccacgccgatatactcgcgcccgaactcatccagctcgcagctcgcagtcccaacgaaagtctttgcccctgtgcccagcaacttgacgccaatgcaatctccacagcggagaggtgtgattctcgccagccacccaagtaaactgatgctagagacggacacagtggacaatgacagcttttactatccagcaacgccagcattgtcaacgtcgggtagctccatgggaagcccggcgcacattccggatattcttgcaacccccttgaatccaatgttctctggcctggacggttgtgagatggtcaaagctgacgaggaaaccattccgaagccactggacggcctggattggtccagttgcggatctccacctttaactcctgtgtatttgcaacacttccaagaataccagccaggaaagagcatctcgctcgacaccaaccttccgtgtgacgtcgtctctgcacccaacacggtcgcaacaccagtatccagtgcaactccgtcttgcccatcgctttcgccttcaccatccccaaacgagagcgttgacttctgcgatcctcgcaacctcaccgttggcggtgttcccaacgcaccctcgccactggaattcactgcctctgccagcctgcaagctcacagtggcgactgcagtgccaaggaggtaaccctcgctgcctcctttgaattcaatcctgtggtccctcacggcttgtccgcatatgcggagcaccacggcctagcaagctttgatgacatctcagaccttgaatcagaagacgacttcgtcagccggctagtcaatctcggcgagcagcctctctcagaagccaaaagatctcgctctgcgacgtgttccaccaccctgtcgttaggccacgactccttcctcactgagacggacttcagctaccaggacacagcttcttgtgcctccaacagtctgtacgcttcaggaccgttacccgattctgatagtcacacagacaagaaagtcaaaagatcgaaggagtctaccagacctggacccaccatgaacgttgctgctgattcaacctcccagcagggcggccagcgggagacatctgcgcagagcgaatccaacgagacgaacaacaatgcctcgtcgggtactggatcagatgtgacgcccgcccctcttcctgctcctcccaaccgccgtggccgcaagcagtccctcacagaggacccaagcaagacgttcgtttgtgagctgtgcaaccgccggttccgacgtcaggaacacctgaaacgccattacagatctcttcatacccaggacaagcctttcaagtgcagtgagtgtcacaaatcgttttcacgaagtgataatcttgcgcaacatgcacgcactcacggcagtggcgccattgtgatgaacattctcgacggcagtgaagagtccctagacatgatggcctctgcagatggggattaccacaacttcggcaaagtgcttttccaagtagcttccgaaatccctggcagttctagcgacttctccgatgactcacaatctgagagcgctggtaagaagaagcgcaagcgttcagagtga

SEQ ID NO: 1459 - protein, 587 aa, Muscodor strobelii
  misc_feature: SGI Peptide ID NO. 560088
  misc_feature (499)..(521): Pfam Id: PF00096 Pfam Desc: Zinc finger, C2H2 type
  misc_feature (470)..(493): Pfam Id: PF00096 Pfam Desc: Zinc finger, C2H2 type
  misc_feature (7)..(587): NCBI GI: 1438949 Blast Desc: cutinase G-box binding protein [Nectria haematococca mpVI]
  misc_feature (7)..(587): NCBI GI: 256733119 Blast Desc: [Nectria haematococca mpVI 77-13-4]
  misc_feature (7)..(587): NCBI GI: 261356149 Blast Desc: cutinase G-box binding protein [Verticillium albo-atrum VaMs.102]
  misc_feature (7)..(587): NCBI GI: 46124987 Blast Desc: FG06871.1 [Gibberella zeae PH-1]
  misc_feature (11)..(587): NCBI GI: 21666597 Blast Desc: AF420473_1 stress response element binding protein [Trichoderma atroviride]
  misc_feature (11)..(587): NCBI GI: 116207086 Blast Desc: CHGG_02836 [Chaetomium globosum CBS 148.51] gi|88183433|gb|EAQ90901.1| CHGG_02836 [Chaetomium globosum CBS 148.51]
  misc_feature (31)..(587): NCBI GI: 39974705 Blast Desc: MGG_00501 [Magnaporthe grisea 70-15] gi|145018602|gb|EDK02881.1| MGG_00501 [Magnaporthe grisea 70-15] gi|194338883|gb|ACF49358.1| CGBP1 [Magnaporthe oryzae]
  misc_feature (16)..(587): NCBI GI: 154324244 Blast Desc: BC1G_00521 [Botryotinia fuckeliana B05.10] gi|150842750|gb|EDN17943.1| BC1G_00521 [Botryotinia fuckeliana B05.10]
  misc_feature (53)..(587): NCBI GI: 171680127 Blast Desc: protein product [Podospora anserina] gi|170939690|emb|CAP64916.1| protein product [Podospora anserina]
  misc_feature (16)..(587): NCBI GI: 156057357 Blast Desc: SS1G_04409 [Sclerotinia sclerotiorum 1980] gi|154702195|gb|EDO01934.1| SS1G_04409 [Sclerotinia sclerotiorum 1980]
MKQARSMDTNMMNTQMGPAAFFYYTPDPNPENRQHGHFSQHPGFQQIQPHMYPVVPTLPSTPIYSRPNSSSSQLAVPTKVFAPVPSNLTPMQSPQRRGVILASHPSKLMLETDTVDNDSFYYPATPALSTSGSSMGSPAHIPDILATPLNPMFSGLDGCEMVKADEETIPKPLDGLDWSSCGSPPLTPVYLQHFQEYQPGKSISLDTNLPCDVVSAPNTVATPVSSATPSCPSLSPSPSPNESVDFCDPRNLTVGGVPNAPSPLEFTASASLQAHSGDCSAKEVTLAASFEFNPVVPHGLSAYAEHHGLASFDDISDLESEDDFVSRLVNLGEQPLSEAKRSRSATCSTTLSLGHDSFLTETDFSYQDTASCASNSLYASGPLPDSDSHTDKKVKRSKESTRPGPTMNVAADSTSQQGGQRETSAQSESNETNNNASSGTGSDVTPAPLPAPPNRRGRKQSLTEDPSKTFVCELCNRRFRRQEHLKRHYRSLHTQDKPFKCSECHKSFSRSDNLAQHARTHGSGAIVMNILDGSEESLDMMASADGDYHNFGKVLFQVASEIPGSSSDFSDDSQSESAGKKKRKRSE

SEQ ID NO: 1460 - DNA, 3071 bp, Muscodor strobelii
  misc_feature: SGI EST ID NO. CUFF.5231.1
  misc_feature: Variant of the nucleotide sequence at SEQ ID NO 1458
tgcggtccccgaccaggactattctctcctccagcctgtgatcgacagtccggtcgacttacttgtagagtggtgtctctttcttgttcgaaccccatcggtttccttattatttctgtaactcagcttttggaactattcgttggctccctccacgaacttccctcacattcatttatcatacaagtcattcctgtcttcatcctcccactgtccttagtctgcctcagataagactctggagtcattgtcgaagcaggaaatttgtacaacatcatcacagccgagtctctcagttgacagcctttgaaaacatccctttcgaggctggcgtccattccttcctacgtggaaccgatatcaccgtcttttggccaaagcctaccaacaacctgtaaaatacgtgctatatatataccatatctaatccataaaccgggatcgcgataaccgacgtaaacacgattcgagaaccgcttaatatcccattgtactatcaacacgcagcatggataccaacatgatgaacacccagatgggcccagcggcattcttctattacacaccagatcccaacccagagaatcgccagcacggtcatttcagtcagcatcccgggtttcagcaaatacaacctcacatgtatcccgtagtgccgacgctcccgtccacgccgatatactcgcgcccgaactcatccagctcgcagctcgcagtcccaacgaaagtctttgcccctgtgcccagcaacttgacgccaatgcaatctccacagcggagaggtgtgattctcgccagccacccaagtaaactgatgctagagacggacacagtggacaatgacagcttttactatccagcaacgccagcattgtcaacgtcgggtagctccatgggaagcccggcgcacattccggatattcttgcaacccccttgaatccaatgttctctggcctggacggttgtgagatggtcaaagctgacgaggaaaccattccgaagccactggacggcctggattggtccagttgcggatctccacctttaactcctgtgtatttgcaacacttccaagaataccagccaggaaagagcatctcgctcgacaccaaccttccgtgtgacgtcgtctctgcacccaacacggtcgcaacaccagtatccagtgcaactccgtcttgcccatcgctttcgccttcaccatccccaaacgagagcgttgacttctgcgatcctcgcaacctcaccgttggcggtgttcccaacgcaccctcgccactggaattcactgcctctgccagcctgcaagctcacagtggcgactgcagtgccaaggaggtaaccctcgctgcctcctttgaattcaatcctgtggtccctcacggcttgtccgcatatgcggagcaccacggcctagcaagctttgatgacatctcagaccttgaatcagaagacgacttcgtcagccggctagtcaatctcggcgagcagcctctctcagaagccaaaagatctcgctctgcgacgtgttccaccaccctgtcgttaggccacgactccttcctcactgagacggacttcagctaccaggacacagcttcttgtgcctccaacagtctgtacgcttcaggaccgttacccgattctgatagtcacacagacaagaaagtcaaaagatcgaaggagtctaccagacctggacccaccatgaacgttgctgctgattcaacctcccagcagggcggccagcgggagacatctgcgcagagcgaatccaacgagacgaacaacaatgcctcgtcgggtactggatcagatgtgacgcccgcccctcttcctgctcctcccaaccgccgtggccgcaagcagtccctcacagaggacccaagcaagacgttcgtttgtgagctgtgcaaccgccggttccgacgtcaggaacacctgaaacgccattacagatctcttcatacccaggacaagcctttcaagtgcagtgagtgtcacaaatcgttttcacgaagtgataatcttgcgcaacatgcacgcactcacggcagtggcgccattgtgatgaacattctcgacggcagtgaagagtccctagacatgatggcctctgcagatggggattaccacaacttcggcaaagtgcttttccaagtagcttccgaaatccctggcagttctagcgacttctccgatgactcacaatctgagagcgctggtaagaagaagcgcaagcgttcagagtgaaagctacagtcatgtccctaacaacacaccggcacgacttgtggcattgcatatgacgattttacgattcttctttcatgaccattcagccgccaacatgatatctgtcgacaaggtaatgactagccgacggattgtatgaagacggactagggcgggaaaacggacctagaggattaaaagctgctttctgcatttaatcattgcctacctgccttatttgattcagcacagcgacaggcacaaagctcagcatcatcacgggcaacgggacgcaaccaattgggcaaggcaggatacgggaacttcttctgaatgacgaggcgcgatacgggttgatagaacaggtgtgattttctgcctccgaagatacgacatgcacacgcgcctacaatttggctttggcagcttccctttctctaccctcgttgtaataccctggagcagcggccaggccgccgatctgactcaggacaaagatttgtccgggattgccaaaatggcctatcaaggtgcatttctgacgacccattcttgtgctttaacttgattctttctcatgagttccttgctcgccatggatagtgctgagcacttcagaagatcacttcatgagcagtaggacctatttccaaagttcaatttgcagctgccaaccaaatacccacaaatttctccctcaatcatgttttaaaacttgtgaaattcgacgtgacctaatgtatgtgtatttatgacagtgactagtcctcaataattgagactattttcctgttcaaattggactttcgaatagaagcggaaaaatggcgtaatt

SEQ ID NO: 1461 - DNA, 1140 bp, Muscodor strobelii
  misc_feature: SGI cDNA ID NO. 560089
  misc_feature: Elevated expression when VOC is produced
  misc_feature: Encodes the peptide sequence at SEQ ID NO 1462
atggtttcagggcttcttcccgtagcttttgccggcgccgccatggccgcctgccctttatccgtcgaaatcacgggggcgactggtcatgtagctgacgttgccgtaaccaacacaggctcagaggccgtcaccgttttccgcgggaacactgtcctcatggagcacgctactcgggatctcttggttgctgatccctccggcaaggcattgcctttcgaaggcactttcgtccgctaccgaaagacgaatattgctcctgagatgttccagacaatccagcctggcgagactgtgagcacttcagtgaacgccgccaagagttacaaactcggtggtgtcgagtctgtcgacgtctctgctctacagggtttccattacgtgactggaaccactgtacctacatctttgaaggatacctctttctgccgcgcaacttcgaatactgtgagcattacgcccagtgaatcggctgcagaggaccatatcaccgctcgcgatgagcctgccttcaactcccgtgttcagaagagatctgttacatacagctcttgctcgacatcacaaacgacgtcgctgaaaacatccgtagctgacgcaattactcttgctaccaacgcatgtgagttaaacttgttcggacgcgaaccgtatcatcccatcgcacagctactcagtaaacatactgacttgtttgatgttgtagatactgcagcaggatcagccgcggattatttcacgacctggtttaagtccacatcagtacagtctaaagtgcagacaatttacaatgatgtaaagggtgtacagacaacatcccctaagatcagctgtacagacacctacggcgattgcgcagatggcagtgctctcctgtacaccgttccaagtgcgaaagttattgtgccatgccccaacaacggatactgggactttcccgagtacgcatcgacatgcgcagatgatgattacgacaaggcgggcagcattctacacgagatgacccacttgtatggaacggacgattatgcttacggacagaccgctgctaagcaactaacggcttctcaagctgctgcgaacgcggacacttacgagatctacgcaggaagcgttagacttggtggttgcagcagctaa

SEQ ID NO: 1462 - protein, 379 aa, Muscodor strobelii
  misc_feature: SGI Peptide ID NO. 560089
  misc_feature (1)..(376): Pfam Id: PF02102 Pfam Desc: Deuterolysin metalloprotease (M35) family
  misc_feature (278)..(376): Pfam Id: PF02102 Pfam Desc: Deuterolysin metalloprotease (M35) family
  misc_feature (17)..(379): NCBI GI: 85089784 Blast Desc: NCU05908 [Neurospora crassa OR74A] gi|28919431|gb|EAA28872.1| NCU05908 [Neurospora crassa OR74A]
  misc_feature (1)..(378): NCBI GI: 154302873 Blast Desc: BC1G_09180 [Botryotinia fuckeliana B05.10] gi|150855104|gb|EDN30296.1| BC1G_09180 [Botryotinia fuckeliana B05.10]
  misc_feature (1)..(378): NCBI GI: 156048254 Blast Desc: SS1G_08858 [Sclerotinia sclerotiorum 1980] gi|154693255|gb|EDN92993.1| SS1G_08858 [Sclerotinia sclerotiorum 1980]
  misc_feature (22)..(375): NCBI GI: 156032672 Blast Desc: SS1G_13741 [Sclerotinia sclerotiorum 1980] gi|154699144|gb|EDN98882.1| SS1G_13741 [Sclerotinia sclerotiorum 1980]
  misc_feature (6)..(375): NCBI GI: 263504909 Blast Desc: NPIIC_NANOT RecName: Full= neutral protease 2 homolog MCYG_04257; AltName: Full=Deuterolysin MCYG_04257; Flags: Precursor gi|238841776|gb|EEQ31438.1| metalloproteinase canis CBS
  misc_feature (19)..(375): NCBI GI: 85077806 Blast Desc: NCU05071 [Neurospora crassa OR74A] gi|28917104|gb|EAA26824.1| conserved [Neurospora crassa OR74A]
  misc_feature (20)..(369): NCBI GI: 263504918 Blast Desc: NPIIE_NANOT RecName: Full= neutral protease 2 homolog MCYG_01991; AltName: Full=Deuterolysin MCYG_01991; Flags: Precursor gi|238839510|gb|EEQ29172.1| metalloproteinase 8 canis
  misc_feature (20)..(375): NCBI GI: 154301542 Blast Desc: BC1G_10098 [Botryotinia fuckeliana B05.10] gi|150855760|gb|EDN30952.1| BC1G_10098 [Botryotinia fuckeliana B05.10]
  misc_feature (12)..(375): NCBI GI: 263505072 Blast Desc: NPIIB_TRIRU RecName: Full= neutral protease 2 homolog B; AltName: Full=Deuterolysin B; Flags: Precursor gi|183987801|gb|ACC65886.1| deuterolysin B [Trichophyton rubrum]
  misc_feature (2)..(375): NCBI GI: 39943414 Blast Desc: MGG_10927 [Magnaporthe grisea 70-15] gi|149209331|ref|XP_001522040.1| MGCH7_ch7g157 [Magnaporthe grisea 70-15] gi|86196112|gb|EAQ70750.1| MGCH7_ch7g157 grisea
  misc_feature (20)..(346): SWISSPROT Homolog: EC 3.4.24.39 Deuterolysin
  misc_feature: Useful for introducing or modulating the production of volatile compounds
MVSGLLPVAFAGAAMAACPLSVEITGATGHVADVAVTNTGSEAVTVFRGNTVLMEHATRDLLVADPSGKALPFEGTFVRYRKTNIAPEMFQTIQPGETVSTSVNAAKSYKLGGVESVDVSALQGFHYVTGTTVPTSLKDTSFCRATSNTVSITPSESAAEDHITARDEPAFNSRVQKRSVTYSSCSTSQTTSLKTSVADAITLATNACELNLFGREPYHPIAQLLSKHTDLFDVVDTAAGSAADYFTTWFKSTSVQSKVQTIYNDVKGVQTTSPKISCTDTYGDCADGSALLYTVPSAKVIVPCPNNGYWDFPEYASTCADDDYDKAGSILHEMTHLYGTDDYAYGQTAAKQLTASQAAANADTYEIYAGSVRLGGCSS

SEQ ID NO: 1463 - DNA, 647 bp, Muscodor strobelii
  misc_feature: SGI EST ID NO. CUFF.4128.0
  misc_feature: Variant of the nucleotide sequence at SEQ ID NO 1461
tagatactgcagcaggatcagccgcggattatttcacgacctggtttaagtccacatcagtacagtctaaagtgcagacaatttacaatgatgtaaagggtgtacagacaacatcccctaagatcagctgtacagacacctacggcgattgcgcagatggcagtgctctcctgtacaccgttccaagtgcgaaagttattgtgccatgccccaacaacggatactgggactttcccgagtacgcatcgacatgcgcagatgatgattacgacaaggcgggcagcattctacacgagatgacccacttgtatggaacggacgattatgcttacggacagaccgctgctaagcaactaacggcttctcaagctgctgcgaacgcggacacttacgagatctacgcaggaagcgttagacttggtggttgcagcagctaaagtgtggaggacacacgttgaatcgatatctctctgggacatgacccgacacttgaagatagatgatcagaattgtcgtagcttcctacccgagtgaatgatacgcattattacaacctctttgccttggtcttaccgtcgcagggctgtatgttgccaaagtgtagcctgaaggacactacgtgatatctctaagtgccatgcttgaat

SEQ ID NO: 1464 - DNA, 1017 bp, Muscodor strobelii
  misc_feature: SGI cDNA ID NO. 560090
  misc_feature: Encodes the peptide sequence at SEQ ID NO 1465
atggttttcacgattgccggaaaagagacaaagagcattggcttcggcctgctgagtcttaatttgcctcgtgaaaaccctattacaatcgatgacaagcttgcaatgatcaaggcggctgttaattccggcgccaattttctgaacggtgccgagttctacggaccaaatctgcaggacaattcgttgacgcttctgaacaaatactttcagaagtatcctgaggatgcggacaagctgattattagcatcaaaggcgggttgcgagaaggacacaaacccgataatagcccagaatacactcgcgagtccatcgaacattgcctcagccaattcggggacagggggaagatcgacatgtgggcaatggcgcgacgagtcactcaagaggactatgtcaaatctctccgcgtcattgacagtttcgtcaaggccggaaagataggtggtgtggctctaagtgaagtgaacgcgaactccatccgacaggctgcgaagattgtcaaggtagtcgctgtcgaaattgagatgtctctcttccataccgacccgctcgacaatggtattatccaggcttgttccgagctcgatatccccatcttggcctattctccgttaggacgcggcttcctcacgggcgcgatccagaagcctgaggatctttatgctgcattccaaagaataccgagatttcatcccgacaattgggaacaaaacatgaaacttgtcgaagccgtgagaggctgggcggccaaaaagggatgcactcctgcccaattatctatcaactggcttgcagcactgtctgaacgctcttctatgccaaaaatcctacccataccgggtgctgcatctttggcacgcattggtgaaaacattcacgaagtcaagctatcttcttcagatatgactgaaatagatcaattccttgagcaatttactgtccaaggcgagagagtaccgcagtttatgagagattggctggattccaacgatacgactgaggttactgcttga

SEQ ID NO: 1465 - protein, 338 aa, Muscodor strobelii
  misc_feature: SGI Peptide ID NO. 560090
  misc_feature (10)..(311): Pfam Id: PF00248 Pfam Desc: Aldo/keto reductase family
  misc_feature (37)..(311): Pfam Id: PF00248 Pfam Desc: Aldo/keto reductase family
  misc_feature (1)..(329): NCBI GI: 256732669 Blast Desc: NECHADRAFT_38751 [Nectria haematococca mpVI 77-13-4]
  misc_feature (2)..(329): NCBI GI: 85090582 Blast Desc: NCU07402 [Neurospora crassa OR74A] gi|28919852|gb|EAA29250.1| conserved [Neurospora crassa OR74A]
  misc_feature (1)..(331): NCBI GI: 116180740 Blast Desc: CHGG_00998 [Chaetomium globosum CBS 148.51] gi|88185295|gb|EAQ92763.1| CHGG_00998 [Chaetomium globosum CBS 148.51]
  misc_feature (5)..(322): NCBI GI: 67904384 Blast Desc: AN9179.2 [Aspergillus nidulans FGSC A4] gi|40742280|gb|EAA61470.1| AN9179.2 [Aspergillus nidulans FGSC A4] gi|259485392|tpe|CBF82377.1| TPA: pyridoxal reductase (AKR8),
  misc_feature (5)..(329): NCBI GI: 154318171 Blast Desc: BC1G_03253 [Botryotinia fuckeliana B05.10] gi|150842776|gb|EDN17969.1| BC1G_03253 [Botryotinia fuckeliana B05.10]
  misc_feature (5)..(325): NCBI GI: 115492031 Blast Desc: conserved [Aspergillus terreus NIH2624] gi|114197503|gb|EAU39203.1| conserved [Aspergillus terreus NIH2624]
  misc_feature (5)..(324): NCBI GI: 238484713 Blast Desc: aldo/keto reductase, [Aspergillus flavus NRRL3357] gi|220701645|gb|EED57983.1| aldo/keto reductase, [Aspergillus flavus NRRL3357]
  misc_feature (5)..(321): NCBI GI: 145257414 Blast Desc: An04g03570 [Aspergillus niger] gi|134058638|emb|CAK38622.1| protein product [Aspergillus niger]
  misc_feature (1)..(330): NCBI GI: 46124983 Blast Desc: FG06869.1 [Gibberella zeae PH-1]
  misc_feature (5)..(319): NCBI GI: 156062168 Blast Desc: SS1G_01199 [Sclerotinia sclerotiorum 1980] gi|154696536|gb|EDN96274.1| SS1G_01199 [Sclerotinia sclerotiorum 1980]
  misc_feature (5)..(319): SWISSPROT Homolog: EC 1.1.1.65 Pyridoxine 4-dehydrogenase
MVFTIAGKETKSIGFGLLSLNLPRENPITIDDKLAMIKAAVNSGANFLNGAEFYGPNLQDNSLTLLNKYFQKYPEDADKLIISIKGGLREGHKPDNSPEYTRESIEHCLSQFGDRGKIDMWAMARRVTQEDYVKSLRVIDSFVKAGKIGGVALSEVNANSIRQAAKIVKVVAVEIEMSLFHTDPLDNGIIQACSELDIPILAYSPLGRGFLTGAIQKPEDLYAAFQRIPRFHPDNWEQNMKLVEAVRGWAAKKGCTPAQLSINWLAALSERSSMPKILPIPGAASLARIGENIHEVKLSSSDMTEIDQFLEQFTVQGERVPQFMRDWLDSNDTTEVTA

SEQ ID NO: 1466 - DNA, 720 bp, Muscodor strobelii
  misc_feature: SGI cDNA ID NO. 560091
  misc_feature: Encodes the peptide sequence at SEQ ID NO 1467
atggcgtccccgagcaccccgcatatcacgacatcatcatcggcggcggcggcggcggaggagggagagggagagcgggagatatcgtcaacacagctcgcacagcttggtcgatcgacgtcgctcagctatttaacgccgagacgggagtctgcctatgaaaggatcaatggaatacttaagaatgcgagacagcgtgccgacaccatcaacagccaaccttcttggtctggcggcgacctgaacatgccctcgcaccgcccgacagccgactcccacgaagccgattgtcccgacgagtcgaccagcttggacgtggcccatgaacggcgcaactaccaggccacgcagacctcgtcgaacctccgaagccgtcagacaccgtcacgacccgaccctgaccccgcccgccagaacggcagctccgcgcaccacggatcggagaaatggggctggctggacggtatatggagcattgagctggagaataaggggagcgttgctagagaccacctcgccctggaaagaactttcctcgcatggctgaggacctccctttcgttcgcctcgattgggattgctatcacgcagctttttcggctcaacaccgctatatcagatgatgcgcatttggcaccgcttcgacatatcggtggtatgtatgacgtccagcagtgcaagtttctaaagtctctgtttctggaaggcctcccgagttga

SEQ ID NO: 1467 - protein, 239 aa, Muscodor strobelii
  misc_feature: SGI Peptide ID NO. 560091
  misc_feature (169)..(198): Pfam Id: PF02656 Pfam Desc: Domain of function DUF
  misc_feature (37)..(218): NCBI GI: 46124981 Blast Desc: FG06868.1 [Gibberella zeae PH-1]
  misc_feature (48)..(218): NCBI GI: 171687453 Blast Desc: protein product [Podospora anserina] gi|170943688|emb|CAP69340.1| protein product [Podospora anserina]
  misc_feature (51)..(218): NCBI GI: 261356142 Blast Desc: conserved [Verticillium albo-atrum VaMs.102]
  misc_feature (110)..(214): NCBI GI: 145241904 Blast Desc: An09g02840 [Aspergillus niger] gi|134078140|emb|CAK40221.1| protein product [Aspergillus niger]
  misc_feature (48)..(218): NCBI GI: 256733117 Blast Desc: NECHADRAFT_100094 [Nectria haematococca mpVI 77-13-4]
  misc_feature (127)..(239): NCBI GI: 212532059 Blast Desc: conserved [Penicillium marneffei ATCC 18224] gi|212532061|ref|XP_002146187.1| conserved [Penicillium marneffei ATCC 18224] gi|212532063|ref|XP_002146188.1| conserved marneffei
  misc_feature (148)..(211): NCBI GI: 239614742 Blast Desc: conserved [Ajellomyces dermatitidis ER-3]
  misc_feature (132)..(211): NCBI GI: 261189253 Blast Desc: conserved [Ajellomyces dermatitidis SLH14081] gi|239591823|gb|EEQ74404.1| conserved [Ajellomyces dermatitidis SLH14081]
  misc_feature (126)..(205): NCBI GI: 189208043 Blast Desc: PTRG_10023 [Pyrenophora tritici-repentis Pt-1C-BFP] gi|187976448|gb|EDU43074.1| PTRG_10023 [Pyrenophora tritici-repentis Pt-1C-BFP]
  misc_feature (153)..(213): NCBI GI: 258572542 Blast Desc: conserved [Uncinocarpus reesii 1704] gi|237905303|gb|EEP79704.1| conserved [Uncinocarpus reesii 1704]
MASPSTPHITTSSSAAAAAEEGEGEREISSTQLAQLGRSTSLSYLTPRRESAYERINGILKNARQRADTINSQPSWSGGDLNMPSHRPTADSHEADCPDESTSLDVAHERRNYQATQTSSNLRSRQTPSRPDPDPARQNGSSAHHGSEKWGWLDGIWSIELENKGSVARDHLALERTFLAWLRTSLSFASIGIAITQLFRLNTAISDDAHLAPLRHIGGMYDVQQCKFLKSLFLEGLPS

SEQ ID NO: 1468 - DNA, 1448 bp, Muscodor strobelii
  misc_feature: SGI EST ID NO. CUFF.4220.2
  misc_feature: Variant of the nucleotide sequence at SEQ ID NO 1466
cacagatgaatagctgcccgatggataatgtagcacaggttgttggcgcgtcgtgccaggtaaaagggaaggagggagactgtagactgtagcctctgatgtgtcgacttcgcaaactctaagtgacatctcagacggaaccatccgcacatgaccgacgaatctccaccactcgcaagagccactattatcgatgccacctgcgtcgcaaatcgaccggatggcctctgaagcacttctgggatcaattggccctacgtgcatcgctgatggcgtccccgagcaccccgcatatcacgacatcatcatcggcggcggcggcggcggaggagggagagggagagcgggagatatcgtcaacacagctcgcacagcttggtcgatcgacgtcgctcagctatttaacgccgagacgggagtctgcctatgaaaggatcaatggaatacttaaggtttgccctcgcttcgtgccttcctgccccatcagtcaagctcaagcccgtgccccgccgacccgactccactctggtattgcgtgatcgtctagattccagcaaagctgacgcgatgcccttgatcgccgccagaatgcgagacagcgtgccgacaccatcaacagccaaccttcttggtctggcggcgacctgaacatgccctcgcaccgcccgacagccgactcccacgaagccgattgtcccgacgagtcgaccagcttggacgtggcccatgaacggcgcaactaccaggccacgcagacctcgtcgaacctccgaagccgtcagacaccgtcacgacccgaccctgaccccgcccgccagaacggcagctccgcgcaccacggatcggagaaatggggctggctggacggtatatggagcattgagctggagaataaggggagcgttgctagagaccacctcgccctggaaagaactttcctcgcatggctgaggacctccctttcgttcgcctcgattgggattgctatcacgcagctttttcggctcaacaccgctatatcagatgatgcgcatttggcaccgcttcgacatatcggtaggcctttaggttcgaccttcatagggataagtattctagtcttgctcctcgggtatcacaggtggtatgtatgacgtccagcagtgcaagtttctaaagtctctgtttctggaaggcctcccgagttgataatttgagctgacaattcttgcagtatgtgactcttcactataacgtagctcgagaaagtattcattagatactggactaacgtgctcgcatataccagattatgaaagccagcagtgggttctgcgaggcaaatttccagcgagtcgagggactatcatactggtctcattcgtagcattcgccctaatgatcgcgagtctcgttgttatcatatttatacaacccggtagctgataataaacttaatacctgtcttt

SEQ ID NO: 1469 - DNA, 2064 bp, Muscodor strobelii
  misc_feature: SGI cDNA ID NO. 560092
  misc_feature: Encodes the peptide sequence at SEQ ID NO 1470
atgtctctccttacgcaatcggtagacattcctggattcacccgtacccagattgctttgctggatgctgagcttgagacggaggttctagaaaccagcgctctgatcacaaatacaactccgaaagcactgcagcgcgctggccttgccatcatcaacttgacagtaacgtcgcaacgaacgggactaggtgggcgaactgtcttgtccctcagccccgatagtgcgactgcgagcgacggtaacaatgagattgagagcgggatccgaacaggcgacatcgttctcctgtccgagcagcccaaaggtagcgctaagaagcgagaaatcagtgaattggaaaagaaaggtgtacgtggagtcgtcaccaaggtcaagaaagaggcagtcttcgtcgccatcgatgatgataaagattcttcattcctttctggtcgagcatggctagtcaagctatcagatgatgttacctaccgtcgtctgaacatgacgatggagaagctgaacaagatggccgagtctgactatacaagcttcatccgagtgcttttcggtctgtctgctccgtcaccagtacctcgagatttgcacacggatcccgagtatggcgaaatcgagtggttcgacccttcgctaaatgagtcccaaaaggatgctatccgctttgctcttgcatctaaagaagttgcattgattcatgggccgcccggcacgggtaagacttatacgttagttgaactaattcgacaaatgactaggagagatctccgagttctagtgtgcggcccatcaaacatatcagttgacaacattgtcgagcgacttgcgccatgtaaactacccattctcagactgggtcatcccgctcgactgcttccttccgtcgtcgaccattctcttgacgttctcacacaaacatcagaagcaggcttgattgtcaaagatgtgcgcgtggaaatggacgccaagcaggcgtcgatcaagaaaaccaagagcggtaaggagcgcaaggcgatctatggtgatctaaaagagcttcggaaggaatttagggagcgcgaacgcacttgcatcgatacgttggtcaaaaacagcaaggttgtgcttgcaactttgcatggggcaggtgggcatcagctcaaagatcaacgtttcgacgtggttatcatcgacgaggcctcacaatctttagaggcccaatgctgggtaccactattgactgcgaagaaagctgtgtttgcaggcgatcatttgcagcttcccccaactgtgaagagttccaataccaaggcaaaactaaaagggaacagcgaaatgattaaaggcgtggctctggaaactacactgttcgataggcttctgtcattacatggcacatcaataaagcgaatgctaacaacccagtaccgaatgcatgaggcaatcatgcgattcccctcggaccagctgtacgagtccaaactactagcctactctgctgtcaagagccgactcctgaaagacttgccgtatggtgtagaagacacagaagacactagcgaacccgtgatcttcctcgacacgcaaggtggagactttccggaaaagaacgaagaagaagagggcgatagtgggaagaaaggcagtatccgatcactgtacagtgagagcaaaagcaacgagatggaagcagccttggtgagagagcatgtccggaaactaataaatgctggtgttaaagcggaggatatcgcattaatatccccatacaatgcccagcttggccttttggctcctttgaaagatgtgtatcccggaatcgagctcggatctgttgacgggttccaaggccgtgagaaagaagctgtgatcgtctctctagtcagaagtaattctgtgggcgaggtcgggtttctgagtgaaaagcgtcgactcaatgttgcaatgacccgaccgaaacgatcacttgtcatcgttggagactccgaaactataaaaaggggtagcaagtttctgagcagctggatgagctggctcgaggataatgcggatcttcgatacgttgacgcggcttctgtcatgtga

SEQ ID NO: 1470 - protein, 687 aa, Muscodor strobelii
  misc_feature: SGI Peptide ID NO. 560092
  misc_feature (5)..(686): NCBI GI: 85090568 Blast Desc: NCU07395 [Neurospora crassa OR74A] gi|28919845|gb|EAA29243.1| NCU07395 [Neurospora crassa OR74A]
  misc_feature (6)..(686): NCBI GI: 156061925 Blast Desc: SS1G_03108 [Sclerotinia sclerotiorum 1980] gi|154700509|gb|EDO00248.1| SS1G_03108 [Sclerotinia sclerotiorum 1980]
  misc_feature (8)..(659): NCBI GI: 46124979 Blast Desc: FG06867.1 [Gibberella zeae PH-1]
  misc_feature (1)..(660): NCBI GI: 154311776 Blast Desc: BC1G_06347 [Botryotinia fuckeliana B05.10] gi|150850858|gb|EDN26051.1| BC1G_06347 [Botryotinia fuckeliana B05.10]
  misc_feature (35)..(642): NCBI GI: 145611308 Blast Desc: MGG_11568 [Magnaporthe grisea 70-15] gi|145018606|gb|EDK02885.1| MGG_11568 [Magnaporthe grisea 70-15]
  misc_feature (7)..(686): NCBI GI: 171687455 Blast Desc: protein product [Podospora anserina] gi|170943689|emb|CAP69341.1| protein product [Podospora anserina]
  misc_feature (8)..(687): NCBI GI: 212526278 Blast Desc: DNA helicase, [Penicillium marneffei ATCC 18224] gi|210072694|gb|EEA26781.1| DNA helicase, [Penicillium marneffei ATCC 18224]
  misc_feature (146)..(686): NCBI GI: 116180746 Blast Desc: CHGG_01001 [Chaetomium globosum CBS 148.51] gi|88185298|gb|EAQ92766.1| CHGG_01001 [Chaetomium globosum CBS 148.51]
  misc_feature (9)..(686): NCBI GI: 189208013 Blast Desc: DNA-binding protein SMUBP-2 [Pyrenophora tritici-repentis Pt-1C-BFP] gi|187976433|gb|EDU43059.1| DNA-binding protein SMUBP-2 [Pyrenophora tritici-repentis
  misc_feature (4)..(687): NCBI GI: 242780461 Blast Desc: DNA helicase, [Talaromyces stipitatus ATCC 10500] gi|218719747|gb|EED19166.1| DNA helicase, [Talaromyces stipitatus ATCC 10500]
MSLLTQSVDIPGFTRTQIALLDAELETEVLETSALITNTTPKALQRAGLAIINLTVTSQRTGLGGRTVLSLSPDSATASDGNNEIESGIRTGDIVLLSEQPKGSAKKREISELEKKGVRGVVTKVKKEAVFVAIDDDKDSSFLSGRAWLVKLSDDVTYRRLNMTMEKLNKMAESDYTSFIRVLFGLSAPSPVPRDLHTDPEYGEIEWFDPSLNESQKDAIRFALASKEVALIHGPPGTGKTYTLVELIRQMTRRDLRVLVCGPSNISVDNIVERLAPCKLPILRLGHPARLLPSVVDHSLDVLTQTSEAGLIVKDVRVEMDAKQASIKKTKSGKERKAIYGDLKELRKEFRERERTCIDTLVKNSKVVLATLHGAGGHQLKDQRFDVVIIDEASQSLEAQCWVPLLTAKKAVFAGDHLQLPPTVKSSNTKAKLKGNSEMIKGVALETTLFDRLLSLHGTSIKRMLTTQYRMHEAIMRFPSDQLYESKLLAYSAVKSRLLKDLPYGVEDTEDTSEPVIFLDTQGGDFPEKNEEEEGDSGKKGSIRSLYSESKSNEMEAALVREHVRKLINAGVKAEDIALISPYNAQLGLLAPLKDVYPGIELGSVDGFQGREKEAVIVSLVRSNSVGEVGFLSEKRRLNVAMTRPKRSLVIVGDSETIKRGSKFLSSWMSWLEDNADLRYVDAASVM

SEQ ID NO: 1471 - DNA, 878 bp, Muscodor strobelii
  misc_feature: SGI EST ID NO. CUFF.4229.0
  misc_feature: Variant of the nucleotide sequence at SEQ ID NO 1469
aaaacagcaaggttgtgcttgcaactttgcatggggcaggtgggcatcagctcaaagatcaacgtttcgacgtggttatcatcgacgaggcctcacaatctttagaggcccaatgctgggtaccactattgactgcgaagaaagctgtgtttgcaggcgatcatttgcagcttcccccaactgtgaagagttccaataccaaggcaaaactaaaagggaacagcgaaatgattaaaggcgtggctctggaaactacactgttcgataggcttctgtcattacatggcacatcaataaagcgaatgctaacaacccagtaccgaatgcatgaggcaatcatgcgattcccctcggaccagctgtacgagtccaaactactagcctactctgctgtcaagagccgactcctgaaagacttgccgtatggtgtagaagacacagaagacactagcgaacccgtgatcttcctcgacacgcaaggtggagactttccggaaaagaacgaagaagaagagggcgatagtgggaagaaaggcagtatccgatcactgtacagtgagagcaaaagcaacgagatggaagcagccttggtgagagagcatgtccggaaactaataaatgctggtgttaaagcggaggatatcgcattaatatccccatacaatgcccagcttggccttttggctcctttgaaagatgtgtatcccggaatcgagctcggatctgttgacgggttccaaggccgtgagaaagaagctgtgatcgtctctctagtcagaagtaattctgtgggcgaggtcgggtttctgagtgaaaagcgtcgactcaatgttgcaatgacccgaccgaaacgatcacttgtcatcgttggagactcc

SEQ ID NO: 1472 - DNA, 2070 bp, Muscodor strobelii
  misc_feature: SGI cDNA ID NO. 560093
  misc_feature: Encodes the peptide sequence at SEQ ID NO 1473
atgtctctccttacgcaatcggtagacattcctggattcacccgtacccagattgctttgctggatgctgagcttgagacggaggttctagaaaccagcgctctgatcacaaatacaactccgaaagcactgcagcgcgctggccttgccatcatcaacttgacagtaacgtcgcaacgaacgggactaggtgggcgaactgtcttgtccctcagccccgatagtgcgactgcgagcgacggtaacaatgagattgagagcgggatccgaacaggcgacatcgttctcctgtccgagcagcccaaaggtagcgctaagaagcgagaaatcagtgaattggaaaagaaaggtgtacgtggagtcgtcaccaaggtcaagaaagaggcagtcttcgtcgccatcgatgatgataaagattcttcattcctttctggtcgagcatggctagtcaagctatcagatgatgttacctaccgtcgtctgaacatgacgatggagaagctgaacaagatggccgagtctgactatacaagcttcatccgagtgcttttcggtctgtctgctccgtcaccagtacctcgagatttgcacacggatcccgagtatggcgaaatcgagtggttcgacccttcgctaaatgagtcccaaaaggatgctatccgctttgctcttgcatctaaagaagttgcattgattcatgggccgcccggcacgggtaagacttatacgttagttgaactaattcgacaaatgactaggagagatctccgagttctagtgtgcggcccatcaaacatatcagttgacaacattgtcgagcgacttgcgccatgtaaactacccattctcagactgggtcatcccgctcgactgcttccttccgtcgtcgaccattctcttgacgttctcacacaaacatcagaagcaggcttgattgtcaaagatgtgcgcgtggaaatggacgccaagcaggcgtcgatcaagaaaaccaagagcggtaaggagcgcaaggcgatctatggtgatctaaaagagcttcggaaggaatttagggagcgcgaacgcacttgcatcgatacgttggtcaaaaacagcaaggttgtgcttgcaactttgcatggggcaggtgggcatcagctcaaagatcaacgtttcgacgtggttatcatcgacgaggcctcacaatctttagaggcccaatgctgggtaccactattgactgcgaagaaagctgtgtttgcaggcgatcatttgcagcttcccccaactgtgaagagttccaataccaaggcaaaactaaaagggaacagcgaaatgattaaaggcgtggctctggaaactacactgttcgataggcttctgtcattacatggcacatcaataaagcgaatgctaacaacccagtaccgaatgcatgaggcaatcatgcgattcccctcggaccagctgtacgagtccaaactactagcctactctgctgtcaagagccgactcctgaaagacttgccgtatggtgtagaagacacagaagacactagcgaacccgtgatcttcctcgacacgcaaggtggagactttccggaaaagaacgaagaagaagagggcgatagtgggaagaaaggcagtatccgatcactgtacagtgagagcaaaagcaacgagatggaagcagccttggtgagagagcatgtccggaaactaataaatgctggtgttaaagcggaggatatcgcattaatatccccatacaatgcccagcttggccttttggctcctttgaaagatgtgtatcccggaatcgagctcggatctgttgacgggttccaaggccgtgagaaagaagctgtgatcgtctctctagtcagaagtaattctgtgggcgaggtcgggtttctgagtgaaaagcgtcgactcaatgtactagttgcaatgacccgaccgaaacgatcacttgtcatcgttggagactccgaaactataaaaaggggtagcaagtttctgagcagctggatgagctggctcgaggataatgcggatcttcgatacgttgacgcggcttctgtcatgtga

SEQ ID NO: 1473 - protein, 689 aa, Muscodor strobelii
  misc_feature: SGI Peptide ID NO. 560093
  misc_feature (8)..(689): NCBI GI: 240282138 Blast Desc: insulin II gene enhancer-binding protein rip1 [Ajellomyces capsulatus H143]
  misc_feature (5)..(688): NCBI GI: 85090568 Blast Desc: NCU07395 [Neurospora crassa OR74A] gi|28919845|gb|EAA29243.1| NCU07395 [Neurospora crassa OR74A]
  misc_feature (6)..(688): NCBI GI: 156061925 Blast Desc: SS1G_03108 [Sclerotinia sclerotiorum 1980] gi|154700509|gb|EDO00248.1| SS1G_03108 [Sclerotinia sclerotiorum 1980]
  misc_feature (6)..(661): NCBI GI: 46124979 Blast Desc: FG06867.1 [Gibberella zeae PH-1]
  misc_feature (1)..(662): NCBI GI: 154311776 Blast Desc: BC1G_06347 [Botryotinia fuckeliana B05.10] gi|150850858|gb|EDN26051.1| BC1G_06347 [Botryotinia fuckeliana B05.10]
  misc_feature (35)..(650): NCBI GI: 145611308 Blast Desc: MGG_11568 [Magnaporthe grisea 70-15] gi|145018606|gb|EDK02885.1| MGG_11568 [Magnaporthe grisea 70-15]
  misc_feature (7)..(688): NCBI GI: 171687455 Blast Desc: protein product [Podospora anserina] gi|170943689|emb|CAP69341.1| protein product [Podospora anserina]
  misc_feature (8)..(689): NCBI GI: 212526278 Blast Desc: DNA helicase, [Penicillium marneffei ATCC 18224] gi|210072694|gb|EEA26781.1| DNA helicase, [Penicillium marneffei ATCC 18224]
  misc_feature (146)..(688): NCBI GI: 116180746 Blast Desc: CHGG_01001 [Chaetomium globosum CBS 148.51] gi|88185298|gb|EAQ92766.1| CHGG_01001 [Chaetomium globosum CBS 148.51]
  misc_feature (9)..(688): NCBI GI: 189208013 Blast Desc: DNA-binding protein SMUBP-2 [Pyrenophora tritici-repentis Pt-1C-BFP] gi|187976433|gb|EDU43059.1| DNA-binding protein SMUBP-2 [Pyrenophora tritici-repentis
MSLLTQSVDIPGFTRTQIALLDAELETEVLETSALITNTTPKALQRAGLAIINLTVTSQRTGLGGRTVLSLSPDSATASDGNNEIESGIRTGDIVLLSEQPKGSAKKREISELEKKGVRGVVTKVKKEAVFVAIDDDKDSSFLSGRAWLVKLSDDVTYRRLNMTMEKLNKMAESDYTSFIRVLFGLSAPSPVPRDLHTDPEYGEIEWFDPSLNESQKDAIRFALASKEVALIHGPPGTGKTYTLVELIRQMTRRDLRVLVCGPSNISVDNIVERLAPCKLPILRLGHPARLLPSVVDHSLDVLTQTSEAGLIVKDVRVEMDAKQASIKKTKSGKERKAIYGDLKELRKEFRERERTCIDTLVKNSKVVLATLHGAGGHQLKDQRFDVVIIDEASQSLEAQCWVPLLTAKKAVFAGDHLQLPPTVKSSNTKAKLKGNSEMIKGVALETTLFDRLLSLHGTSIKRMLTTQYRMHEAIMRFPSDQLYESKLLAYSAVKSRLLKDLPYGVEDTEDTSEPVIFLDTQGGDFPEKNEEEEGDSGKKGSIRSLYSESKSNEMEAALVREHVRKLINAGVKAEDIALISPYNAQLGLLAPLKDVYPGIELGSVDGFQGREKEAVIVSLVRSNSVGEVGFLSEKRRLNVLVAMTRPKRSLVIVGDSETIKRGSKFLSSWMSWLEDNADLRYVDAASVM

SEQ ID NO: 1474 - DNA, 878 bp, Muscodor strobelii; identical to SEQ ID NO: 1471
  misc_feature: SGI EST ID NO. CUFF.4229.0
  misc_feature: Variant of the nucleotide sequence at SEQ ID NO 1472

SEQ ID NO: 1475 - DNA, 1596 bp, Muscodor strobelii
  misc_feature: SGI cDNA ID NO. 560094
  misc_feature: Reduced expression when VOC is produced
  misc_feature: Encodes the peptide sequence at SEQ ID NO 1476
atggaggaaagagcatcggtagctatgtcatcgcaggcagctttcaaccctgcacgggagcaaaagggtgaatccttgatgcagtctgggcccagtcaggcctcagcgaccccaactcgccagcgacggcaaaccctgaggtattccactgctagcgaagctaccaacctggatccaacggtacaaaagaaatcgacgttgagagtcacgatcgccaagctatttgggcgtaagaagaagggaagtcggtcgggatccgactcggaggctcaggcaaggtcatcagaagatcaacgccgaagtaatcctgtaacaacggcgaggatgtctggcacggagggagaaccaaaacgatcagcatcgcttcctctcaatgaattcaatcaggctctaagatcgcactcgcttggccccgatgatttgatggcaattcgtagctctcttcaggatccagtgtctgtattttcgaggcagagggccgtcacaactcccgatcgatattcgaatctcagggacggaggcacgggtatcactggtctttctcctcggccagctagcgcgcaagcacgcgatgctgccgatgatgttgatccgaacactattggtagggcgatttcgggtgatctttcaagcacaagaaggaggtcgagaagtctttcacaattacctgatgtcgctgatgcacaagggaccgtgcgaaatcgcagtgcagaaatccggtattggagggcaagtcacgatccagagtctttacctagcccgattgaagatgagacgaaaatgaacaactcatccggagatgctgaaatacagccgaatacacctcttcaaccttttgatttcggaccgatgcaaatcaccaaagctgcgagcctggaagatcgtatcactgccctggaggctcaaaataagaagttggaatcgttggtatacaaattattccaggttagcgcaagcgtcaaacattctagtgagtctggttctcggactgcgctgtatgacggtcccgcgacaacgcatgatcgcaatttggattctgagagagagagcgaatcgaacgaatcttttgaagatagcaataccttcgtcggttcaacacccgccttccctactgctgctccacgcccattatctaataccacaattcaatctactaccacaattcgaggggtagcaagcctccctactctttcaggacatttaacaccagatcactacacaaccatgaaagcgttgctagatggagagcgtgccgctaggcaccaactcgagattacagtcacaaagttaactcacaaagtcgacatgctggcgacgatgaaatatcagcatgacgcagatgcagtgccggtatctagattcgatgatgacgacgatgataatgatgaagagcccctgagcgcgagcgtaggggatacttcagacgctttcaagactccacgagaagaagaatacccccttggcgcatttggcgaggaactcagagacgaagaagacggatctcgaaaaaaggcagcgagaactctctctttaagtcaactcacactacctggcaaatcgaaaaagcgtgatccaacagatgaggttgatttatga

SEQ ID NO: 1476 - protein, 531 aa, Muscodor strobelii
  misc_feature: SGI Peptide ID NO. 560094
  misc_feature (57)..(516): NCBI GI: 256733116 Blast Desc: NECHADRAFT_38820 [Nectria haematococca mpVI 77-13-4]
  misc_feature (62)..(516): NCBI GI: 46124977 Blast Desc: FG06866.1 [Gibberella zeae PH-1]
  misc_feature (46)..(442): NCBI GI: 171687457 Blast Desc: protein product [Podospora anserina] gi|170943690|emb|CAP69342.1| protein product [Podospora anserina]
  misc_feature (45)..(442): NCBI GI: 116180748 Blast Desc: CHGG_01002 [Chaetomium globosum CBS 148.51] gi|88185299|gb|EAQ92767.1| CHGG_01002 [Chaetomium globosum CBS 148.51]
  misc_feature (52)..(516): NCBI GI: 156061923 Blast Desc: SS1G_03107 [Sclerotinia sclerotiorum 1980] gi|154700508|gb|EDO00247.1| SS1G_03107 [Sclerotinia sclerotiorum 1980]
  misc_feature (25)..(316): NCBI GI: 85090574 Blast Desc: NCU07398 [Neurospora crassa OR74A] gi|28919848|gb|EAA29246.1| [Neurospora crassa OR74A]
  misc_feature (62)..(442): NCBI GI: 39974713 Blast Desc: MGG_00497 [Magnaporthe grisea 70-15] gi|145018607|gb|EDK02886.1| MGG_00497 [Magnaporthe grisea 70-15]
  misc_feature (92)..(307): NCBI GI: 154311772 Blast Desc: BC1G_06345 [Botryotinia fuckeliana B05.10] gi|150850856|gb|EDN26049.1| BC1G_06345 [Botryotinia fuckeliana B05.10]
  misc_feature (441)..(516): NCBI GI: 39974713 Blast Desc: MGG_00497 [Magnaporthe grisea 70-15] gi|145018607|gb|EDK02886.1| MGG_00497 [Magnaporthe grisea 70-15]
  misc_feature (271)..(516): NCBI GI: 261356140 Blast Desc: conserved [Verticillium albo-atrum VaMs.102]
  misc_feature: Useful for introducing or modulating the production of volatile compounds
MEERASVAMSSQAAFNPAREQKGESLMQSGPSQASATPTRQRRQTLRYSTASEATNLDPTVQKKSTLRVTIAKLFGRKKKGSRSGSDSEAQARSSEDQRRSNPVTTARMSGTEGEPKRSASLPLNEFNQALRSHSLGPDDLMAIRSSLQDPVSVFSRQRAVTTPDRYSNLRDGGTGITGLSPRPASAQARDAADDVDPNTIGRAISGDLSSTRRRSRSLSQLPDVADAQGTVRNRSAEIRYWRASHDPESLPSPIEDETKMNNSSGDAEIQPNTPLQPFDFGPMQITKAASLEDRITALEAQNKKLESLVYKLFQVSASVKHSSESGSRTALYDGPATTHDRNLDSERESESNESFEDSNTFVGSTPAFPTAAPRPLSNTTIQSTTTIRGVASLPTLSGHLTPDHYTTMKALLDGERAARHQLEITVTKLTHKVDMLATMKYQHDADAVPVSRFDDDDDDNDEEPLSASVGDTSDAFKTPREEEYPLGAFGEELRDEEDGSRKKAARTLSLSQLTLPGKSKKRDPTDEVDL

SEQ ID NO: 1477 - DNA, 3589 bp, Muscodor strobelii
  misc_feature: SGI EST ID NO. CUFF.4235.0
  misc_feature: Variant of the nucleotide sequence at SEQ ID NO 1475
gcgctgttacggtttctcgttgcagcacacgatatgtcaaattacctttcataaactcgctggggcccgtctcctggcctatcttcgcattctggtggaaggtcttctctggcattctgagccacttaactcataataacgagccgccgttccgataggctgcatatttcctgagcgatatgagctaaacacattactgaagcacactctttcaatgttgccagactaatagaagtactccactcgctggcgaacgacgatggatcgctggtcgtttattttgaatgattccactactgcgtcttcgcacactcgttagaagtcctttcattatcaacggcaggttcttggttgctatcctgagacattatggggttatttaagtctgcatcgaacgctggtcggagtcggctggaccacccagggtcgatccgagggaaaatcagcgggcctatccctataggagatgacgacgaatttcccattcgacacccaggctcggggtttgcggtagaaggcgagccaagacagcttaatcgcgaagagacaatggaggaaagagcatcggtagctatgtcatcgcaggcagctttcaaccctgcacgggagcaaaagggtgaatccttgatgcagtctgggcccagtcaggcctcagcgaccccaactcgccagcgacggcaaaccctgaggtattccactgctagcgaagctaccaacctggatccaacggtacaaaagaaatcgacgttgagagtcacgatcgccaagctatttgggcgtaagaagaagggaagtcggtcgggatccgactcggaggctcaggcaaggtcatcagaagatcaacgccgaagtaatcctgtaacaacggcgaggatgtctggcacggagggagaaccaaaacgatcagcatcgcttcctctcaatgaattcaatcaggctctaagatcgcactcgcttggccccgatgatttgatggcaattcgtagctctcttcaggatccagtgtctgtattttcgaggcagagggccgtcacaactcccgatcgatattcgaatctcagggacggaggcacgggtatcactggtctttctcctcggccagctagcgcgcaagcacgcgatgctgccgatgatgttgatccgaacactattggtagggcgatttcgggtgatctttcaagcacaagaaggaggtcgagaagtctttcacaattacctgatgtcgctgatgcacaagggaccgtgcgaaatcgcagtgcagaaatccggtattggagggcaagtcacgatccagagtctttacctagcccgattgaagatgagacgaaaatgaacaactcatccggagatgctgaaatacagccgaatacacctcttcaaccttttgatttcggaccgatgcaaatcaccaaagctgcgagcctggaagatcgtatcactgccctggaggctcaaaataagaagttggaatcgttggtatacaaattattccaggttagcgcaagcgtcaaacattctagtgagtctggttctcggactgcgctgtatgacggtcccgcgacaacgcatgatcgcaatttggattctgagagagagagcgaatcgaacgaatcttttgaagatagcaataccttcgtcggttcaacacccgccttccctactgctgctccacgcccattatctaataccacaattcaatctactaccacaattcgaggggtagcaagcctccctactctttcaggacatttaacaccagatcactacacaaccatgaaagcgttgctagatggagagcgtgccgctaggcaccaactcgagattacagtcacaaagttaactcacaaagtcgacatgctggcgacgatgaaatatcagcatgacgcagatgcagtgccggtatctagattcgatgatgacgacgatgataatgatgaagagcccctgagcgcgagcgtaggggatacttcagacgctttcaagactccacgagaagaagaatacccccttggcgcatttggcgaggaactcagagacgaagaagacggatctcgaaaaaaggcagcgagaactctctctttaagtcaactcacactacctggcaaatcgaaaaagcgtgatccaacagatgaggttgatttatgactacaagggctaggtcccaacgattcggtcacagcctaaccaagtacttcagatcaaccacgcccaaatatcgatgtataataacttacgaaattcttcgatgtagcacggtagcatttcgatcccatatcacgcttttttttcatcaataaggatagggagtgtaaattctcggaatgtcggagtcatacataaatgtcctgcctaattcgagcattgctcttacagggttagtgcatagcagcgttacattgacctcttctcatagacttcatgacgactatcattgtctagcgagcgggtcgatttcacttgcactctcaatcgatatcacgccgcccttgataccaaatgagccacaaatttgatacttcaattgagttctgttggcgaagctttccatttctttaacgaattggttctagcgcgtgtgcgattttggaatctgccatttttatgtataatagtcttaatctttaatcgtttcgaattgaggaactgacgcgatgcattgcgtcatcgcacgatttattcgctttgccgttctgtgtgtgtgctcgttatttcgcggggcttcccctctcgctcaaccatgtcgctgcgatgtagaatctgcactacctaggtagacaagaacccttatcgacacaggggcagagcttggctggttggtcgtggcgaaatacctgctgttgactaattgttgaatatggtttatatatacagtagtacctcccaataatacttcgtaaagctaatccgagatcttcacgcggagataccacaacgaatgattctagattcctggatccatcatcatgaaagctttggtcatagcattttcagccctggtcgctgccttacctcgtgacagcacagtaaacccagcgaatgcagtgtttagcgatgccactgattccacgatcttcacctgcgctgctgcccgttggccgccgaatacaattgctcaggcgaatctaccacaggaaccctcggctgacttagcttcgatgctagcacaagtcgacccagctaacatcgagagcacaatactcaagttagtgtcctatggcacaagacatacgctctcgacgcagaactcgaccacccgaggcattggtgctgcgcgtgactggatctattcgaaatttcaggagtatgcggatgcgagcgacggaaaattgactgttgagaaaatttcctatgtccagcaacctgacggagaccgagtgatattcccaactctcattacggtaggtgtaacactcgtgtgcttcataagctacagctaactatatctctaaattatagtatgagtgattcgttccctagttggattcatctcgggtgtagacattggctgtaatactcacgaagctaacaataatgtagtgatgttgtggcgactttgcaaggcacagatgccaaccgcctctacggtacg

SEQ ID NO: 1478 - DNA, 1491 bp, Muscodor strobelii
  misc_feature: SGI cDNA ID NO. 560095
  misc_feature: Reduced expression when VOC is produced
  misc_feature: Encodes the peptide sequence at SEQ ID NO 1479
atgaaagctttggtcatagcattttcagccctggtcgctgccttacctcgtgacagcacagtaaacccagcgaatgcagtgtttagcgatgccactgattccacgatcttcacctgcgctgctgcccgttggccgccgaatacaattgctcaggcgaatctaccacaggaaccctcggctgacttagcttcgatgctagcacaagtcgacccagctaacatcgagagcacaatactcaagttagtgtcctatggcacaagacatacgctctcgacgcagaactcgaccacccgaggcattggtgctgcgcgtgactggatctattcgaaatttcaggagtatgcggatgcgagcgacggaaaattgactgttgagaaaatttcctatgtccagcaacctgacggagaccgagtgatattcccaactctcattacggttgtttctggtcattacgactccaggaactccgatatattggactacgaaggcgacgcgcccggagcagatgacgactcttcaggagttgcgatatccctggagttagcgagaatcatgagccagcctgactatccgctgccaaaagcaagtatagctttcgtcgccgtcgcaggcgaggagcagggactctatggggctcaatttttggcccagacttacgcgaattctacgccacgagtgaatgttgagggaatgttcaccaatgacatcggtaagaacaatcggttccgtgtctttattcgtcagtctctagaaggatctctgctaatatgtgttatagtcggatcatccaaagctgataacggcgtttctgacccgtttaccatcaggctgttcgcacagggactccctcctgtaaacgttgagagtagctctgtgagagaaactaggctgaccatcggtggggagaacgacactcccgcacgcaacctcgcccggttcgtcaaagaagtttcagaaaacgatgcaacacaaatgaatgtgtctgtgatatacaggctggatcgattcctccgaggcggtgatcatagaccgttcctcgagaacgggtacccagcaaacagatttacagagccgcacgagaacttcgcccatcaacatcaagatgtccgtgtcgaaggcgggattcagtacggcgatcttccagaattttgtgactatgacttcatttctcgtgttgccaaagtgaatggggctgcgctctggagtctcgcgaattcgcccggcatgccgactaatgtgaaggtgaacacgacagcactcgacaataattctaccttctactgggatgcgcctctagctggtgaagagaatgtggtaagctacgaaatagtttttcgatcgacgatatcacctttctggaccgatagcatagatgtcgggctcgtcaacgaagcaacaatcgctgcgagcaaggacaatgtcatttttggagtgagagcaataggagaaggaggaagaggcgtcgctgtgttgcctttccccatatcatga

SEQ ID NO: 1479 - protein, 496 aa, Muscodor strobelii
  misc_feature: SGI Peptide ID NO. 560095
  misc_feature (143)..(381): Pfam Id: PF04389 Pfam Desc: Peptidase family M28
  misc_feature (143)..(232): Pfam Id: PF04389 Pfam Desc: Peptidase family M28
  misc_feature (4)..(494): NCBI GI: 258575447 Blast Desc: conserved [Uncinocarpus reesii 1704] gi|237902171|gb|EEP76572.1| conserved [Uncinocarpus reesii 1704]
  misc_feature (28)..(494): NCBI GI: 238841736 Blast Desc: peptidase M28 [Microsporum canis CBS 113480]
  misc_feature (39)..(494): NCBI GI: 189197945 Blast Desc: peptidase M28 [Pyrenophora tritici-repentis Pt-1C-BFP] gi|187981258|gb|EDU47884.1| peptidase M28 [Pyrenophora tritici-repentis Pt-1C-BFP]
  misc_feature (58)..(495): NCBI GI: 189197535 Blast Desc: peptidase M28 [Pyrenophora tritici-repentis Pt-1C-BFP] gi|187981053|gb|EDU47679.1| peptidase M28 [Pyrenophora tritici-repentis Pt-1C-BFP]
  misc_feature (43)..(495): NCBI GI: 169607074 Blast Desc: SNOG_06590 [Phaeosphaeria nodorum SN15] gi|160707148|gb|EAT86421.2| SNOG_06590 [Phaeosphaeria nodorum SN15]
  misc_feature (33)..(494): NCBI GI: 145605126 Blast Desc: MGG_02107 [Magnaporthe grisea 70-15] gi|145012989|gb|EDJ97630.1| MGG_02107 [Magnaporthe grisea 70-15]
  misc_feature (55)..(496): NCBI GI: 270502646 Blast Desc: peptidase M28 [Micromonospora aurantiaca ATCC 27029] gi|270320549|gb|EFA31498.1| peptidase M28 [Micromonospora aurantiaca ATCC 27029]
  misc_feature (159)..(494): NCBI GI: 261358385 Blast Desc: peptidase M28 [Verticillium albo-atrum VaMs.102]
  misc_feature (193)..(494): NCBI GI: 169605999 Blast Desc: SNOG_06032 [Phaeosphaeria nodorum SN15] gi|160706889|gb|EAT87096.2| SNOG_06032 [Phaeosphaeria nodorum SN15]
  misc_feature (61)..(485): NCBI GI: 255536519 Blast Desc: leucine aminopeptidase-related protein [Flavobacteriaceae bacterium 3519-10] gi|255342715|gb|ACU08828.1| leucine aminopeptidase-related protein [Flavobacteriaceae
  misc_feature: Useful for introducing or modulating the production of volatile compounds
MKALVIAFSALVAALPRDSTVNPANAVFSDATDSTIFTCAAARWPPNTIAQANLPQEPSADLASMLAQVDPANIESTILKLVSYGTRHTLSTQNSTTRGIGAARDWIYSKFQEYADASDGKLTVEKISYVQQPDGDRVIFPTLITVVSGHYDSRNSDILDYEGDAPGADDDSSGVAISLELARIMSQPDYPLPKASIAFVAVAGEEQGLYGAQFLAQTYANSTPRVNVEGMFTNDIGKNNRFRVFIRQSLEGSLLICVIVGSSKADNGVSDPFTIRLFAQGLPPVNVESSSVRETRLTIGGENDTPARNLARFVKEVSENDATQMNVSVIYRLDRFLRGGDHRPFLENGYPANRFTEPHENFAHQHQDVRVEGGIQYGDLPEFCDYDFISRVAKVNGAALWSLANSPGMPTNVKVNTTALDNNSTFYWDAPLAGEENVVSYEIVFRSTISPFWTDSIDVGLVNEATIAASKDNVIFGVRAIGEGGRGVAVLPFPIS

SEQ ID NO: 1480 - DNA, 1603 bp, Muscodor strobelii
  misc_feature: SGI EST ID NO. CUFF.4306.2
  misc_feature: Variant of the nucleotide sequence at SEQ ID NO 1478
ccggctaccaggttgtttctggtcattacgactccaggaactccgatatattggactacgaaggcgacgcgcccggagcagatgacgactcttcaggagttgcgatatccctggagttagcgagaatcatgagccagcctgactatccgctgccaaaagcaagtatagctttcgtcgccgtcgcaggcgaggagcagggactctatggggctcaatttttggcccagacttacgcgaattctacgccacgagtgaatgttgagggaatgttcaccaatgacatcggtaagaacaatcggttccgtgtctttattcgtcagtctctagaaggatctctgctaatatgtgttatagtaagtacgccttatttcgatcaaacagtctggcaacggccggtgaattttaagacagatcgattccatttgatgtagtatctaataaaaacccggactgatatactttaggtcggatcatccaaagctgataacggcgtttctgacccgtttaccatcaggctgttcgcacagggactccctcctgtaaacgttgagagtagctctgtgagagaaactaggctgaccatcggtggggagaacgacactcccgcacgcaacctcgcccggttcgtcaaagaagtttcagaaaacgatgcaacacaaatgaatgtgtctgtgatatacaggctggatcgattcctccgaggcggtgatcatagaccgttcctcgagaacgggtacccagcaaacagatttacagagccgcacgagaacttcgcccatcaacatcaagatgtccgtgtcgaaggcgggattcagtacggcgatcttccagaattttgtgactatgacttcatttctcgtgttgccaaagtgaatggggctgcgctctggagtctcgcgaattcgcccggcatgccgactaatgtgaaggtacttatttttggagttgttttgttccttctggatactactttgactcatgcaagctcccggaaaatcacgatgagtaatggttttttaaacgaagggagaaactactgactcgcaatggctaggtgaacacgacagcactcgacaataattctaccttctactgggatgcgcctctagctggtgaagagaatgtggtaagctacgaaatagtttttcgatcgacgatatcacctttctggaccgatagcatagatgtcgggctcgtcaacgaagcaacaatcgctgcgagcaaggacaatgtcatttttggagtgagagcaataggagaaggaggaagaggcgtcgctgtgttgcctttccccatatcatgatggtggaaatttggtggaaagaggacccttgttcggttgcatccggaagcgagtgtggcttgcgccaagaaggcaccgttccttcaggtcccctcaggcaatgcaatttggttgatgcaacatgaaaaagggggagaaagagtagcaataatgataacactgtaaaattgatacctctgatttactggtacacgatgagcattttttcaacttttcaacttttctctttgtctggcctggtgttttagcaacaaaacaccgatgggaaattgtcaggccagctcgccatctctagcaaag

SEQ ID NO: 1481 - DNA, 1542 bp, Muscodor strobelii
  misc_feature: SGI cDNA ID NO. 560096
  misc_feature: Encodes the peptide sequence at SEQ ID NO 1482
atgaaagctttggtcatagcattttcagccctggtcgctgccttacctcgtgacagcacagtaaacccagcgaatgcagtgtttagcgatgccactgattccacgatcttcacctgcgctgctgcccgttggccgccgaatacaattgctcaggcgaatctaccacaggaaccctcggctgacttagcttcgatgctagcacaagtcgacccagctaacatcgagagcacaatactcaagttagtgtcctatggcacaagacatacgctctcgacgcagaactcgaccacccgaggcattggtgctgcgcgtgactggatctattcgaaatttcaggagtatgcggatgcgagcgacggaaaattgactgttgagaaaatttcctatgtccagcaacctgacggagaccgagtgatattcccaactctcattacggtagtgatgttgtggcgactttgcaaggcacagatgccaaccgcctctacggttgtttctggtcattacgactccaggaactccgatatattggactacgaaggcgacgcgcccggagcagatgacgactcttcaggagttgcgatatccctggagttagcgagaatcatgagccagcctgactatccgctgccaaaagcaagtatagctttcgtcgccgtcgcaggcgaggagcagggactctatggggctcaatttttggcccagacttacgcgaattctacgccacgagtgaatgttgagggaatgttcaccaatgacatcggtaagaacaatcggttccgtgtctttattcgtcagtctctagaaggatctctgctaatatgtgttatagtcggatcatccaaagctgataacggcgtttctgacccgtttaccatcaggctgttcgcacagggactccctcctgtaaacgttgagagtagctctgtgagagaaactaggctgaccatcggtggggagaacgacactcccgcacgcaacctcgcccggttcgtcaaagaagtttcagaaaacgatgcaacacaaatgaatgtgtctgtgatatacaggctggatcgattcctccgaggcggtgatcatagaccgttcctcgagaacgggtacccagcaaacagatttacagagccgcacgagaacttcgcccatcaacatcaagatgtccgtgtcgaaggcgggattcagtacggcgatcttccagaattttgtgactatgacttcatttctcgtgttgccaaagtgaatggggctgcgctctggagtctcgcgaattcgcccggcatgccgactaatgtgaaggtgaacacgacagcactcgacaataattctaccttctactgggatgcgcctctagctggtgaagagaatgtggtaagctacgaaatagtttttcgatcgacgatatcacctttctggaccgatagcatagatgtcgggctcgtcaacgaagcaacaatcgctgcgagcaaggacaatgtcatttttggagtgagagcaataggagaaggaggaagaggcgtcgctgtgttgcctttccccatatcatga

SEQ ID NO: 1482 - protein, 513 aa, Muscodor strobelii
  misc_feature: SGI Peptide ID NO. 560096
  misc_feature (160)..(398): Pfam Id: PF04389 Pfam Desc: Peptidase family M28
  misc_feature (160)..(249): Pfam Id: PF04389 Pfam Desc: Peptidase family M28
  misc_feature (4)..(511): NCBI GI: 258575447 Blast Desc: conserved [Uncinocarpus reesii 1704] gi|237902171|gb|EEP76572.1| conserved [Uncinocarpus reesii 1704]
  misc_feature (28)..(511): NCBI GI: 238841736 Blast Desc: peptidase M28 [Microsporum canis CBS 113480]
  misc_feature (39)..(511): NCBI GI: 189197945 Blast Desc: peptidase M28 [Pyrenophora tritici-repentis Pt-1C-BFP] gi|187981258|gb|EDU47884.1| peptidase M28 [Pyrenophora tritici-repentis Pt-1C-BFP]
  misc_feature (58)..(512): NCBI GI: 189197535 Blast Desc: peptidase M28 [Pyrenophora tritici-repentis Pt-1C-BFP] gi|187981053|gb|EDU47679.1| peptidase M28 [Pyrenophora tritici-repentis Pt-1C-BFP]
  misc_feature (43)..(512): NCBI GI: 169607074 Blast Desc: SNOG_06590 [Phaeosphaeria nodorum SN15] gi|160707148|gb|EAT86421.2| SNOG_06590 [Phaeosphaeria nodorum SN15]
  misc_feature (33)..(511): NCBI GI: 145605126 Blast Desc: MGG_02107 [Magnaporthe grisea 70-15] gi|145012989|gb|EDJ97630.1| MGG_02107 [Magnaporthe grisea 70-15]
  misc_feature (55)..(513): NCBI GI: 270502646 Blast Desc: peptidase M28 [Micromonospora aurantiaca ATCC 27029] gi|270320549|gb|EFA31498.1| peptidase M28 [Micromonospora aurantiaca ATCC 27029]
  misc_feature (176)..(511): NCBI GI: 261358385 Blast Desc: peptidase M28 [Verticillium albo-atrum VaMs.102]
  misc_feature (210)..(511): NCBI GI: 169605999 Blast Desc: SNOG_06032 [Phaeosphaeria nodorum SN15] gi|160706889|gb|EAT87096.2| SNOG_06032 [Phaeosphaeria nodorum SN15]
  misc_feature (61)..(502): NCBI GI: 255536519 Blast Desc: leucine aminopeptidase-related protein [Flavobacteriaceae bacterium 3519-10] gi|255342715|gb|ACU08828.1| leucine aminopeptidase-related protein [Flavobacteriaceae
MKALVIAFSALVAALPRDSTVNPANAVFSDATDSTIFTCAAARWPPNTIAQANLPQEPSADLASMLAQVDPANIESTILKLVSYGTRHTLSTQNSTTRGIGAARDWIYSKFQEYADASDGKLTVEKISYVQQPDGDRVIFPTLITVVMLWRLCKAQMPTASTVVSGHYDSRNSDILDYEGDAPGADDDSSGVAISLELARIMSQPDYPLPKASIAFVAVAGEEQGLYGAQFLAQTYANSTPRVNVEGMFTNDIGKNNRFRVFIRQSLEGSLLICVIVGSSKADNGVSDPFTIRLFAQGLPPVNVESSSVRETRLTIGGENDTPARNLARFVKEVSENDATQMNVSVIYRLDRFLRGGDHRPFLENGYPANRFTEPHENFAHQHQDVRVEGGIQYGDLPEFCDYDFISRVAKVNGAALWSLANSPGMPTNVKVNTTALDNNSTFYWDAPLAGEENVVSYEIVFRSTISPFWTDSIDVGLVNEATIAASKDNVIFGVRAIGEGGRGVAVLPFPIS

SEQ ID NO: 1483 - DNA, 1603 bp, Muscodor strobelii; identical to SEQ ID NO: 1480
  misc_feature: SGI EST ID NO. CUFF.4306.2
  misc_feature: Variant of the nucleotide sequence at SEQ ID NO 1481

SEQ ID NO: 1484 - DNA, 1794 bp, Muscodor strobelii
  misc_feature: SGI cDNA ID NO. 560097
  misc_feature: Reduced expression when VOC is produced
  misc_feature: Encodes the peptide sequence at SEQ ID NO 1485
atgcgtttcaatcttatccttggcgctgcggcgcttgtttctgcatcaccagcaccgcaggcccttgattttggggctgtctatgatgcacctgctcctcttctccaaggtcctcctgtcggtgcatcgtcacagacaggagtgtacgacaagtcggcagtgttagcttctattgctgctgaggccgagtctctggacaagcgccattatcctgttaatcattacacaacaaccaagaagggtggatatcccgtccagcaaacctcgaagacgtcgaccacttcacatacgtctagcactacgaaagggtatccggtccagcaaacctcgaccactacacatgcatccagcactacaaaaggataccccgttcaatcgacctcaaccacttcatatgcaactagccccacacaagggtatcctcaaggcaatggaggttacccacaaggtaacgggtatcctcacggtaatgaaggctacccccatggaaacggaggctatcctcatggaaatgaaggctatccccatggtaatgaaggttatcctcacggcaatggaggctatcctcacggcaatggaggctatcctcacggcaatggaggctatcctcatggtaatggtggacattaccacacgaagacccatcagggaggttatccaactgagggccagggatacccggggcaacagacctcgacgacctcaactacttcacatgcgactagcaccacaaaagggtatccagtccagcaaacctcgaagacctcgactacttcctctacaactagcagtacaaaagggtatcccgtgcaacagacctcgaagacgtcaaccactacacatgcaacgagcaccacgaaaggatatccagctacatccacgtacactggcattgtcccagcgacttgcactcctgtcagctggacaaacacgaatgctttcactactgccaccgcctgtcctactccatttgaggtcggaacctattgtggattcatcaaccccgaggatccatgtgctcctcagccagatggttacgggccaaaggtcgttcccgatactcctgaggctttccaagccagtaaggagctcaataaccttgctctgtcggctgctactcccaagggctacactcagacctttaaggatctcaatgctgcggtgaatgccaacacatatctcggccttcacaccctcaagagctacgacgtgtctagctgtgctgctgcttgtgactcgaccgatctctgcaccgccttcaacatctacatcgagcgtgaccccgcctggaaccccgagcaatgctcttgcaaattaccatcctccatcaccaacttcaagtgcactctctggggctcaggcgtagactctgctgcggccacgaaccacggccaaagccgaggtgacttcgaggtcgtgatcacgggatccaacggttactccaaggcgagcaattcctaccccaacactccgcctaactggacccagccccagcaatgcagtggtgtccacgaccatccgaagaacaccatcggaagccacgccttcaagggaccctttgatgtctctatctgcgcagctctcgccgaccaatacaacaagctccggggcggcaagcgcgaatgcaagttcttcaacgccttcatgttgaaggagaacggcatcccgatcggtacatactgcaagctgttcgaccgcaagtacgaacccagtgaggtctcttaccctcacggattctcgtacggcggaaagagctggggctacgagacatcctacagttactgcaagaaataa

SEQ ID NO: 1485 - protein, 597 aa, Muscodor strobelii
  misc_feature: SGI Peptide ID NO. 560097
  misc_feature (296)..(594): NCBI GI: 189191860 Blast Desc: conserved [Pyrenophora tritici-repentis Pt-1C-BFP] gi|187973875|gb|EDU41374.1| conserved [Pyrenophora tritici-repentis Pt-1C-BFP]
  misc_feature (338)..(594): NCBI GI: 156033047 Blast Desc: SS1G_13599 [Sclerotinia sclerotiorum 1980] gi|154699002|gb|EDN98740.1| SS1G_13599 [Sclerotinia sclerotiorum 1980]
  misc_feature (294)..(594): NCBI GI: 169623245 Blast Desc: SNOG_14859 [Phaeosphaeria nodorum SN15] gi|160704942|gb|EAT77711.2| SNOG_14859 [Phaeosphaeria nodorum SN15]
  misc_feature (339)..(594): NCBI GI: 154301419 Blast Desc: BC1G_10379 [Botryotinia fuckeliana B05.10] gi|150856119|gb|EDN31311.1| BC1G_10379 [Botryotinia fuckeliana B05.10]
  misc_feature (339)..(571): NCBI GI: 156048538 Blast Desc: SS1G_09000 [Sclerotinia sclerotiorum 1980] gi|154693397|gb|EDN93135.1| SS1G_09000 [Sclerotinia sclerotiorum 1980]
  misc_feature (339)..(594): NCBI GI: 156055144 Blast Desc: SS1G_04923 [Sclerotinia sclerotiorum 1980] gi|154702708|gb|EDO02447.1| SS1G_04923 [Sclerotinia sclerotiorum 1980]
  misc_feature (339)..(571): NCBI GI: 154308896 Blast Desc: BC1G_07976 [Botryotinia fuckeliana B05.10] gi|150852602|gb|EDN27794.1| BC1G_07976 [Botryotinia fuckeliana B05.10]
  misc_feature (339)..(582): NCBI GI: 154289727 Blast Desc: BC1G_15977 [Botryotinia fuckeliana B05.10] gi|150848792|gb|EDN23985.1| BC1G_15977 [Botryotinia fuckeliana B05.10]
  misc_feature (333)..(568): NCBI GI: 189210375 Blast Desc: conserved [Pyrenophora tritici-repentis Pt-1C-BFP] gi|187977612|gb|EDU44238.1| conserved [Pyrenophora tritici-repentis Pt-1C-BFP]
  misc_feature (333)..(594): NCBI GI: 169619074 Blast Desc: SNOG_12730 [Phaeosphaeria nodorum SN15] gi|111058908|gb|EAT80028.1| SNOG_12730 [Phaeosphaeria nodorum SN15]
  misc_feature: Useful for introducing or modulating the production of volatile compounds
MRFNLILGAAALVSASPAPQALDFGAVYDAPAPLLQGPPVGASSQTGVYDKSAVLASIAAEAESLDKRHYPVNHYTTTKKGGYPVQQTSKTSTTSHTSSTTKGYPVQQTSTTTHASSTTKGYPVQSTSTTSYATSPTQGYPQGNGGYPQGNGYPHGNEGYPHGNGGYPHGNEGYPHGNEGYPHGNGGYPHGNGGYPHGNGGYPHGNGGHYHTKTHQGGYPTEGQGYPGQQTSTTSTTSHATSTTKGYPVQQTSKTSTTSSTTSSTKGYPVQQTSKTSTTTHATSTTKGYPATSTYTGIVPATCTPVSWTNTNAFTTATACPTPFEVGTYCGFINPEDPCAPQPDGYGPKVVPDTPEAFQASKELNNLALSAATPKGYTQTFKDLNAAVNANTYLGLHTLKSYDVSSCAAACDSTDLCTAFNIYIERDPAWNPEQCSCKLPSSITNFKCTLWGSGVDSAAATNHGQSRGDFEVVITGSNGYSKASNSYPNTPPNWTQPQQCSGVHDHPKNTIGSHAFKGPFDVSICAALADQYNKLRGGKRECKFFNAFMLKENGIPIGTYCKLFDRKYEPSEVSYPHGFSYGGKSWGYETSYSYCKK

(The sequence listing continues in the following parts.)
